United States Patent Application Publication US 2013/0096032 A1 - sequence listing, part 23

SEQ ID NO: 745 - DNA, 127053 bp, Arabidopsis thaliana
aagcttgacactttatggttttgtcagtaccattggcaagtaaccagcgggatccagactgttgttgtgatttcgtacaccatggatggtctgcaccaggctcaattttcaaacccgctagaccaatttcagtgattctccacaactgcgtatcatatccaaaggattccttatttcttccttcttgagccaaactacataaagatgaatttggggaatccaaagacctttcaacttgaatcagagcaagcatagatgcaccaataggttcattatttagggatggatctcgaagtaacacttgaagagcaagtgtcaatttgttccttaacgtatgaccctttccattagaagctaaatcttgatctttgttttctagcattccctggtcaagccttaaccactcatccaaggttaaggaaaaacgtatcaactctagagcgtcagactgatccatgggttttggtgcaattcctgatggtggatcttgatctgacatgctgcattgaatctttaatccttctatcgagagaatgtatatctcatcaatagctaaggaagtgacatcttcaagaggtacattacttggacacatactggatccaaattcttcatttgaagaacacaaatgcagctgtcctggtggtttctgaaccacgacacctttactcttgtcagaacaatcctgtccagttctgtaagccatgaaacaaaaaagaaaacatgaaaactatatcttttttaggacttcgaaagtagaaatttaatgcttaatgtattgtatcaacatggtggaaagtatctgaacctcttaaattttgtgacatcgacaacttcatgtattgtcttccccataatatcttccaaaggaattaatgcattaacttcagagcaaagtccttcaattccagaagctgcaaaaatttgtagtatttcaaggatatcagaacctaattctgatactagcaccaccgggactgaaacttgcatgatcagttgtgatgcctccttagactctctgaacagtaaatgattcatggaccgaatacaccctcccccttttgtccaaacagaaggaccaatattatctccaagtggaagcaaatctaatcccttgtcaactggaagctctattggacttccaaacccatcagagcaaacacataaagagttatcaaaactgttgtcatcaaaatcacactctcgcaataaagtttcagtttccaagtcttcaagtaccttggcctttctcctgtctattaacagctgagattttccctcacgcttgttttccccaacatccaaagaacttgcagagaatgagaaatcattcgatttctcatcaatatcagaaacatattctgcttctccatttaaatctaagagaaagtttccagaagcgaaagcttccttctcaaactctcgaagcagagattcacgaggagatgtaggttcaccatctgaggtataaacataagaacactcctcaagttcaagcatgtttagaaaatcattagctacagactcagtaatgtcatccaagcttagtgacgtcattgatattttggcggctttataactagatttaacttccaaaaagttttctttctctgtactatcatccattgccgatggagatttactctcagatgactcagaaattacctggctactgaaagttgacttgggtgttccatcaactgaatgttttggcaacaaattacttggttcactttttagtgcggccactgataactgatcaataaaataggtttcctcgaaaacggattcatcttcatctttaagtatctcatggacatcaataatttcaattctcgaggactctgtatttggatcattgctttcttccagcccggatctttcttgctgaaacgtctctactccttttccactgtcatcagaatcagctgcttgtttgtcagtctccaaacctagttctacctcagttcctgttgatctttgtgggttttgttcgccaagtttctcatagagaaaatctattgactgggaaagattcaaactcagactcggggagacttcattgacaacctttccatcatcaagcggtggagatctatggtccatacttggaacactaccaacccgcctcagcatcacatttttacttgtagagtcacagactgaactggtgacaactgagtaatcaaaactaagattcaacactgcagactccgccaggccagataatttgaagctcgtgttccactttctcgtgcttcttgtaccttccatttcctccagagacaacggcaatatccttgtaagatcaatccaatgcttacctaatacaagccatggagcatcaacaggagagacatagatcaaaaaaagcttcacttgatactttgcagaacgatgaggcccatgtttactaccgtataccgaacatctatgcgttaaggtctcttcaaactcagcagttccttgcaaaaccttggaaggttgagtagtcatcacttcatctttcctcttccactgcacaactaacttagtaccatccaaattcaaaggcaacccttcaatggaatgaacatggagtagaaaacaaacatcaaacctacgctgcccaaaatgagctatagcattcaaaggcttcttccaattccatggtaccaacgatttcttcttcttatttgacaatactaacccaatctctgtagttctcgaaacagattgagatcgaacaggaggagacaacgaaagcaccggtctttgaggtccattggtcaagtaaagagctttacttacctccttaatgtctctcaaaagctgtccattatataaatctgctgatgaatcctctctatcattcacagacattgcttacactctctttgatcaagtcatcaacaatgctgaagaattcatagaaacaatcattgcttagttcaggaaccacaaaaacaagaatctaacacgacccagaacgtaaaaacgaaaactttggaatgggtttagtctctaatggaatcagaatacttaaaggtctctgatttcaaaaacaattaactcagaaaacagagataatctaattcttaccggtttcaaaggattttgaaagagtttctggggattctaaaaatagaaaaacttttgaagattctttggaagatgacttcacgggaaaagcgtgagtgaatttaatacttggtttcgccggtagggtttcatttgatttccggtgggtccaaattggagtgatgttgttggtgatgtagtgacgtaaataaccatagaggaaaagcagagaagaagatgaagatataagcgagataagtgtgtgttgtttttctgtatcaaaaacggcaagacaacaaccagttttttttttttttttgtcgtcagacaacaaccagtttagacacaccacttgcccctaacttttgaattcactagatgaataattttatcaatattatcaatatataggtatcatatttactcattacgttgcatataagtaccttttgaacttcaaacaacaaatcacaccaagaacaattacattcaaaagaaaaaaaatggcgaaaactctttcaatagtttatgtcgtcctagttatcatttcataaacaaattttaatttcaaattagtatctagcataacatgcaaagaagcatttgattatgtggacccgtgcctcccacacgttatgcggccatattctatcaatcaatcatattgtgaaggttttaagcatgtggaccgtcaagcgacgacaccacaaattcgccaaacctatgtcactgttttcagttaggtataaaatgatttcctcagatgaaggttcttcttgagatgccaaaagtatgtggcatagcttttgcgtttccattcgatttaaaaacaatttgccaaaggtaacgttttatattaaaagtaataatattttaacgttaagtttttttttctctgattttcttcactttttattcaatcatacatttttatgtcaatggttgtcacaacaaaaaattgttttttttttttgtagcggaaaccaattatttgataactagatcatgaccagtgttacaacgcaggttaaatttcatttagtacaaaaatttatatatcatatattttataatatagttttgatatattacgtaagtaagtgaaaaatgttaatcttatgttaacaaccacaaaatgagattgtatatatttcagttagatcaaaaaataaaatatcataaatgagccgcatctaaaaactaacatgtagattattttgagttaatttaagaaatttagtattaatttgtaattctttggttgttgaaatggagatttgtttgagttaattaggaaatttagttattttttgcaattttgcataatccaatatattttaaacatatttttggtatataataatactgaattcaacctatatatggagtttatattttcattttgaaatcccaataaaaaattgcttgtataatcaattttttttccaactatttagaggtgtcaaactctatttatataattttatcatataatattaacccgccgtctcttaaaatatttttagtgagttgaattagtttgctctttaaaattttatttccaatggtatttctaagtaattatttacaaagggtaagggtactttgttaaatatacttcccaaataatagtataagattatttcaagaaacaagtaaatgagtttaaaataaaatacaaattgtgtaccaatcaacccatttattcataatttttaattatatcttacaaaataattttaatcctttttatatatccaattaaaaaaatttaaactaaccacttataatttctaaatattttgcgcagcattaaggtttgaagaaaaaatattgggattatcaaggacattttaaatggaaatctatgtactttaatatttacataatactcaaataaattttaatttcattcatctattatgagaaactttctcaaaattatgagtgtcaattttttacaaaatgaaatcaaaatcctacacctaatcatacaatatatagtcctcggcaaaaaaaaactgattcgaatttaccgaaccaaaaccaaatcgaacaaagaggaaccaaagtcgaactcaaattgatgtactaactcaaattgatgaactcgaattgaaaatagcttggcggaagcatatgattaagactagtgtgaaaaaaataggaaaaaaatatcatttaaaccatcagtttactattttcgttggtctagtatcgtgagttaaatctttaatttatcttaacttttaatttaatcataaattttagttgacaaagccaattaagacacatcatcaaaaattatcataatcaaaaaccctaaatatccaaaatcgatttctgattttttctatatttttcttcagattttctcttcttcaacgaatttaaagtaatctctggtttctagtttttagcacatccctaactgttgtaactccacttaattaaaaaacaaagcttcgaaatcaactcgaagcccaaaacgggctacgctaaaatcgtcatacccccaccaaaagatgacctgtgttattagtttaaaacaagtatttaatcaaatagtatttattttaggacttcttctatactaaggtaggctcaatttttagagaatgcaaattatgaaagattatgtgtttttagtttttaaacaccatattttcttaaaacttgtattgatttcccatatttgttttttcgttaaagagattttcccatataataataaaaaaacaactgtttagtacatatttattaccaatacgtatctaaaaatactttcgttttttgaccgaaagaaaaataggtaataatcaatggttgataagaacttgatcatgtctcatttaccaaaaaagaaaagaaaaagaaacttgatgtctcgtccgttgaattgagagaagaaaaccttagaccacaagctcctttgcggtgacataattctgcctagtgtggtatgaccatgatggcttcaccgtactcgtccgacgatatccattctccggtgaactcaacggtcgttgcaatagacaaagagaaacatagttcttacgctgttcgttgggccgtcgaccatctcctcaatatgattcacaatcccgtcatgattcttgtccatgttcgtaccaaaaattcaaaccgtaggtaccttatactcattatcctataatattggatttattatcattcttggaactactaagaatcatcatgtgttttcaaaacgttaaagattttgaatgaattgcagatggagccaacttgaacaatgatgatctaaatcagctttttattccatatcgaggatattgtgcgcgaaaaggggtatataatatatagttaatccttctaccatttcgttttcaagcatatatgaacagaaatgttttaacgccatgcactcttagtagatttctatgacggaggttgttctagacgattccgacgtagcaaaaacaatcttggattacgttaataacaacctggttaacaatcttgtattgggagcatccacgaagaacaccttcgctaggtcttttatgtttagtaaaccacatgaggtgcaatctagcataatgaaatcgacgcctgatttttgttcggtgtatgtcatttctaaaggagggaaagttcagtcttcccgaccagctcaaagacctatcaccaatacgcttgccccgcctcgtgttccatcctctggctttttaatccaatctttatccgatagcgagcaagatctcatacctaggtaacccaaccttcggttctttttatcagttttctctcaaaacttttactaaaagcaaatgttattgttttcttgatacgttttagggtccagcgtagtgcaaggaacaaacctaatgagactacttatccgcataatcgtgccgccttcaacacgacgcaaaaaggttacaaaagccctataaatgggtcgatggatttcaacaacggctttaatcaagctgccttccaaagaaatcccacgttacaaagttcgttttctgatgaatctgatggtgggtttggagtgatgggttcagttgatctctcttctcaaaatagtatggatttttatcatggtgcatcgagttcttcagaagagtcaattccacaatcaactgtacgttttcttgaacgaatttctttttaggttcaagaattaagtttgaaaggctctaaatgtaaatatggttgttgctttatttgcagaaagatattgaagctgagatgagaaggctaaagcttgaacttaagcaaactatggacatgtatagctcagcttgtaaagaagcacttacggcaaaaagaaaggtaaatagtttaatttgagcaagtttcttgttgagcacggtactcatggcttcttttattttctaggcaaacgagctaaatcaatggaagatagaagaagctcgtaaattcgagaaagcgaggctttctgaagaagcagcattggcagttgctgaaatcgagaaagcaaagtgtagaacagccgtagaagcagctgagaaagctcaaagaatggctgaactagaaggacaaagaaggaagcaagcagagatgaaagctgtaagtgaagaaaaggacaaagaccgcgcagtgagtgctttggcacataacgatgttcgctacagaaaatatagtatagaagagatcgaagaagctacagagaggtttgcaaatcataggaagattggtgaaggaggatatggacctgtgtacaatggtgaacttgaccacactcctgttgccattaaagttttaagacctgatgctgctcaaggaaaaaaacaatttcaacaagaagtaagattttatctattttctattttgttttatgcttttgcgtaaatcatacatatttttgttcttattttataggttgaggttctatgttccataaggcatcctcacatggttcttctccttggtgcatgtcctgaatatggatgtttggtttacgagttcatggaaaatgggagcttagaggatagactttttcgtactggaaactctccaccgctttcgtggaggaaacgttttgaaatagcggcggagattgctaccgcactctcattccttcatcaagctaagccagaacctttagttcaccgcgacctaaaaccagccaatatactcttagacaaaaactacgtgagcaagatcagcgacgttggtttagcgcggttagtccccgcatcgatagctgatagcgtcacgcaattccacatgacatctgcggcaggaacgttttgttacatagaccctgaataccaacaaacaggaatgttaaccacaaaatcagacgtatactcattggggatattgctacttcagattataaccggaaggcctcccatggggctggctcaccaagtttcaagggcaattagtaaaggaactttcaaggaaatgcttgaccccgttgtgcctgattggcctgtacaagaggctcaatcttttgctactctagcgttgaaatgtgcggagctaagaaaaagagatagaccagatcttgggaaggaagtagtcccacatcttattagattaaaaaactttgggaatgatggtgatgagagaactaacgaatggatatgacaaaaaaagaagaaacatatattttgaaatatacacacaatgtaaacaattaattaaacttcatatacaattcatacaatggctcatgttggaattcgaatcgagtctctcttctcataaagtttgtctttttttattacaattttcaaaatacaacatgagccatttcaaattttacatcagggagtacatacctagatttaaaatttaaattccgtttaatttttcgaatagcagaagcacttgatgtaagactgttttttgttttaaataaattttacattaactggttgagacatgtcttgtgtaaagagtgtgagatgacaaacgacctacaaggccaaatctttatcttaccaaatggcaaacaaagtacaagttaaaaggatcgtcattatccccatgtaaatcaatgaagtgcaaagaatgagagatagaggtagctgtgaaaacatatagactccaaccaagaggtatgaagtgtggttattcttttttcaataaggcttcaagatagatttcatttgtatatgaatttttgagtatacaaacaagagattaaaagaagagaaaaagactacatgttaagatgttactaataatttaataccaagaatcatttttaagaaagttttcgtgtgaaatgggatttcaatgtttatgaagttgtaatgtatagaaaaacaaatctttgtaaaattgaaaagacttgcaaatgttagggtttccaaaaacaacaaaactataagaaaacaatatctttgaccagtaaaaaaaaactcaagaaaagatctgaatcttctatacatctatcatagaaaattagaaacaaaaacaattgaaatctactccacatatattgctatataatattgatatttatttctttggatcttccataaagtcgactttaattctgcacatatttattcaaaatgtttaacacaaatattgagaggttcaaaaataccaaactatatgtaagctgatgagattaagccaatcgggatatctctctcgatagagagacgccggaaaaaaaaggggacgcagagggagggtgtggcgatcataaaattacacaatctacataacaatggtatatcaattgacattttaatatgctgattcatgtttgtaaaaccaaaagaatggatgtaaaaatcaaaatcaaaatgtttaactctaaaaactaaatgaaatgctgtagagagagagagagagagggagagggagagaagggggtgacggatagagagtgagcacacatagcttcaagcatggaaccttcaaatatgcaagaaagccaccatgtgtgctcactctcttctgtcaccatcaattcctcaccactcaaaccgtcgacaaatatgtttcatatctcttaatatcacatacatctataaaccctagccactttaaactcaatgaatataatatatagagatatacggatacctttatatatatagatgttccattatggaggtatattgctctaaattattataggataggtgtttctttatctttggctcattggctgtgggaagaaatggagaccctgttgtggctttttatagccaaaatggagagagggatcgagagaaatcctaacaaatcctattttctctctcttctccaattatttggatacagataatcttgcagataatggacgcaaaaaagatacgaaatttattattttatagtaatattgatatatttacttcaaattttagttaattctccctttttgggtcatatgatttgaacattgctaaccaagcccgactggtttattttgtttccgttttcaccatagaattggaagactttacactgtctaatctggacaaacaaggcagaaaataacagaaaactatatagcaaaatctgccataagtctatcttaaatatgcaaaacttaaagcgcataatcccaaatgtttaagaaaaatctgtcaaattctcttttttttttttttgatcaaataacttgctttcattcattcaaataagaacaagtacaaagaagattcaataaacccaaaatttataacaatacaacaaagacattctctaatgccactaaaagatagataagattaattgattttaagaccatgagagctttgagacaagagcttggaaatacattaaaacatgtgagatcacggtgaattgagaaagcattcccgaaagattcgaaggaaagcagattggtcactcaaattctcaaaacctcaaatcttacaaaatatgttaagttctatcttttaagggccatcttttaatacgttgtcacttacaatataagcattttagctacttcgcatgcaagacatgtaaaaatcaattaagcattttcattcatcattacataacgttacaaaaaaagaatttgttaaagacattatgttatgcatcatttacagtatattatctacttattattataatataactaaatctatcttttctattcggattaaaaatccataagaacaccttgccaattattttgataatcaattgtactgagactgcgtatgttttcatgttttttaaacttttttggcatgggaccataaatttggttatgctttcttgtgtaaccttaattttcattgtgaaatgaatatttacatttttagcaaaaaatattgtactgagactgtcatctagtttaaatactatattttagaatattgaggtgtgtgccaatatatacatactagattttaacccgcaatataccgcggggcgatttaccttttaaaagtaatatatattaaaacttgcaaattttatttttataaaatatttatattttacagtttataatattaagtaacactataccacgaatccatgagaattgtaaaaaaactgaagttttaatccctattaaaacagcatattaataatatttttaaattttataaatattgattcaaatacatctaccatataacccaatttcaaaataaaacccgttctgtaatttctttacccgtcccgtgatttttttttaaaatagtaatttttaaaatttaagaatttttattatatataaaagttttgcaaattgtatcattctctaatacatttatattttatagtttaattttatatatagtaacattatacataccacataatattttttttgtgctaatttttatgtgattaagatttaattgatttcgtatataaaattttaaattgttttacgaacttatttgtttataatttggtaacagataaataattgaatattcagtatattttgcttcagtttagaaaatctttgatgacccgtctttagatccaataatgcctataattaagagatgaatattatcattaaatgattttggtaactttaatgacgttattaaaggattttgtttttgattaaatttttctaatggcattatcacgtaattaattacaaaaattaaggttacatttaaaatgtacttcccaaataatataataggatagtaacgtgtgtttatgtacaatgctccggtcacacagattacagatagaaaactaaagaaagaaataataaactccgtatatgtgtgttaacttttgctttagaaacgatgcccgaaaatacataaataaatagtagataatatgtccgaatattggaatcacttatatgtttgtgctttctcgagaacttcccttctgggatttgttctaatcgattcacttttattcataatgcacatttcgttttttttcgtttcagaagatttttgagaatttacttttgaattatgatacagcagaaaacgataaatctgcttataatgtgttactcttttttgttacgtttagagacaaatttaatagctttgttgataatgttttggttaaatgtagagggactattttttttttttttataaatatatactcattttcaattaataagagactatatgtaatgttgattgattggaggaatatgagtgaccacacacacaaagtcacaaatcctataatatattattctataatcttgtgatggttatgggttatgaccatatctttctttccactttcggcaagaaagcatgtggagaatgcccagcctgtcacgtgtcgtaatggggtttgttcgtcgtccaaccctacacatcccaaagtgggagtgggtttcggtttgtgttcacatttcacattttcaactttcattttctttcgtctatcttcaatttgataacaaagtttaattcttataaagttaataaaattgtcgaatgttttctttgctaagaatataaatcatatactctataaataaaataattggttttacaaatctttacatttggtttcttgaagaaaaaaaaaaactagaaagtaataaccagagtggtggttgtggatgtgtcaaacgtcagtgcaaccaaagagtcataagcacttgaaatatcatattaagtcttctagcagtgatggtggtcttaaacgatttaaattctataaattttaatcgtaattctcatgtccataatgcaaaagttaaataaataaatagtttagataattacataaagtccaaatatatttgatgccttattcttaacaaatgtttttcataagttttaattcttaacaattgtttttcataatcatatatatgatcccaaataacagtagttgatatttgtttgaatatagatgactagagagaatatcctaacagttgcaatgtaacaagacaacattgttgtagtccgttaccatgtgattgatatattttcaggcgagagagagtgtgttacgttcaattgaagtagacactttttttttgcatgggcatatttaatgcaaggatcggctaatgtatcttaaatgaaaattggtcaatgttactattcctttatgtctttttcattgtattaatgtcacaaatggatgcattcaattctacgataatttacgttccatggcttaaaataattcaagaacttaaatatgatgaatatcatgcaccatgatcgaaaataatatgaggtagaagttaataaataatggatccatatgccaaaaatatagttcaatactggacgaataaatagttgtcaaagaattcactttacaattacttagccgaaaaattgtgctgcaaaagtattagagccgggctcacttaaaaatcttcaaagtcagactttctaggactagatcaaaacttggcctactatgtttatatctatcttcaagacaatgtagctgagatgtactgttgtttcttttatgactgagactgggtgtcgaaacgagttaacccgcacagtatcttagtctaagatcatatccgagtgttagtggcatgcacatagcttaatagaatccaaaaccggtttatgattgaagaaatgatacaaaggaggtcagttaaaattccaaagtgaaatggatacatataggccagacaacaacaaccaatggagataagaaaaggtaaaaaaaagacaagtgaaacaaatagttagttctgttttctggctaagttgctttcagaagagaaattatctaaatgcttccatgtgagttaaataagctgacgcttttcaagcttagaatctgtcacaatttctttttaaaagaagggacagatcactctaattgattcccaaactttccaacaaacaaaaaaagatgaagaagacataatggccttaaccattcaccaaaagctttgcactattgaaaaaagattgtgactgcaaacataattgatgtctcaaaatgttaaagagattgcttcttatgcacaaaagcatgccaagtttcattgaggcttgttctcatttagtagtgggtaatctccaagtggttcaactttccagctttggtgagaagcaatgtacttgtgtgaaggagtatatagctgccatgaaccaaaaactgaaaacaattgtattctttaaatactcaaaacacatacatatctcaagtgttttaggtacctccatcttctccataagttctctagccgatggcgcggaaacaacgatattacaagcaccttgtttaataaaaccttcttcaactccagtgtcaaagaaagcaagcaaattgttatagtaaccatcaacattcaaaagaccaacctgcagaaaataatccaaattctcatcatcaacatagtatctatctatcttcttatatagatacataccagtaaaaggaacggtgtcaactaccgtcttcttatggataccaagctgtgcccatgttatcatctccagtagttcctccatagtttcatacctcctgatgaaatacaagaaacacccatttttcctaaggccaaaatcgtaggaatttcgtaggaaatagacttttcctaccattttcctacaaccttaagaagccatcatcattttgcaaactttcaaaacttgctagaaattttgaataagaaaactcgcctaggagcgcaatgaaagccccagcttcttgagccattgtagctttgcgctcgtgcatgtctgaaacaattcttacctctccaacagtctcaccagatatgtgcttaaaacaccgacacaatccaaaagcaattaacaaaaccaaaactttacaaaatgaaaaatttgtagaggtcttaaacatacctcaatatgcatcaatgctttaggaatgatcctaaatacatacaaaagctcttaaaatggaagttttgttaaggaaatgatggaaaagtgtcagagagactctaaaaactaacccaagtacatggcaacaccttatgagactctccaagatatcaaacccattaaaccaacacttcctccaccagaaaccaaatctatctttctcttcaccgtaaatattcaaacgaatctttttttagagaaacaattgcttcatttatttcttcttttaaacattcagaacaatacccacaatgaatcctttgttagctggtactatataatggacgcaataacccaataatcaaatataatattttgttagctagtcgagtttaaacaacaattataaatttttagcaatgatatttgaattctaaataagaaatgataatctttattttaaaaatatttaatttagtaaatttattttaaattaaattttatttttttattttttatttcgctatacacttaatgactttaactatatcttattgatgatattcaaattttaaatagtagtcaacacactttttctgtattttatttagtaatttttatcttacgcattctattttgttatacaatttaactatctatttcatcataataattccgattttaatcatgcacatattattttaataaataaatgttaagttttatatcaaaataatatgtgtatcatatcaaatcaatataattactttaaattaaaaataattaacaaataacaaaacataatgaagcaaaaaaaaaaaaaaaaccacaaaatctaacaataatcaccaatagataaacaaatactgatggatgcgcatatatttttagatcaaaattattgtgaattcgaatttctagtatgtgattacatgtatcatttttagatcaaaatgagacataatctaaatcaaattgttgtaacaatatttttctacccagattatatatgtctttaatttgtaccaagaaattgcctagtatatttattccgggcctttattgtcagcctcacataacttttgaaatctctgaaataaacactaatgttttaccaaattactttagtattatccatagattatatctcagaaatggatccaacgagaaaacaaagaaaaattgtggaagtcccctttagtggttaactaaacttatatatatggagtgtaatttcacgaaactaaatcgcagaaactaaattatgaagtcttatttttatctaaatatggaagtcctcttactatgacaggtcagatgaattagttattgatattacgttacgttagacacacgtttcagcgtatacgattcatctaaaactttagacagtgatccggcgatttgatggtccgatgataatagaacaaaaggaattggacgatgacaatagacagtctccaacaagtgtcaatgtgggattttctttcattgttccgatgaaaaagccaaatttaacagtgtaatgtaagcatgaactacgaagagtaagagtatgccgatggaatatgtctatatgatatgagagctagtatatatatcgttctaatatatggaaatttaagtgtgaaagggatacatctttaagaggtagaactcatatcaggttaaattcatctcttttaaagaagatattttttcaaacagacgtcgaacacaatactttcaattggtgtatattttctatttaaactttagtatttttttataacaaatagtgttttactattatttgttttgctttatagttatccggatgttttcaaatcgaaatgaaacggataatagatcaagtaaatctagtggatatttagtctaatcctaatgaaaatatgcttgatttgtttagtgactcgacatccgttcttacgtactctgtacttcttcctatgagactaacttaaacaatggcaaatggttgattcttaaagggaagataattaatctttgatcatgtctcattgctagctaggatctctgaccccttcccctgattgacttggttaaaacagtttttttttttaaatgataaaattactacaagtgttattaatctttcatcaaataactccaacgtaaactctatataaatccccgtttctaacccaatacatacaacacaagctcgctcatagacaactaataaggaaaaagaatgaagatgtttaaatctcctcaaacactaatactttcggttatagttcttttcctagcttttgcagttcctctgaaagcccaagaccagccacaagactacctcgatgaacacaaccgtgctcgaacccaagttggtgtgcctcctatgaaatggcatgcgggggcggagcaatacgcctggaactatgctcaacaaagaaagggagactgtagtctcactcactccaactcaaatgggctttacggtgaaaacttggcatggagcggaggtgctttgtctggagctgaggcagtgaaattgtgggtcaacgagaagtctgactatatctacgcttcgaacacttgtagtgatggaaaacaatgtggtcattacactcaagttgtgtggcgaacctcggagtgggttgggtgtgccaaagtaaagtgtgacaatggtggaacctttgtgacttgcaactattatccacctggtaattataggggccgttggccttactaagtaaaatgtggtacgcagacgaataaaacttgtccatataaggacgtgtgtgtttctataatatcaataaatgatcatctatcaagactatggtgatttgtttgtgtgtttatggtttgtacatgtataatatgttgtgatggaataatacaatttttgtgcttaaaattgtatttatccgaagactcaaattaatttgttcattgtgtatacaaaactgaagtatttttgtcatgtaagccatcaatgtctaaccatgattgaatccacaatgcgaaaacatgaaccgtggtctcttaattacatgatgatttcttcaaccactgcgccaacataatatatattacaatgtttagggttcctacctagttctcctgtaagagtatgtggtaataagtaagctcatggatggctaaaattcaatgacatttcaaaataatatcttggattcagaaacaattaattatatatattcaactcatgacatatataattgagtcagagtgatctttgcatattgataaagatgattatattatttgaaacattctgttgataataaatggccaccttgcccaaaaaaaaaaaagagagtaaaatatgaaacagccatcattacaaattagattaaaacaaaattaaagttgggaaaaattcaaggtggctaatacatataatctagattgtttaaccatcttcggtcggaaaaagtcagatgtgaaactccaacctcaagtatattaattacaaattgaatgatttacgtttgtcctcgatttttatttttcttacgactccttccaattagtctcgccttctatccccatattatataaccacttatttcatcgtaattacatctcaccattaaaaacttcaacataaaattttaccaccatcaacaatagaatagacggatcataattaataacttatggatgatgatccaatccatgataaacacgaacatggcaatatataactctatgtctctatctacaattactacgtacattgtcaggatctccgacaactctataaataagacttactgtaatcagtagtatattccatactaattaagtttcatacataaccatatgagaatgcaaatcatcatgttagaatttcactaatcacgtcaattaatatggcgtgtagctatgaaattattacacttaatcaattggcagatgttaatgataaattgtggtacagatgttaatttttccttgaataaaccttctaaaagttcatattctaaatttcaattaaattatggagaaatgtttttatatagaaactgtcgaatattaccttaggcccctagaaatgtaggaacggcactacatgtaccatgtcaataagatgcatccacaaatgagtaagtaaaaaaaaaaattaagtgaaagattatacacatttttaattagttttattttaaataatattttttctagaagagcctttgcttatatcatcgaaatttccaaaaataattagaagaatgcataagaaggaaaagaaaaagagaaagaacaaaagttgtaatttcttcttcacacgcttttgataaagtggagaaatttgttttcaagcttttgttttatgcccatatattcatcgcgtattcgtgtcagtgcctctattgttttcaagcacattaacaactacatgctccattaattttaatatcgtcaagcatcatatctactacttggacgtgtaatttataagtttctattcgtttgaaagttgaaattaaaaggtggaaaacaaattgaggttcttttttgaagagagtttcctttaaacagtttgttatatataaatctaaaatattagaacttttacaaaacctcatatattatataatttatgtgaatgttgatggttactatattaaatatgaggtttacaatatattttatgtatataatataatgattttaatctgatcatttacgactgaaatcgcaaactctcagaaggaaataatttaaacgttataaagcggtttagctgatttgtgtcataaccaaattaaacaagttctcttattacgcaacttaaagaggcgtgaaagtaatgtctttgctgaatttacctataaaagcaaagcaagtaacacattgtactcttacttttaatcctagtttcactgctcattcgtgtctttcttctatcaaggttactttttttagttgattctagctagctctaatctttgtttcttgcataatgcatgggtctttttgtcttgatcttaaaattttgcttctgcaactacattactcggctcttttgttgtcaatttctgtcaggattttgatttattgacaaagaatctttaaatcaaacatatttacttaatttttgttgatctgaaaagagttagaccacatttttctgatgacatttggaataatgtctgaaatcttcaaaagatgtttggtgatcttcaaagtttcgtacaatgctttactcactttaagtctcctctttggtctcgattaaatattgtctcatttttttttataattttgtgtttgatcccatgttttttaatgatgattatatatatactctggtcattctagctagggttaacccttatttttaagtttcttgaaactgtattaactaaatcttgtttcacttttgcataaattgtctctacaaggtctttctctggttaaatttggtgattatggacatggaaacatcttggagatttctcagaagtgtttgcttactttcatttatccttgggtctttttctgtctaccaaaccctttgtcttgttgacgctcaagaagacgccattgtaacactgcaagtagatgcttctaacgtgacacggcgaccgattcccgaaactctatttgggatcttctttgaggttttttcacaacttcatgacttaattataggatatttctcacccaaattctctctaagcctttattcacattgattaaagaaataatggtgactttgtgaaagtcacactttaagcatgctgcatgcatgagctaaatagaaactattttaatgtaactttactagtcatgatgtttaatgttttaatttagctctaataaaatttatgaattctgatgaaattaattacaggaaataaatcatgctggagcaggtggactatgggctgaacttgttagcaatagaggtttttgtgattttatcttggagttttctataaagcttttcattaaaaagaatggtgaataaaaatctttggttataggatttgaagctggtggacaaatcattccttccaatatctggccttggtccattattggagatgaatcatccatttatgttgttacagaccgttcttcgtgttttgagcgtaacaagattgctcttagaatggaagtcctttgtgacagcaactcttgtccgttaggaggagtcggggtttataacccgggttactggggcatggtaacatttttgtactctcaatcacaattttcatttcctctaatgcttaaaagtttttactcatttgtaaatcttttctattagaacattgaagaagggaagaaatataaagtggtgttatatgtgcgttcgactggggacatcgatgtgtctgtgtcgtttacaagttctaatggatcagtgactcttgcgtcagaaaatattatgtgagaaatgaaatttcacatcctccaatatttttctgaatgttttttcaatgatgtttttcatttatttctgtagagctttggcttctgatcttttaaattggacaaaaaaggaaatgcttttagaagcaaatggaacagataatggtgcaagacttcagtttacaactaccaaaaaaggttcaatttggtttgatcaagtctcagccatgcctatggatacttacaaggtttgtttacttcattgagacaacggcttatagagtctagcagcattttcaaggcagagtaattttgatttttcttgatttggtcacagggacatggtttcagaaatgaccttttccaaatgatggtcgatctaaaaccgcggtttatccgattcccgggtaatttctagagagtaaaatagcatttcacttggtaaaatatgtatgaacataaaaaatgagaaaagctaaaagaattagcaatgttttgggagttaggtggttgttttgtggagggtgattggttaggcaatgcattccgctggaaagaaaccgtgagagcttgggaagagagacctggccattatggtgatgtttggaagtactggactgatgatggccttggccactttgaattctttcaagtaagggatttttttcttttcggttctatatccatttaaagtgtttcaataattactaagctcgaaacaaatatttcttgtagcttgcagaagaccttggtgcatccccaatatgggtgtttaacaatggtaattcttaagctctatatctcaagactttgctttatttacatgtattaacctctgagtgactgtttcagggatcagtcacaatgatcaagttgaaacaaaaaatgtcatgccttttgttcaagtatactcatgaaactttctattttaataaagagagtgatagtaattcattagtaagccaaaaattaaactaaaatgtgtatttctctgtctaaggaagcgattgacggtatagagtttgctcgtggagattctaattctacatggggatcggttcgagctgcaatgggacatccagagccttttgaactgaaatatgttgcggttgggaatgaagattgttttaagagttactacagaggtttttgcatttctctctgttatttaaaaccattttgaaagatacaaacaagagagctttggttatactaacttaaatacacaactttttacaggaaactatcttgaattctataatgctatcaaaaaagcttatccagatattaaaatcatctccaactgcgatgcatcggctaaaccgctcgatcacccggccgattactttgattaccacgtaaaaaatacaaaaaacaaaaaaaaactttcaaattttaccattcatatcattgattttgacagaatcttgttattcagatttacactcttgcaagagacttgttttccaagtcccatgattttgacaatacaccgcgaaacggtccaaaggtgcggtaatagatgaaacaaaagagttcattttcgacaatgaaaaactgcggttattcgccttgtatattcttctaatgaagaagctttcaacattttcttggttataggcttttgttagcgaatacgctgtaaacaaagcagatgctaaaaatggcaaccttttggccgctcttggtgaagcagctttcctccttggtttggaaaagaacaggttttttttttctcaaacctctatcttcttctttggttttgaaaagaaaagttaaaacactcactgtcatgtttttgttgcagtgacattgtagaaatggttagctatgcacctctctttgtcaacacaaacgatagaaggtatctctcactttagtttcaacggtttttatcggtatatcttgaatgcggtaatcagaaacaagcccgttgcttttgttttgtttttcaggtggatccctgatgcaatagtttttaactcgtctcatctatatggaactcctagctattgggtccaacacttcttcaccgagtcaagcggagcaactcttctcaattctacacttaagggaaagacttcttctgttgaagcatctgccatctctttccaaaccaatggcaaagattacatacagatcaaggtttgcttatctcccatacgcacaaaacaaatgtctagaaccaaatgaatgttctgaccaaatatgaatacacaggctgtaaactttggagaacaatcagtaaatctaaaggtagcagtgacaggattgatggcaaaattttatggatccaaaaagaaagtacttacatctgccagtgtgatggatgagaactctttttcaaacccaaatatggtaaaacatatgaagaatcaatcatacaagagttagggcttagtattgttctgaatcttgaaaacgttgctaagttgttttctctgttcttttctgtagattgtgccacaagaaagtttgctggagatgactgagcaggaagaccttatgtttgttctcccgccgcactcgttctcttccttcgatttgttgacagaatctgaaaatgtcatcaagatgccaatatctgattcatacaagaaaacttcaacaatgtgaagagaaacatcatcttggagactttcatgtcttttgtctttactcttcagtggttattaaacacataaacctatatgttcgtgaataataccaaagttagttgattataatcacgttatgcccttagattacttgatatgcaagattactcttccttggtaaaaaaaaaacaatggtaacacattagaccctaaacagttcagtcaaaggaacttacattgtgtcgtcaaaatgcagctaaaaatagcccaaagtttaattctttattgtttaaaatccttatctaacaaacattgcttctcacagtttcttgtttttttcttttcttcaaactataattagaaagacatcgagaacatatcttaatacttgagaaactaaaatcccctaaattccagcaatttatctgtcctttcaaagcaattttaagattaagagaaccataaaattaaattccattactctcacacaatttttgattatattataacattttgtatgttggagcaagatggctcccttcatcgccttattcaccggcctttgtggcttcaagaaaaacgctcggccattgggaacgattgagacgatgtatcagtcatctcctcgggagaccaaagaaagagaacaaacaaataatgacttgcagatcacgaaaagtgatgacttgtggaacaaggaaagcgatgatcgagatactaatgcatttaatgacgatagtaatgaagcggactctgagcttccgttgcctccaggaagaaaaggaacaatacgtggaacatattcgtgtaacaacatggtgttaagaagatccttgtctactaagaagaaactgagtgcgagcctaacgatccaaataccgagatcattgtccatggtcctcaaacgtgacaaggaggaggataaatctgtgaggaagaagaaactgaacgcagataattcgattctggtactcccaattatacttggagagagatgtagggttcttgatgcggaagaaggagatgaagatcaaagccaaagaatggcagagaacagaatatatcgtcctagatccatgagttcgatctcgatttcgagaaccaagtcgaacatcgatatgaatgctattcccgtagaagtaacatcagaagaacaaaaaatctgatattatgatgtctaaaatgaactagcttcatggtgattaggggttaattacttaattgttaaatctcatgaatctgagtgacatcatcgtgaaatatttcgatggagagtgatatcaccaatttagtttgaaggatcatgataaagaaaagtactcaatgacttggaagcttttttgaaacaagtagagttgtaatataaataccggttcacaaaaatgtaaacgaattgatttggtttcatatatagacatatagctaaagtgcatttggctaaagaatttcactattagacattgtttcaaatcattaaaattcacaagccaacatatttgtctttttttaatacatgtaaaatttattcgaaaaaacgtttttacatcaagtgcaacatttggtaaataaattgcgtacaaatttccaagttttcatggatctatcttctatctcattgttaacgaatagaggagatccagtttcagacttgtttgtcgagttatcgaagcaactgtacgtgctggtggtattggtgtctctccaaattattaaactctctaagatgcattcattgtaatttttattttttttctgatgaagataattttatattcatccaaaaaaaactatctaatttgggtaaaaattgagaatgacttaaggattatttagaaaataactcaaaatgtatcaaatagggttttggaaattttccaaaccgaacgaactaatcataaacaatgctgtttctgtttttcaattcaaatttggataaaccaaacaaaaaccggttcatgttcttataatttcggtttttgattccggtatgcacctagataaccggaatcaaattaaaattaaaaaccctagttccgacctcgtcttcattgttcacaaacgagtcgccgacgacaaactcaggcgaaaatttcgcagcttctcttcctccggcggtgaaacacaggtgagccgcgagcctttccgaaagagaagcttctctctttccaacgaaaacaggcgccgcgaatatctctctcttcgtctcattctccggcgaacacatacgagctcctctccgtcaccactcagcttgcaggttcaattcgacgataatcttatgcaatttagaatttttgaccaacttggcaagcttgttgtgttaaatgatgaaaggcagattttttggtcaatggttgttgataactgaagtagagatctttagttggaatagacttaagctagaagcgattattgtgtggccttattgctagagcttcaaaaacaattgctaaagtctcattctttatgttggttttgtgtagaatcctgagaaatttagaatggattgtgaggaaaacgttagggatgaatcactcgttttgattaaacaaggagcagaagctgtaagtgtctctgtgcgaatctgtgtatatgtttttctgtcaagattaagtcttttcagttttatctatagagggtgttcgagtctacatttgctggaagaagatccatcgtgaaagaacgtttctcgaagaaatatagacatccgattttggatgcaaaactcacacttaaacgcttgaatgcggttggtttactccgcctttttcttgtttcgttgatgaagtcatgagaaagagaagtaaaaatcgagtatttcatcttatatgtgcttatttgttgaatataggaagctaggtgtatgacaaaggcaagaaagctcggggtttgtactccagtcctatatgctgtggatactctgcttcactctttaacacttgagtacattgagggggtctctgttaaggatattttccttgagtttgggaccaatggggttgttgaggaacgtttagatgatgttgctgctcagattggggctgcaattgctaagctccatgatggtggcttggctcatggtgatttgaccacatcaaatatgttagtcagaagtggaacaaatcagctggtaagtatcttcagaggttgtgataaagttctcttgattagttacttatgattcatgaccatggatatgtcttccctcaggtactaattgattttggcttgagcgtcacatcgaccttgcctgaagacaaagctgttgatttatatgtacttgaaagagccttactctcaatgcattcgtcatgcgggaatgtggtaagtgtgatgcaaatcataacttcactacttttgctgggtctgttgttgttgttgttgttgttgtctcactgcgtattttgttgtcaattgtagatggatcgtatactgacggcgtataggaagtcctcaaagcaatggtcagccacgtttaacaagctcgcacaaggttctatcacactcctcttccacctcctcttttaaaaccaactcttcttcaaacctttagaaagtcttcttttggtatatgcagtgagacagcgagggagaaagcggactatgattggatgaggcgatgagccaagttctccagtggtactgtccttaaaactttgaccacaaagccacccaaaatctgtcctgtattattattcgatagcgatccaatttgtcgatcagtattaaggtatcaatgctgagatgtgtgatcgattttttcaaccagaaaacgattatagaacatatgtcaagcagggcattctcatataagtacttaagaaagcaacattattgattacggttagaaagttactatatttatcgattatgtcaacgaacatatgacaaataaagaatgttacaacaccattattacaaaacgtttaactaccttttatttgagcatataacggcttcgttctctaaccattaacttttcatatataacaagaaaaaatagataaaacctaaaagtaatttcaaaaagagttaaatggaaaacaagttggttcttggagccttgtgtatataccttgtgttacaaggcacctgcggcgaggagaacaaccctctgattaaccattacgctgattacgaaacgattcatcctagcgaatactacagctccgatttcgaactcaaagacggaaccaatgtgatcttcgaagccatcaatgaattgaaagggatcaagaaaccaaaagcaggctttatgtgcaactatggcaaaaaacaatggacaaggtctcttccgggagacattttctacgccaagttcttcttttacagcattaatccaaacgcaaaggtcgttcaacattgccatttccggtcaaatttgggttatgttgatgcctatatcaagataaccccagcgctcggacgaacatgtcccggttacagatgcgttttagcggttagacgtgaaggtctcttgatgaaagacactaacgaactctttccttggacaccttggcctcgccgccacattcaacctaagttgcctaagatcaccaattgattcctctgaatgatattttatgggattgggtgtatacatatctcttcatcattttttttttgtgatatatatacagacattgtttagttcagaaaacatcaatcagaattcaaaagttactagtgaaatgggttttctcccctaatatacagatcctattttcattacgccaattgttgaattactagtaaattctggaaacatatgtgtgtgctggttttatatctttgtacgatgtgagagtgttatgatttgtatgtgcataaaataaaggagacacagagatttgttaacggggttcggttaactacttacatccccgggaccttgtccagaactcatccactagaaaaggctgcaacctacaattgctatatggcatccaccactcttttctagaattacaatgaaagaaaactactactcctattgtcttttccccgacgagtatagcattctcaacaaaccatcaaaagatctctctatcttgttgatggggcaacgtcacacacatgtgtgcctctttcgataaaccctagacgcgcgcaagtcttcatgttgatgtctcttggtttatatatcaagtgccaaaagtcctagacgacttaagccacgcttcaaatctctacaaacaattgggattaacttgaataaaggcccatgacccacatgacctttatacttctacgttatgtaacaactcaacatcattgtatggtccaacagctcgaatgttgttccagcaatatctgcacttacaaattcatgtttcatacactttagttttcataaggctgattttattttttggtatgaatataaaattaatttaacaaaaaaacatatttacattatatgtatcctttgatagagaaataattgaaacaagtagaaattggacgaaaggtaagtagaaagaaacggagatagagcaccagcactagacgcgcgagcctaatgcgcaagccatcttcaagcttagaagaatggaaatgcaatagctatgccacatagttgtctggaaacatttacataggttttggaaattttgtgttgtagacggtcccacagattgaaaaccttcgcaatatgcttgattgatagattgtcgttgggtaacgtgtggtagacatggtccacataacctaatgcctctttgcatgttatgttagatactggtttgacattaacacttgttgatatgatgataattaatacgatataaactattgaaagtgttttcgttattttttgattgataacctgtgattaagattgttaagattgtttttggtgtggtttcttgattatggttcaaaggtacttatatgctatgtaataaataaagatgatacacaatttgtatgctaatcactttgctaccttcaagattcttttttttcacagaacacaccaaattatgtcttttttttctcaccatttgccaaagtcaaaatgacttcacatagaatagcatcatgtattgttaggaccaaaaatacccttgtaactatgttagttcagtttcctgtacaaccaaaccattgtgaaagtaaaaagtggtcagttttttttttagttaaatatatatgaaacttcagaattcaaatttaggagagaagaaagaaggagagttaatttttctcctaatttctaaggaaatttttgttttaaatctgaaattaatagtggtgagataatcagttttgctttgttgtagaaagattagagttcaatatatccagagatttcacgcaagttggaggaaagaatagatttcgtctcctttgtcggagaggtcgaaaccacaatttttttgggcgagtagagtaaaaaaattagagttcatcgatcttcaattttttttttttgatgttatcgacttaactaccgaacaattaaaaaactcaaaaattttaagttttcaaattagtatatgttagatttacaagattttatgtgtaccaacattcaaaacgtaaagaaaataaaaagttatgagataactttgaacgatgacaaaaaaattaaggttacaaaagaagatactcgggttaaagatgactataaaattacaattatgctcttcattgaatttattaaaaaagaaaaaaaaaaactccaaccacctccttcaagcaaagtagatggacatttatatgataatcaaactaaacgtttgtttgtaagacttaaaacccaaatcaacccggtattgcacacagctagctagcacacagtattcatattttttattgtgtatcatcacatgattgctcgaagtgaaccgccaacgattaacgatcttgttcatgagctcatgactgatagagtccaagcagaacaaggaaacaaggacagctcagtttttgtggacttccatagggaatcgattacagaagtaagccatttcaagctctcttcaattcatgtattttggcttcttgatctcatttactattaaaatatttactaaatcagttgggggcgaagaagaaaacaacttatcctaattaatacagagcttatgctaattatagtgacgcataatcatttaaaaaatgacaattttattttcagaaatcaaatatataattagagtttttctcatcatataaaatccacctaaacgaaaacatgattctttttagaattaaaacataagaggcgcatttaatctataaatatttatatctagtaatacttacaattaatagaaattttaacttaattaataataaaacataaacagttacgtaaaatgatgaaaataaacacaattgacaggagaaaaaacaaacaaaaaaaacagtaatcatttatattcttgtcatgtgtatgctattcttgtctatatttcaatgtttttcttatgttttgcttagtttttgtcaatttttttataaatcattaattatcttaaaaattagacgattcaaagtaactcaaagattaaaaataacttaagtttagaagtaatttttttatagataagaacgacttaaaagtactcaaagtttgtatcatttgatttaatgcggagatgtcaaaacaaaattttgtaggtgcgttataatatcttgaattgaaaataatgttatatatataccatgaaataacacaacaaacttaatttacctcaacaaattaaatagaaatcctataagataacaacgtaaaaatgtaataaaacataaggcgtgaattgaaacataaggagtttatcaacgtcaaatcagtatctatcattcagatttcagaatcaatctaaaacacaatcatcttcaatattctgtagtccggtcgccgcatcaagtccaggaacaagagtgtttgagaccagtgccgtgcttaggactttagaggcctgtgtccaaatccatttatgttgagtatatgcactagttattcatgctatgctttagttatatataaatatattgagttctctttatctccttgaaaggcatcatttgaaacaacaacataaacttcaccaaatcactcttacaacaacatatcaataacttttttttatcactgtcacaatgacatatcatcaacaaaattctaccttttcttttgcttttgctttcttacatataataacttttttgtaacgaagtggtaacgaaatatccttaaaacccctaatttcctaactagtacatgccggattgccggttaactgattggttttgtgacctcacttgcttccctctttcattttagcaaccacaattaaatttacaaaaaaaaaaaataacgtattaataacaagttaaacagttataaatcatttatcatcaacaataaacagttttacactaaatagcccgttagtgaatacatgtaataaataaagtagatccgtttctagttttcacaagtgaaacaatccgaaaccgaaatttatatattgaagatataaaataaaaacaattaaagaacttctcctcttaagatgatgatgatggataccaaaaccatagtgacaaaccttctcctcttaatcctgctgcaaatctccaacttccccacaattgtcttatctatggaggcgagatataggaaagattataaatcagagtataaagtaaatccagacaccgtcacacatatcgttgtctccaatgaattgtacggtctaaagaaaggaaacgctggctttgtatgctctcatggtcccaagaagtggcggcagagcaagccaggagaccggtacattttgctgaagttcaagcacaacggtatggacaggttcacatccacaaattgccatctccggtcgaaccgtgggtttgtgaattttcatatctttatgcaaccagacctctccgctcattgtttccctagttatatttgtaagtactcaattagaaaagatggagttcattacaagcatgagaataagttctttcgatggcggcagtatccacgctctgccaaaggacgcagtagttccaaggtttcattgagaaacattttgaagaactaactttgtaagaaattgtacggactgtatctctactatataaatataagtatactgatttgattaaatgataggctacatcaatgcacatatttcttgaatgcatatttttttgtgacatctcttaaacttttaaatatatggtatagtttatggtccatgtaatgtaacgtaatggtttatattagtgctatcgtgatacccgggttcaaacctacattatgcatatacatgtccgttaacaaaacaaacacaaaaaaattataatctagatccattcaaaactttgccggaaaaaaaaagatccattcaaaacagcatcactcaatatatataaccaacatattaaaagtgataataattgaccactaatcactcaaactagatatgtttgtagtacataaaataaaattttaaaatataaaacaataggaatcaaatttaaaggatcactagaaaaaggtaaattaactttgaaaaataatttataaaattgatcaacaattggaacaaccatatgatttttcgactcaaactacaaaatctaaactagttttccttgtaatttaggtaaaaaaattgaaagaaacatataatttatgtaatagtaataatccgaataaatgcattatagccttatagggttatgtctttttattgtaactcttcataaatttgtctttttcagaactcttcttaaaacatattttatatttgttatagaacgcaaattttttaaaaatgtaaatttaaatacaaaggtaaaactgtaaaaggattgtaaatgttggcaaaaacacagtcgtaaatgtttaagacgttgaaacaatcatatgtaaaaacagtttctaactaaaaaaaggataaattttacaaagtaccgattccgttattttaacattcttatggactaatatttgtggctttttgtcatatgaaagctaaatgtcgacaagaaaaataacaacaaatgtttatatggcctttgcaacagatttcagttttcagaacgtttttaaaaacttagcatgaagaacaagccaaatcccaaaaaccaaaggtaactaaacgaggagaattctcacgacaagggaaaacaaagtcatgacgtttaatcataaattgataagaacccttgtgtggttgctcgtagttcacgtcaccgtggtctcctacgccgggaggtcacatttcgtcacaacggagctgaaaatacgaaatggaatgcaaggcttgaaacgtccagagatcgtttaccactgtcaagctattaatagtggcctcgattatggatggcgacgagccctaaggccaccattcggccattccttccatgtactcttggaaggcggccaaaaactggaggaggagattcaccgctgccatttccggtcagtgcttggtacagtagatgtcgatatccgtatgaccgcgattgatgctgagatttgtaattttagaaaggcatgtgcggttcatgaggttacaccggaagggataatgtttgatggtaaagaatggaattttgaggagcggtatccaaggctgataccaaagaaatacctcgaagctaagtggaagccttggccacgacgcaccagtcgtagcagtgggggccaggccagcggacgtcgatcctcaggttcacaatgatttagtgcccataagggtaaaccatccatatggcattgtagtttcaaagggaggactttgttaaaaaaattctgatgaacattacaattgagttatatatatgtttaaaggaattttgtttatatttcgttagtgtgcattttttttttggaaatatttgatccccattatattattacactttacaagtttacattttagtttgtataattgcaagaatgttagaaatttcagttaatttccaaatttttgatcttctgttttttattctgaaatatttttctttaaataaacgaactatattgatccttaaaatagataaattaaaataaacatgccaaaaaatttattattgatgaaaaagatatttagataattttgaataggttttatcatttaagttttattatttagcgaaaatactcatatgatgacatacttttgagtgtagaccgtcgtctaaggattcaccggtaaagtgatgcttataaaccatcgatcgttgtctaacgattcaccgttggtaaaccgtgttgttaattatttttagattatttattttaaatttggcatccgttgcaaaattgaaaatttaaatcatttaaatagaatatattcatttttaattttgtaagtatattttacaatgaatgaattttttttgatgaaaaaacatgtcatgacgaaagaaatccatcactaatatgaattcaaaaacatattttaatcttttaaccgaaaatatgggcatcgataatttgagtatttgtagtgtttgataaactcaagtcatcatattcatgtaaagaatgatagcaatttcgtttagataaagataatcaaaatgacctcatgaatttttttataaaatatttaacggcgttaaacgtgaaatttggatacattttctttcataaaccgattttttttcctgtaaaccgatttgatcattttttttttttgagaaagatctatttacatcaaagtcatattcgatgttaagttttttttttattattccctaacccctaataactattttaatgtttaacgtccgatggtataacggaaaactaaatttgagtaccaaatacaagctttagcgcaactaacataaacgtgtaggaaaatttacacatcaccggaaaatactgttagaaattcctaacaataatgttgttttctttataatgtttgctgtaacaaatcaattggtatcactaattactacattgttagagataacttaggtctcttttattattatccgactatatacactgattttttttggaatcggttatctcgttagtagctacaaaactaatttccttccataatgtttcgttttctttgtaaatatataaaaccaaaagaaaattgaagtgtcatcaagaaagaaaaccaacagaagaaaaaaaggaaaagaaaaacttgtgttgccattaaagctctagtttagaattggagaaagtttttataacaaaagaggaagaagaagaagaaaatgagaggggaaaatagtgttgcgattaaagccctagtttggtgtcttgtattacaagctatcatatttcaaggggattcgatggcaggagacgtgggtttcacgctaatgatgaagaacgaaatgtttggcttgaaacgtccatcggttctctaccggtgcaaggcttatgacaaatcccttcggtggcacgtatcgattcccacggcagaatttacatgggatttcgaagtcccaccatttggaacaggcgtggtcatccaccgttgtgaattcaagtcaagccaagggacagcggacgtcgaaattaagacattgtcgatgacatctacgttgtgcggagggcatttgtgtaaatatgtcattaggccgaatggtgtatacttcgttggttttgagacctattatccgcacaatattttcttaagatttcttgagttcgtgaggcctgttgacaagcttgtcgagccatggaaggcgtggtctccacgacagctaaaggctttgcgggaacgcactaacaaccgcaccaggttacacgaagacaacaaccgcaccaggttacacggtgacaaagatgctgatgaggacgagaaagacgatgattaggacagatcatttctgtaatgtcgcttaccaaagtagcaaaaacgttttactaaaaaaaggcaaagaaaaacctaagaaagagaacaaaacgttagaagtagttgaatttatttgtgatatgtacaaaatttttttatctacagatggtattgaatcgatcgtattggtcattttcgtttaatttgtatcatgtggtaggctaattgtctcgttcctttctttcggcttgcgtatggatttaatttattctttttgaaatataatttttacggcttacatattctatatcttgttctttctatctttgatggaaagaaaaaacgaagtcctaatcgatcaacaaaactgcacatttgatgtgtagtaaaacaagaaattgtttttgtcaataaacatatgcgcgtgacatgaagacatttatagtatcaaaagtacaaaaaaaaaaaaaacacgaaaaagaattgaacaaaccgagaagattaaaaattcactcacattacaattacaaaatagaaatacatcaaagaaaactgagaaacatcaaaaccaaagacaatagtaatgcactaagcatgttttatgacattagaaatatattaccgcctacagcaaccaccaccaaggttgtccggaggggggtggaggagattgcctatagtagaaggctttttgagcttgaggcgcaggatgatgaacttttggaggtggagaaattggagtaggaggaggagaatatattggaggtggatagattggaggaggaggaggagaatatattggaggtggatagatcggaggaggaggaggagaatatattggaggtggaggaggaaaagcaaccggacgagaataaaccgggggaggaggaggaatagtaactggagatcgataaggcggtggaggaggagaatatatcggttggtaattagtggtagtttggaggagttttctgttgctgttagcttcagaaactgtgaataagattgccaagagaaaaactagggtgtagaaaactcctagagacaccattattcaggttaatgttcagagatttagacttaattatgtttacatatatatatagtccatggaagttctcttagaggctccccactaactgtaggatttattcaagatttgttctcaagtttatattagaaatacaactatttagtaatgaatattagcatttgttagtcaactagttaagctggctttgccttgtttgcattttaaacttctcttcttttgcttattaaggcctccctctaaatgctaagcttgctttaccagtagtatcaactttaagtaattattaagaaaaaatatactcttttggattatacaagtattttgctaattacttaaaaagtaaagtacgttgatcaattataatgtttttcagacatgttacgcttacctttcttcaaaagtacgaaaaaggaggagtgacctgattagccagaaaagccggcctagagtatacaattcgagtagactgacgtacatagaaactgatattcgaaatggcgggtattgataagatttcatatgtagaagaatatcgactataaatgactaactatcactattcactaacatatcccggcattgcttatatgtttaaaggccattcttttctcacatagtaaatttttaaacccgtaagcctaaaaagctaaaacggatgaaacctccttatgattagtgtatagtttttatacgggttaataaaaattaaaataattcaacgaaatataatagacagatcatttctgtaatgtcgcttaccaaagagaaaacaagttttactaaaaaaaggcaaagaaaacctaagaaacagaacaaaatgttagaagtagttgaatttctttctgtgatatgtacaaacttttaattagtcgatcatgttggtcattgtcgtttgcatcatgtggtggactaattgtctcgtccttttttaaggcttgcgtatggatttgaatttttacttattgttgttgttgatgagtttgtgttattgtgttaagtcatattctatatcgtccggttcttccttttaaaaaggaaaaaaaaaacaagtactaatcgatcaacaatacaacacattgatgtatagtacttgtaaaaagagatttttgttttgtcaagaacatgcgagtgagttgaagaaatttatagaatcaaaatgacaaaaatacatgcaaaaccacgaaaaaggattgaactaattaaccccgtggataaaaacttcactcacattacaaaatagaaatacctcaaggaaaaatgagaaacatcaaaaccaagttaagaaattaataatgcactcctcatgttttaagacattgaaaatatcttgtcctgagttaaagcctacaacaaccaccaccaaggttttccggagggaggtggaggagattgcctgtagtagaatctttcagcatgaggagaaggatgaggaatcggaagtgtgggaggaagagcaaccggacgagaataagccggatgtggaggaggaggaggaagagtaactggagaccgataaggcgatggagaaggagaatatagtggttggtagttagtgggagttttcaagagttttctgttgttgttagcttcagcaactgtgaataagattgccaagagaaaaactagagtgaaggaaagtcctagagacaccatttttcaggctaatgttgagatccttagaatatatcaactatgtttttcatatatagtccttgaaagttctcttagaggcttcccactaactttaggatttattcaagatcgtaattttcaaatatatattagtaattaagtactgatcaatattagtttttgttagtcaactggttaagctggctttgccttttgtttggattttaaaacttctcttcttttgcttatcaaggcctccctctaaatgatatgcttgcttaaccaatagtatcaactattaagtacttattaagaaaaaatgatattctttttggattttacaaagctacttactttgaaaaataaattatgttgattgatgtttttcagacatgttacgcatgcctttcttccaaagtacaaaagagcaaggggtgacataattaacctagaaaagctgacgtacatagaaatctataaattaatgactaactcactactaacacaccacgcattgcatttagtttaaaaggccattctcttctcggaaagtagatttttgcaacaagccaacaacgccaacaagctaaaccgaataaacctttatgattaatgtacagtttttattggggttattaaaataaaaataattcaacaaaaaatagtagaaatgtggatgtaggagaatgacttgttcctccccttgacaggttacatgtctaaaaacagtaacaaagttgtggatgcggcaataactgaatccttagccgttacatgtctaaaaatagtagtctctgtactaacgctatcaacgtcaagaaatcgaaaaacaaaatcgagtgagcaaaaattaaagaacaacgaacaaaatcagaattacacaaatgggaactaataagattcccaaaaccctcaacgggaaccttgttcttatacttatcatcaccataatgatggtgactcactcccatggatttcaactggagatcaggaacgagctatcaggaaggtacaggaagcttgtgtacaaatgctggtcccgcgataacgatttcgggtggcgacagaactggccaggccagtacaaggactggtccttcgccatttcactattccacacctacttctactgccacttccgtacagcgtatggacgcgtggataagcagctagtagcgtcatgggagttaaaacaagagtgtggggacaggagaaaatgcacttgggtcgttaagaaggacggactctacttgagacaatggaagaccaaattttttagtaacaagtatggtaacgaaaggtggaatgtgtatattgaacatgatgtcctcaagaaaagttggagctaattaacaatttcacggtgttgattgtcatgaagatcgcgaggaccggatatcgtgattttcgtctctgtatgtgttattcatggtaataaaatcatacaatgtgtaactatatatctatggtgaaaatgagaaagaacgtatctatatatataatatgttgttatatattagatctatagcagggtacatattagttatttatggtatattaaataaataacataattgtcaattaaatagtagattgatggaacatgagaaacctaatctagaattagtaactcttctggtgtactatatgattttttcaaagggaattctcctttaagataacaaagacgtcaaatctctggtcggaggagattctacgccaaaaggggaaacttataacctaaaaggtaatttaaatttttttagctatgcatgatgatcatccaacaaccttaatcgctatcaatagagattcttgaaggaatgtgtatatgtaaattaagaaatcaaagtagttttcagctgaaatatcgaagaaaaattatgaagtaggtcaaagagacattgaacgactagaaaagaaaaagaaggtgagtgagcaaagaaaacaaataagacaagccattgtgctatgatacaaaaaatgtggaaaagaattttgttatttatcgttttgtaaattcataaccacgatttaatttagccatctctaccgtcaaattgatacaatgaatatatctattagttatatgtgagtaacataataaacttattttggtatgtatgaaaacgtgaaaaacttgattaatgtggtgaataatttaaaaaaaaaaaggtgtatgataacgttctaaacttttcaacgtatcaaacctagctatgtgataacaatatcaacgaggatgatgacgaattctggtcaaactttcagaaacagcacattttatttttcaactttttgggatttattctctgttctatctccaaatatagatgaaaatagattctagtacttctaaatttagaagccacatatgtaacggtctaattgccagttaatgcacattatatatcggtcttacgcgtaagcaccaagactcgacgaaatcaagaactaagaaaacattgcgatcatttgatcgaaatgggaagagacctcggctggtgcttcttcgtggcgacggttttgttagcagcggtgttgttacccgcaccaaccatagcgggtcgactagagctaaagaatgaaatctcgggggtcgctagtgtccgtaaagcgaagctagccgtgcggtgctggtcaaacgaggatgacctcgggtggaatatgctaaagccgaagcaatcgcggatatggaagttcacgacaatgaacatgtggccctttcagaaaaccgagttccgttgccagtttcgtagcgggtttggaaccacgaacgaagacgtggtgacagtgttttctgtcaaggacgggtttcgaaagcaatgcggggtgggaggggacgagtgcttttgggtagcgaagagagatgggttctatctaagaaggattgtaaaagatggaggaggggatagtcgcaagaaatatgttgatgttctcaaaagcaaatgggtttggaaatggtgaaatcttcaatttaattctttttatccaacaatctttaattttattttttttgtcaataacatgcaatttatgagtcttcgttacaaccactgatatacttattcattatcttcacccctttgtattagactcacacgacgcatccttgaatattcatggggttataaatacacaaaagtataaaaagtatgtagtaatattattatttcaaatcacaagaaattcctttatccgctttagttttaataagctgaacgtccaagcctttggtccaaattctccaaattctttgttttcttagttagaaaatatccaatcaagaagatgaaacttgtgtattaatcaaattcatagtggtaggttaaaatgttgaatcacggccaccactattcgtgacttcatgtcgcattttggtccgtggactttactcttgtccgagacgaagttataaaataactagttcactccaaaattttagtactaagaatttgaatgggtaccgcggtcgggatggacaaatccatcagcaattgagccgctttatttttaaagtaaacaataaatcaccacggaccaactctatttgtatgtaaaacagatgtgcttgtagagaaagagaagtctgagacaagaggaaagataaatttatatgattaaaatacattcatcctcttaatctagtttactacattagtttaataatattacttggttaaagttaataatactattgaaaaaacagatttttttttgtttatctaatatgatttgaattttaaaaatcggaaacgaattttttaagaaatgaatagtggtatcaagttctatacatatcatcaaataaagatagaatagtatatatttgttcaaatagaaacgtttgttccgatgaatccaaataatcaattaaatactttttgatggaaggatactaaatcctaagataatatatagggaacccaaggcttttaatataaaacactgatcaaatcacttaacatccttaatcaaaacaaacaattcattttaaaacgtatatagtacaagatatacgtaaatagtatattcacaaaatgtaatagtatctctcaaaattttctcaaaatcaaaatagatttattggttcccgatatagttctgatatctcactccaacatttatggattggcatttcgtcgccacacttcatctatccaaatccaaattagagaagaagtaacatccagttgttaaataaggaacccaataaaaacaacaaacgaaaaccccaacgaaatcggaggaagaaaatataatcatgtctctgtaaattaaaaccccaacgaaatcggagtaaaaaaatatgatcatgtctctgtaaactaaaaccccaacggaatcagagtgagtcctacacgacgtgtcggcaatttactcgactatctctcctcgagactttacacggcctgccacaaaaaataagtcaaaaacttaaaatttcgtgacattagcttttctggacaaaaactccaattcatatttttatagcaacaaagagaagaagatgacttaagcaatatgagataatatctgtctttattacataaaatatagataatatctcttttttatgtgttagtttcttaatttataacttttttttggttatagagtcaaatttcccatttaacttttttgtgccaagagaaagtcagtgaaacgcgcttgttccctgcgttttgaaattagtcgtcttcgtcgctaacaaaaatctctgccaacaaaaaaaatatctcaccgcttcagaccaaaaactaatgacacatacccgagtcatctcgacctggaccgagttaactcgcgacttagctatttacttgctcttcacgtttttcgcaatcaaagtcttcaaatttctcttctcctgtaatcgaacctctgaaatatcatcgttttcgatggcgactcatcccgaagctctccgacgagagcgaattctcaacagtaaactctacttcgacgttcctctttcaaaggtttcgattatctattcatcgtcttatgatatctcgttcatgggtattgagaaattgtgagtctttttccccaattttagaaattttctctgttggtcaatcttgtgaaattcgaaagttggtttttttatgttgagatttgataattgtgtaggcacccatttgattcttccaagtggggtagagtttgcaagttccttgtttcagatgggtttctggaggagaaagcaattgttgagcctcttgaagcttcaaagattgatcttttagtggtactatttggtttctcttaaatgtatgaactgtgatcaatcactgttggctatgtattggaattttgatggttgtgtaaccttttgtttgtggttgttatgtattaggtacattctgagaactacttaaacagcttgaaaagcagtgccactgtcgctaggatcaccgaggtaatattgtattcttatatgagaattggtcactgaatgatctttttgattcttgttgagctaaagttttctacaatgtataggttgcaccagttgcgttttttccgaattttcttgtgcagcagaaagttctttacccattccgaaagcaggtagaagaatcgtttgttgcattactactttgattgtttccgagaactttatatttgtggaggggttataaaataggtgtgttatataggttggtgggacgattctggcagctaaacttgcaacagaacgtggatgggcgataaacattggaggaggttttcatcattgtactgctgaaagaggaggcgggttttgtgctttcgctgatatttctctctgtattcactttgcgtttcttcgtctgagaatctcgaggtaaattttcaccaatggtatctgtttgcttctatcatggaccttgatatggcaatggtctccttgaccttgttaaacttgaacagggttatgataatagatcttgatgctcatcaagggaatggccatgaaacagatctcggcgatgacagtatgataaaaactttatatatttcatgatgctttgccataatggtgtttagtatggtgataacagtatattgtctgcagaccgtgtttacattttggatatgtacaatcccgagatataccctttcgtaagcctttggagctttcctcttttgaagtcattaccattcctttgaacttatagtgcagttttgtccatgcttgcttttgaagttagatgtatcttcttacaggattatagagctaggagatttatcgatcagaaagttgaggtcatggtaagcctatcgtcttacacgtatcagctagaattgatttgattattttgtgtcacattatagttcttcgtatatcttggcagagcgggacgaccaccgatgagtatttgaggaaactagatgaagcccttgaggtatgcattagagagcatattccttaatctcatgtttcctggcggtttacttatgtgatatagtctgactggagatgatagattaggagcataagaacttggttcctcgaaaaaacatgaatagtaactgtggtctttcgtgatcttaagggaacctatgtataactgtcaggttgcttcgcgaaacttccaaccggagttggtaatttacaatgctggcacagacatattagatggtgaccctctgggacttctaaaggtaatttatacactgcagatatcgcatttctatcgcagcaggatatttagtttcttcctcacttacaatgtctctaacttggtgaatggtgactcgtgtgtgacagataagccccgatggcataacaagtagagacgagaaagtcttcagatttgcaagggagaaaaatattcctcttgtgatgctaacctcaggtgctaaattggattttaacatttatataaaccaacgatgtattgcctttttgagtaatggtttttaaaggttaaaagaagttatgtgatgatactttgtgcaggcgggtacatgaagtcaagcgctagagttattgcggattccattgagaatctctcacggcaagggttgatccagacacgaccggaataagtcatatagccaaagacagagtttctttgttttgtgtttgtgtatatttgtatagagagagacccttatgatgtgtttgtcaccttttgtatatgtgtacctttcccttgtttaatttacttgtaagttcagtgttgaaacgtattcaaaagctttatattctgttaacagttaacactatgaacaacaaaattataggatacttttgacaattaagtattgaaaccatacaaaaacgaagaaaagaaaccaaataataatagaatataattctctcctcatctctaagaggaacgtagccactatgtttatagctaaatgcatcttcaatttaaaatacatctaaatttcctcaaagaactttctaataccgtttctcattctttattcccattctctagtttatctcttagtcaaatttaatatacatagtccaatctattgaactacttacccacatcagcttattagagctggtgtactagtacttcaatagattggactatatatattgaatttaaccaagacatttctccaagaaaagacttaacacaaaaccaacgagattctataggttccggaacgcatggaacatctttggggagagaagtaggacgaaagccagaatcgaaccgaagaacatcttgacaatgtaactgaaagcatctgacgactcgctatcttctgagtcaaccactgcatttgggtttgacattgcttctgctgaaggaagtgattctatcactgcatcagctaagtcggtgatgaaggatggtgtgagacctagcgcgggtacccgtccccagttctctacccctgactcaagagctaattccctatactccatgtctatctcctcaagtgtctcaatgtgctcactcacgaaactgaaagatccaagatatgaaagaaaaataagaaagccgaaatgatcaataactaacgaatctgataatggacgcttggaaagtatctcttccacaatacggaaatgagctaacagggattattatatggtctctcacctgactggaacggctagtagactcttaacaccactcttaccaaggtcgacaagaacctcatcggtgtatggcttcagccattgaacagggccaacacgactctggagaagaaatgattattgcaagaatcaattagaggacttgacataaagaggtaatgccaagcaacgtttatatcggatgattagaacaaacctggtatgccaatttatggtcgttaagaacccctctggcttttagctcttccattatcaagtcaatacactcttccatctgcttctggtacggatctccagcattctctacgtagctgaccggaacaccatgggcactgaagaatatcataacctaaatcacaaaacaatggaccaatttaaccagtgttcagactagaaatgtgcaatgaagaggaaaaaacagagggggggggggatataactatacctccttaggatcagagaaagtttgaagctccttctcaatgaggtcagccatagaattgacatagcctcgcctttggtaccaggactttataatagctaccggcactccagctaggtacggatctttcctgaatgatgatacatgttaagtaccgctcgtgcaactaagaaatcatttaaaagtaaacaaccaataaactacgaatatgctctgtagcttgcacaaacctgaataaatcttggagaacgcgtatgcttgaacccgttgtagagatagaatactgaggatacaatggcagtacaacaagtctagtaattttgtccttctttatctgattaaaagaaattagcttgttaagataaacatgactatgacacaaacataagaaactccatcaatactgagagcaaatcacacctgctgaacagcctcctcagtgaacggataccaataccgcataccaacatagacattagcagcaatgttcttcgcttgcaaagacatcttaatagcatccgcttgctcatcagttattttacgcaaaggagagccaccaccaatagcagcatacccttctttagatttcggagcacgaacaacagatataaacttagctatagtcccttgaagaaactgaaatggtctaggaagccttataatatccttcaacaacaacaacaaaaccatttcagcatcccactttcaacacaaatcaatcacaaacacacaaagtcaaaagattctcaccggatcagcaaagagattatacaagaaaggttgaacatcgttaagagtttcaggaccacctaaattcaaaagcaagacaccaatcttatcttctgcaacaacatgagaacgtgctttagctgaagtttcatcataagaacagtctccagtcacagaacgagcttgctcaaacacattcgtcttaaaactcaatccacgattcgtgatcgtcatagactctccgaaagatctctcttttatatcgcattgaatcaaagacagagaatttctctgagagcatgacctatagagacatataaccaataaatcaacaatccaaaaccataaaaggagatcaaaatcgattgagaatgaacactaacctgggaaatctgtgatctttacgtttcgttagaggattgaacccagatgataaagccgttgcctgcatagctacaaatttcagaaccgatcagtaattgtgagagagagagagagagagaatgaagaattcgaatggagggattggatttatgggtttagggttttgatttaggactttaaaagggagagaatttgagagatcacgaaggaagaagacgaagatgcgaagaaggtctggttaggtaaatgtatgacttttccattgaagcaggttaggcgtgtgttttttttttttttttggagtcaaagttttatacgtttcctttattgggtcccgaaacagttaatacggctgcgttttgttaacaaagtggttggttattttattcttcgaatagaaccaaatcgaaccggtctattaccaatacctattctgtgtttttatgtatataataaattaaataaaaacatttttgtcaatttatagaattaatacctttgtcagtccaaataaaataaaatttgaaaatcttacggaactgaaaacttaaaaaaactaagtttagatacaaaaccaaaactaatggttccgattggtaacataaaactgtataaaaattttatctgttagctggagcggtaagcttttcagaatagtgcaaaactgtaaaaaaaagttgtacgagaaagttatacaataaagctgagagtaaatttttgtgcaacgtttttgataaaaaatttgtgattggtagaaatgaaagctgtacaaattataatactttgttttcgttcactaattaaagtcaatatttccgaaaaatgtaaattattacaaatctgtgtatttaaaattgtacaaatttaataaatgtgtggttaaaaaaaagttgtaaaagttcctcaatccaaaaaataaatctaaaagtttgaagtgatataagtcattcgtaaattttatcatagacattgatatataaaataaaaacataacatttaaaaggaactaacactagatttaactaagtatagtgtcaacttttttttagttttatgtatgggagatagagtcgaactctagagtcgatcactcgtgattaaacatcttccgaaggtggcattgttatttgtgctagaggatctgaacatgtataatgtcaactcttgatgatattcgttttagtgttatttgcattaattataaaatgtaagatattatgagctaatttggatattcatcatctaccaagtgtcgttagttcaattggtaaaaaccttagacgaaacttagaggtctctggttcgagtgacgcttggaacgaaactaatattacatgctatggtttcgggtctgggggaattacgggttttggccgagaaactccaaaaaaaacaaaaaaaaaaaaaaaaaaagattcatcatcaaattgacacacttgtataaaagattttaaaatgaaaggaaaaaagcttttttttaggaataattgtgagatttggtttaacaagagatgtcgatggaaaacacacacacaacacggctttgttttctgattatgggattgggctacgtggccgaacagcggccacctgactagtcaaaataatttgatacgaaaaaaatataatttgaccatgttatgagacatgccagatctcaaccggtcgggttatatccacaataccggaaattcgtttaccaataatttgtttagatattttaaacatgattaaggggaccacaccatgaattatcgtaattgaaacatctaaaatcgttacaaactgtttgttattggccaagaattttaggttggatatgtcttctttattgtattgatcatttggagtagatttaccaaacatgagggaatcaacaataagggtgaattcatcataaagatcaaggttgaataagaatattatcaacttaaatggaatcatttgagttttttttattcattattcttagagttgtcaagcgggccgctagcccgcgggctttgtccaagtagtccatggcggagcgagcttggacgttgatttttttgtccacaaattagcgggcctcgcgggcaggcccattacggactgcggattctagtggacaagcccgttgcggactgcgggtatgcgggtagcccacgaaagaaaaaccaactcttttaaaacccttcatttctcatagagcctttcaaactttttctctctattagagtttcttgtgcagttcaaaccctagaagtagcagttcacgctcaattgattaacaaggaaactgaaaagtcattctctatctcttcaagtttcttttttacgatcattgaagctttttagattcagatttcagatcaaaacagagcatctaacacttgtaatggtatgttatttgtgactacacataaacaattagatgttttacttttgtttgattgatttgctagtcttgactagtttttgtattttgttaatgataggatccgttggattctgttgatgctgggtatttgagatcattagatgtggaatctcggagagtcattgagttggaacaagctagatatgaacaacaacaagctaatgatgaagcaggaggatctaaagagctgaaaagaaaagtgagagatgaaacaggaacacctatgacgcagaggaaaaaagtgtgtgaaccagaagcttcaaaaacccaaagaagaggcaagggtgatgaagcttctgcctctaaaacagagagaagaaaaaagtctgaagctgaagcatctaaaaaaccaaaaaaagtgtttgagattagtgatgaagacgaagatgatgatgatgaagaagatgactatggggacaatggagctgatgatgttgatgatgatgaggacaatggaaagtcatcgaaaccaaataagagaaggcaatactcaaaagtctggaacggtttaagcattaatatgcagtcgcaattggttaaaaggttttgaatcttatgaaaatggtaagtaagttgtttttcataagttttatagtcacacaatcttagtctatgaatgaacattgttagtttgtgtgatacttgtagaggagtatgaaaaatttgatgctgaagatgagactctaccttccttccagtcgcttgtggatgatgcagatggatgttgagttgcagattttattttaagtttgatattcttgtttggatttgagtttaagttcatgtttctgttatcatgtttgcgtttaagaagttgcaggtctttctcttgacttaagttcattttctgtttcacatttgagtttaacttgttacaattatgtttccgtcctgacttttgttttagtttggttctgtttttatgatccttttgttttagagctatctcagattatcttgcttcagccaagtaggctgcagttcttcaagttcttttacctgcaaatgtacaaactgaaatcgatcagatcggagcgaaactggattcttctgtagctactatcactgagaaatcgactagtaactccaatcacataagacatttccttgattctgtgtaacaaactcctcctaacagtctatttgttacagaatctttggattttgaaaaacaaatgtataatagtcatttctgtactcgcaggagagtggcgcttatcgtagtttcaatcgtcatgcttgtggtgacttttcttggtctcggtaatgttttcatctttgactacatgtttctcaactatcaactaatgtattgaccttagtgatcttgttatcatttcttctcctacagtttcttcgatttgtactgcagacacatgtgtggcaatgagcgaatgggttgagagaccatcaagcaatacggctctggacgagatattgccttgtacagacaatgccacagctcaagaatccttgatgcgtagcagagaaatgcccgcgggccgacccgtatatccgcttggctttgcgggccgggcttggacactgataattttatccgtggtcctaaacgggccaacccgccgcggcccaaaaaagaaagcccactgcggggcgggctagatgggcgcgggccggcccgtctgacacctctaattattctagttagatattctaatctagatttttatcgttagacatgagaaatttgtattttgaaagttacaaaatataaaatcaccatgtcctacgagttatgatgaaagtcatctaagtcaaagattttgtttataacagttgtatagatgttgagataaataatcgttatgaagttaattaaagatgttataagtacaattggtcttttgtccagaaaaaaaaaagaagtacaattggtcctagctaaaactaagaaagcaggtgcttccagctttgatatagttaattatgtatcagattttttctaaacacatcttataattctaggatcaattatgggattggtacaattaagtctatgcctttgttgaaataggcatttttaaatgtacttacaaatataggtactctttattctcagaaatgactattttgcccctttatcactgaattctaaattgaagctgcattttcgttatcttccaaaactaaattcccagcaagacacaagaaccattatcattggttcttgaattcaattcccaaaacgaattgtcaatgcctgcgccattacatcggcttattattgtggtgtcttaatccgacgattagtttttgatttttgatttccaattttgatttccaattttgatttccgattttgaggttttaatttttgattttgagtttctctatgtgcttgttgtgtgattttgattgaatttttcaattttgataagcttccttgttaaatctctttcatctatcgaaaaaccaagatccaaaatttcaaaaccaaaatttcaattatacacctccgccgaagatcactgtacctcacatatagaagatgaatttcatgtttggagatagatttattaatgtgcgtgtttttttttttttacttgggttccctttcaattatctttagggtttagtttttgattggggattccttctaattatctttatggtttagatttagcaagcaaaatttgtttatggtgataactagttatgatttggaattattccatcaaaaagtttcaagaaatctgaagttggtgtttatcagtttacgatttcaccgtcttcttcctttaattgttctgagggcaaaatcgtcatagtatgtcaggagaagtgccgaatcctataaactctctatgaaagtgttcattttctaattttcagcccaatatatgcccattcttataaaagcccctataattctactagttaagtactgggtggaagatcgatagatagcagatttgacttccatatatatatacacaaatggttaaacattattttttggatataaattagggatcaattatgggattggcacattaaaatttatgcctttgtggatatagaaatatctcatagtactcacaaatttatgtacttatacgttatagttttttacggtttcacccttgacagcttttgaatatttctttacttacttcattgttgctgcatcttctacattgttccccatttcagagccatctactcgacatttagaaaatcactactacaatctttgcatcttcatttcgattttagaaattaagagggagaaaggaagtcatggaggatcaagtctctattaatctattatcaccaatctcaaacatgtaaaaaatttaatttgattttgaattaaaaatggtgattcgattgaataaacatgtaattttatatcaaaaatcgagttttggttaaacatgtaattgaagagattgaagagattgaattctccaaacatgtaattgatttaatgtgtctaagattggattattgggttcctatacaccatcccttttaaatttcttttactaaaacgaatttaaatgaatctattgggttcaaaaggtagaaggagattaatgcattttctgggaataaaaaaataaagaatgaggaatgaagatgacgaagaatgaagaagaaaggaagaatatgctcatctccgtaaaggcaagtgaaatgtgtgttttttcaaatctttgggctgaaatatgcccaaatctataaaagcctctataaattagatttttttttttgcttgttgcccttaaaatgtgagggccaactttggttatatatatattatttaaaaaaaagtacaaaatagtttttgcctaaagttttactaatatttactaacaataacactaaaacatatttagaaaaataaggttcactaagggtagtttggattaacatcaatcttttttaggaggattgatttaaaatcataagaattgatccaaaattttcaaatttgtagatcgtcgatccaatccgattattcaggtttgacttgttgttaatttcctaatatgtaaaacaaaatattaatgaaaaaactaatgacaaaatcaataacaaattatgttttatggtgtatctcttgatttctatgctcgtgaactcttaaaaagatcttcttatcaagtaaagctttagtcctctctttatagatatttgtgttcttgtaggccttttgcattatttcgtcaaggtaattcaactggacgcaccaaccgcctttttgaaacggattttatgtcatcgatcaataattttgtagctcaacaagttttgtgttcaatttcaaccggaaaatggcaagcctttccatagacaagattgaaaggtgcgtagaattgtatacatatgagacatactacaagaatggaaaatccactatccatgagtttttagaatatgtagcttttagattatatgattagttatatgattttgatttggaaattttggttcaggttcagtcggtttggttctttgaacaagaaatcggtatagaacagaaatatttttgagtttttttttttcaattctaaccaaaaatattttgggtattgtcaagttatttggggtattttggatatttttgggtttttcggctatgtttgggtattttggatattttttgtatatttttgcttcagttatttgagtttctttttgtatttgaattttttcggatttttcattttggttctttggatagtttttagctattgatctaaaaataactaatattttatattattgtatttatgatattttagatatctattcagttctcggttcaatataagtttggttatggtttttaagtttaatatccattctgttagtatcttattttcaattcggtttgtgttcctctgttaaatttggtttcagttcattatatgcgaatcagtttttcttttcttttttttgctgaggactatatgtagttttagattgttgtagtattagttgtgtgttttttaattcattttgcaaaattttcataggctcatagtgttcagaaggtcgatcatgagtcgtgataaaggaattgaaatttcaatttattaagtttattgtaaatattaaggttcatatatttccatttataatgtcattgatatgattccaatttttttacttcaaaccataatgctgcacaaattatttggaaattagcagaggtttttgttttgttttgtttaaaaggataaataattatctaattttgatctaatttaaaattagcaaaaataaattgggatgaaatcagtagaaatgtttttctactattttgttcaccagtcacacccaatttggattttatttcaaatttatttacttgtttctgaaatagttatcaaatattttttttatcaacaaaaaataatttttagttgtgacaaccaatgacattaacatatatgattcaacataaaaatgaagaaaaccagagaaagaataatcttaactttaaaatattaataaaatttctaaaatttaaatctaaaactttaccttgggcagtttgttttcaaatggaattaaaacgcaaaagcaatgccacataatttaggcatttcgagaagaaattcatctgaggaataattgtatcgatgtcttgtctcgaaacatttacataggttttggcgaatttgtgttgttgtcgcttgacggtccacatacttaaaaccttcacaacatgattgattaatagattgtggttgtaacgtgtggtaggcacgggtccaggtaatctaatgcttctttgcatgttatgctagatactggtttgacattataatgtgtttgagataaatgttttttataatgtgttacggatcgttgagataaatgatcgttattaagttagagacgttacaactcgactattcaatgatattattaagagagctaggctataaaggagaatgatgttgatcaagaaaatggacaacttttgacagcttagcatcaacaacatattagaccattcatttgtaatttcagttcacatctcatcaagaaaataagtactgtctctttgattcatatttcaatctctttctttgtccattctagttcggttttgtatctaataaacaaaagagttcactccaaaaaaaaaaaatcagggaattttaatagccgagatttaaccgttttgacattgttgtttttgaataaatcagaggtgacaaactagggtttcaataacgacttctaaaatgctagctgtgataaaagatgagttctatacttttattcttgctaggtcatgtgtactttatcacaaaaaatacttgttttgtttttttatgttaagtgggaagtcgatagatcgagttttttggggtcaaaaatcggatttatatcgaaatccggcaccaacaacaaaccttttgcttctatatacagtatagttctcttacaattcacaaatcctgctagctcagcgggggttctcctcaaacaaattgaccctataattcaaataacttcaaagttcctcaataattcttatgtaagatatttaagtatttaattaataaattattctgttgaaaaaacgggatatgatctataagtagaatgccttgtcaaagtagtgcaaggatcagaacttgccctttcaagcaaaacacggacaacataaatgtgtatacattattacatagcatatatgtcaacgtatatacatattatcacataataaattgatttcattgacacttggaattcaagttggtgccacgtaaacagtaataatgtttatatatggaaagacagctttataaaagatatctaagcagaggcttttcatattcaatgtatattataagatctgcgatccgattaacataaggttttatttttgtttataagaattattcttcgaagtcattctctttggtcactttggtgagaatctgatcggaaagagagattatatgggtcattgcttttcgttaccgtcttctcaatcggagattcatgaggataatgagcacggtgatggaaatgtggtgtgttatggagaagagttcggtttagatcaagaccttccggttcatcgactcggttcggtctgctccatacaaggaaccaaagtgcttaaccaagatcatgctgttctttaccaggtagaccatcttgacattatttttgctatatattttctataaatcattaccatagatgaccaacaaagtttaggggtagattcaaatgcgcataacgtaaaatctgtttgaagtgttagtctcaattttttgtgtgttacttgtgaaatatatttgaagttctttgatatcaaaaacataatgaaggattttcaattcatataaactttatatataaagaaatgtatgattgcattaaaattacattcatttcacatgacatttctcacgcagattgaaaaatgtatttaaagtttcatctatcttattattgagtagaattaagtgaactgattagatttaaatagtagaaattgtttaattttaatcccgtagggatatggaacaagagatacagagctatgtggagtgtttgatggacacggcaaaaatgggcacatggtgagcaaaatggtgaggaatagattgccatcggttttgttagcactaaaggaagagctaaaccaagaatctaatgtttgtgaagaagaagcttcaaaatgggaaaaggcttgttttactgcctttagactcattgatagagagcttaatcttcaagtctttaattgctctttcagtggctccactggtgtggttgccataactcaggtacatttattttctctgtttccccgcaacttttaaaaagggtttgaatggtggtaacggaccattcaattctgtggccaacagacaagattagtgtttcttcttctgctgcaagttttgttttttcttggtatgcaccaatatagacctaaacttatgaatagtgaacaaaaagctaatgtctagccaaaaaataattattcactttttttttctgctgccaccattcaaagcctaaattttcactagttggagcttactggattttttattattttgttttggtaaaatgttaaattgcttcagggagatgatcttgtgatagcgaaccttggtgattcaagggcagtattggggacaatgactgaagatggtgagatcaaggcagtacagttaacatcagacctaacacctgatgttcctagtatgttttttttactcctttttttggctaaggaaaggttttattgttagatggttgatgatatttatttagcgagttctagcgtttcaggtgaagcagagaggatcaggatgtgcaaaggtcgtgttttcgcaatgaaaacagaaccaagcagccaaagggtgtggttaccaaaccaaaacataccaggattagccatgtcaagagcttttggagatttcaggctcaaagaccatggtgttattgcggttcctgaaatctctcaacaccgaattacttctaaagaccagttccttgtactcgctactgacggggtaatagcacatatatatgattcaaatatagatttttttgttttcagttcaaaagtttaataaaactccttggtataaaatattgtcatcgtaggtttgggatatgcttagcaatgatgaagttgtatcgcttatatggagttccgggaaaaagcaagcttcggccgctaaaatggtggcggaggcggctgaagctgcatggaagaaaaggcttaagtatacgaaggtagatgatattacagtaatatgtcttttcttacagaacaaggaacaaccaagttgaactatggacatttgaatcataagatactacgctatgatatggtccaagcttagctgttgcacataattccacagctatatatatactggaaaagattattaatctctcagatgttaattaaggtcttgtttataatggaaactatattttctttttttatgttagtaacatgcgacaatgcgacatgcggatttgattttggtagttagataacaatatcactagacttatttcttatctcacttttgaggtaggaccaaagacacattaatgttgacaatctcaaacaagaaagattcaagcttaattgacatagataattaagatggctcattgagctttattgaacaagaaatgtaaaagaggaaattgtatttagattgtcaccaagaacactaaaactttagatttgatttcaaaaaaatggaaagaggagagttgcaaggttgtcttacattgatgttcttaagacaaattaatatgtatctctacttggtaaaaccctagtaacatgggttaatggacttctcatcttgggcttcatttggatccaccaattattaacaaggagaagtgttataggaacatgagaaagcaagaaggaagctaagatcatcttttcatatgcccaaaattccctagttagtcttgtttagttcatattttcttgtacctaattgctttatttcatgtaagcaatatcgcatgtacgtatacgatgtatttttatataaccctagttcttaaatatttgtaatgcttattaaaaatcacaggttttcatcttaaaacaaattggcaataagtaaaaaaatttaatgttgaatttatcaaacttccaatgtgggacaatttccctatctaataagtctttgagaatttgtgagaaacggtctaacaagaacaatccaaacttaatatattggaaataccataacaagacggatcacttatacgaaccgcagaggtgagaaacccctttatttggaaaagtgtctagtgggtcaatctggctctgataccatattagaaattataggctttcaactcaaaaccaattgacaatgagaggagaatattagtgtagaatttactacaagcattatataatattaatatatatcaaattacaactttaaaatataaagtatcatattttgttttattcctaatatgatctaatttaggaaataaaaactctaatacatgtatagtacgtacactgatatgtgccctcttgggaggaaaattgcggaaccgcatttttgcgggaaaaatattgactcacgtttttgtggaaactatacggaatcacatatttttgcgagaaaaattcattctcttatttttagctggaaattatgaaccgtattgttagcaaagaactatagaattatgttttgacgctaaaaagcgaactcgcattttttgcggaaaaatggtgagatcgtgtatttgacagaaattttgattttgagagagaatgagagatcgatgatgaaagatgtgagaaatttgtgtttgcttctgtttactaaaattggtttaaacattttattcagttatatttggtttacacatttggttattttgtcaatttggttatgggtaatccactaatctatttcaaccaattattccaacccaaatcattacactcattaatccattgattcattaattatcaaatttccaacaactcattagatccatgagttggattggtttgggttgagttgaaaaattaacttcaattcattttgacatacctataatatggtatatcatacgaaccacctaaaatatgtgatgcatgcacttattaaattgcattttacaccatgtttttgtttaagtacgtcaacattgaattagcacaatgtatacgtacaaaaaagactactttcatggtaatttaatattctaactcaacaagatatcatagaatgcaataagaagttgtcattgcaatgaggtactatcaaaattctaaaagtctcaattgtgtaattttccctaagaaatagggaaaataccatttaaatatcaaacatttacaaaatgctaaacaatgttcaaattttctttctatacttcttaagttttaaatacgaaatttctttcacagtaccaaattaaaactttgttaatatcatcggatatttctaaaaaaggaaataatttacatgatcctcaatccccgaaaaaaagtatggaagataacagttctgcatatgataaagcacctccaattttaataacgattaaaaaaaagcaaaagggtggttggtttatatttattgtcttttggatagagagtctctagtttcatgtgataaagtatcgatcgcccaaaatccattcatacgagatatgctgtgctgtgaggtgtgagcggtaaggctcgtgatgaatggcaaacgattcatgtaactattttcttttattatcttaacaaagtcgttgttactctaaatttaacacttgatcatatttctaatatgtatattctgaataatggcatggcgtcaattctaacttatgagactttaaacttataatgttcactttctcggtagcaaaaacgcttctctttgccccttaagtagaaggacaagaaatctattttttgtttcattgctcccgtttcctcacatctgcacttgctaagccaaccttggcttacttatgaccacctcgagaagaacctatttgaaaacagtctaatgccacaaaccaatcttgatgcatggacttctagttttgcgagaacgtttaatacatattatactgtatgactgttgaccaatcaattgaaaatgtgacttagtttgtgctgcaagtcgtgttccgtatgaggataacatgagataacgatagtaattaacagttcacaactgagtaaaagaatgcaacacattaaaatgatcaattgaaaagcaaagcagtccgaaaagtgtaaacaaacatttaaaaataaaaaattgttacattcaggtagagtaagcaatcccacgggattcatgtcaccttaacctcccaaaatatcatgacgctaagacaaggtaatgtatacgtcactcttctctaacaaaggctatataaaccctagattggcactaggcttccatgcaacacaaaaacatacacactactaataaaccatgaagcttcttatgctcgcctttgtttttctattagctttggcgacttgtaaaggtgacgagtttgtttgtgaagagaacgagccattcacatgtaaccaaactaaacttttcaacagtggcaatttcgaaaaaggcttcatcttcggtgttgcatcttctgcttaccaggcatgttacaaatcacccattgtgtttccatatttgacgtatagaaaaaccatccaaacactaattaaaatccaacgttgcatggttatttcttttcatttcaggtggaaggcggtagaggccgtggacttaacgtttgggatagcttcactcaccgattcccaggtttgtcgcttgcatggttgctatatatatacatatatttgcttacaaatccatatcagaggtatgttggatatatgtctctatatattcatagtaatctctttgtaccctatcagagaaaggtggagctgatttgggaaatggagacactacttgtgactcatatactctttggcaggtttgttccttagtacatatatatgcaagctaacgtacacactaaattatctatcaactatgtgattgtatatatatatatatatatatatatataaactgcagaaagatatagacgtgatggacgagctcaactctactggctacagattctccattgcgtggtcaagactccttccaagtatgtacattattgctccatgtatatctattgtaatatactagtattccattgcaattgtttggaagagtaaataaacgatatttatatatatgagcagaaggaaagaggagcaggggagtgaacccaggagctattaagtactacaacggtctcatagatggcctcgtcgcaaagaatatgacgccctttgttaccctctttcattgggaccttcctcaaacactacaagatgaatataacggtttcttgaacaaaacgatcgtgtatgttgttgatgccatgtcgcttataaagaatgataacaacatattcttgcactaacgaaatgattttataatatgctcagagacgatttcaaggattacgcggatctatgtttcgagttatttggtgatagggtaaagaactggatcaccatcaaccagctatacacagtgcctactagaggatatgcattgggaacagatgcacccggtcgatgttctcctaagattgacgttagatgtcccggcggaaattcgtcaacagaaccctatattgttgcacataaccagcttcttgctcatgcagcggccgttgatgtttacaggacgaaatataaggtgagttctcctttttttaaaaaggtgtaacctaatctaacctaacctaacccttctattgatccaatcatcatttcattgtgtaatataaatgtctgcgtgaccacaggatgaccaaaaaggtatgattggaccagtgatgataactagatggtttcttccatttgatcatagtcaagagagcaaagatgcaactgagcgggctaaaatatttttccatggatggtatatatatataaaaaaaatgaaatgattttataacagttatatgtatatataagctaataaacatataaatgtacatcaggttcatggggcctctaacagaaggtaaatacccagacatcatgagggaatatgttggtgatcggcttccagagttcagtgaaacagaagccgcacttgtaaagggttcatatgattttcttggtctcaactattacgtcactcaatacgcccaaaataatcagacgattgttccttcggacgtacacactgccttgatggactcacgcacaactctcacatgtaccactctatttctccttagttacaatctttctatataacatttttagtgaccatcaattatttcacccttgtgttcacagctaaaaatgcaactggtcatgctcctggtccaccggtatgtattatccgttttttacatttatgtttaagcaaaaataacgttcattttttcttttttctgatgtatatactttattttctcagttcaatgcagccagttactactacccaaaaggcatttactacgtaatggattacttcaaaaccacttacggtgaccctttaatatatgtcactgagaatggtgagttctactctctttcaactatacatttttagtgtattaattcacagttggtccaagaaattgaatcaaaatattgtctacttggtacatgttaggatttagtaccccaggtgatgaggactttgagaaggctactgccgattacaagcggattgattatctctgtagtcatctctgtttcctcagtaaagtcatcaagtgagtggatgatatatactcttcttctactcttgctctttatatatacataatgattaactgttcctgtttgtagggagaagaatgtcaacgtgaaaggatattttgcttggtctcttggggataattacgaattctgtaacggatttaccgtcagattcggactaagttacgttgatttcgcaaatatcactggtgatagagacctcaaagcatctggcaaatggttccagaagttcataaacgttaccgacgaagactctacgaaccaagatctactccgctcaagcgtctcctccaagaaccgtgatcggaagagtcttgcagatgcatgaaatatccaatccactatatgtccaccaagatcatcttcatgtttcctctttctacttgctccatagataaggagctttttctaccatatgtattaaaataaaatcctaataaaagatgatcaataataataaagactttgtttactacatttatgttggaagagaaaagaaccaaatagaaccaatccacaagtgaaatatccaaactcggatctcacatccatagtatgcatataatttaactagacaaaattcttttatagaaacatacagaagaacaaaacataaattggtctttgaatcaatagattatgtgcggtcttgtttttggaaaccaaagttctgacaaaatctcaatcttcccagttgttatttgttcattgtctaattaatgctgctctcgatattttccaagtgtagggcttcacttgtgtcaaaatttcccaaggactattgtttatatatagggttagaatgtcattgaactagttgtaagcatatgtttagaggaaatcatttgatatatctatacctactaaatattatatcaatgaaaatttgatattctcaaaaaaaatgaaaattttatattctcatgtaatattctttaatctgctttcttttgccaagctaagtacgatacatggttgtgcttacgtttatatatcataggtaaaaatacaaaggcttcaactttgtctaggatgcattgacgacgacctatacaaaatccatggtggagactggagagattgataaattagaatatgcatactctcacttaaatttgtccattgagagtatgagtatgaatatgcatactccatgttgcggccattcttcatctagtgagtgaaaaggtatgtttgcttttgtttttttagactatgtgcaatggaggtctttagattttgttttcaataaattattcaactgtttaattattacaatatagcttcgacaacaacacaaatctaatgtatttagatggtttcatatttttaaatagaaaatcagtttgcaaaacaaacaattagtactacgtaccttagatttgtattaatgatggtgttgaaaaaacaaaaaaaaatcatttgtggattcaacatagttaaagattcaacatgttgaaaacaaaatatgagaccacatgtgacatgtgtttttttttacttgatgtagaaatttataagatttttattttactcctatataagatcaattattgtataaactaatttaatttttatggtttatatcaaaatatcaaaacgctttatttttattttctctacaaataaagacttgtttcacttgatttgaacatagagaacaatatctaatttattataaatttgtttccctcataatgtttttttttattatcttcacatacacttttgttttaactttcagacatctctttaaaaaatacatctcaacaataagattataaaataaatgacaaatttaattaaattttagttaccttaatttaatttcacttgataagttattttaatatgtaactaaaaatatttaagaaaatcagaatatgagattaaaaaaattatggggtaggatgctggattttattattaaataaatcattgtagaagttaaaatttaatagatgttaaatgattaggtacaagagaatagaatgttaaaaagaaaagaaaaactttggaaaaaacaaaccaatgtatagtagcacaccttataatctagtcccgccgcagcacttagaactacaatattttttggattttgtattattttttttaatatacattaactttggcaaaatggactataaaaatcaaaacatcacataaaacagaaattagagctcggaactagttaaaatcaccagagacatcaaattccatcgaggaattccagcgttaataaagggcactacttcacttctcttttggcggctcggtcaaattctgtaaccagtgtgaacgattctgtttcgaaaccttagagcatccgcaacgcaaggttttaagctggttcttatgtttaatcctatttaaaattaatgttttaatgggtattatctcaagagcgcctcttaggtaagagctaaaaaattaaagtaagaggcggcacgtgtcgctcattaagaaagtgaggaagaaatataaaagcaaaaaaatctactctcttcctcttcctcttccttctctctatctctttaactcgattccttctctgtatctctgcctcaaattgaaacaatcgaaggagtctctaatttttctgaacttcggccatccttccgccgttatgtcatcatctccacctacactggctctccacggtgactttcgttcatctaatcggcgagttcgtcttcaacaaaacgacaatctcgtcaagaagcttcctgatcagcttcatcacaatgttatggtgagtatttatcctttcagttcttctatttataattcaattttgctcctgttttaatgtatatgatgattatgtgttctctcttttctatttcaattgtaggatatatgttattgttatataatatcgttctgctatgaggtttaagagtttaccagtaagctattgaggttagttgtggagttcaaattggtttacactgaagcaatggattttttggtggctctcaacactctaacccggtggctccaccatgcaagatattgaatcccactgtttgatgaaatcagctgttctccgtaacctctccgatttcgtcacatacgctcctgagattcctttcactgaatctgttgagaaaactatgctgctattaaggttttcatagctcacaaggttaagctttattgcaagcatcatcatatttagctttaatatgttgtacctgaatctctgaattatagtcactcaaattaaatatgtgtacgtagatcatgaatctatgttttgcatttgacaagttttgatgtgattatcaactcttcaaacaccaattacaccaaaaaaatttgactctttttttaagaacccaatttaaaatactaccattggacaatgctaaaaactaaaattcttacccaagctctaagtttaacagtttcaaaattaataattaaaaaattgctaaaaacccttgttaatatactaccattgaggatggtcttagtatcctcggcagtggcggaggcatggctttgataggagggtcagttgaccccgataaaattttaaaaatctattatatgtcattatcaattattctactacaagaaattttgatgcatatatatccttctagacttctactttagcacaaactttcgagttgactcggcgtggacatgaaaacttcaccctctatgcctatgcgctactcgatatctcaaacgaatggtttgttctcctcaccgagtcatgcattcccctattcaacttcacaactatctacacgtacataaccgaatcagagcatagctttataggttaatttgatcatcccagtgcctatggccgaggccgctactacggcaacatggcccctgaagtttccatagaccaatggagaaaagggtctcagtggttttagatggaaattacattttaactcattttaagttatacacaaacaaatttgtatgtaaacacaccgaaatgtaaagaaataggagtatcaaatatataaaataatattaaaagatgtagttatctttgatagaagttaaaaatgaagtataaggaaacttagtttaagatattaactaatccatcatcttccttaaaacattctttgaactttacatcattcttttatgttgtacatcatatctccgtcttcccctataaaatatgaaaatgtaattaaagttgaaaacaaatagattttgttatctggttacactaaacaatttttggttcgtttttttttgctctcttgtttttaagaaaacaaaaaaaaattagtttttaaacaaatttcagtttcggttttttagttttggttttaaaatgataaacaactaagcatttcgagtttagttcaattttggtttcatcggatttttccccatcccatggcataatgtagtatacaaaatatttattaagtttgatcatcttttatttaatacagtaggtagaagctccttttatctatggagcaagtagaaagaagagacatgaagatgatctcgatgggcataaagtggttttggtctttcatgtgaggctcttcctatccccgttcttaaagggcagacttgagcggaggatatcttggttcttggtggtatctctcaagaacgactggtaccataagccagaagctttgaggtctctatcagcagtgacattattgaaatcaacgtaactaagtccgaatctgacggtgtagccgttgcagaattcgtaattatccccaagagaccaaacaaagtatcctttcacgttgacacgcttctccctagaaacaagaacgttttgaatgattgactgatcataaatatgttatattgatatggataaagaacaactaaagaagagtagcatccactcacttgatggccttgcggagaaaacatagatgactgcagagataatcaatccggttgtaatcgtgaaatgcttcggtgaagggtatggggccaccggaggtactgaatcctaattccacagtatttgagtcaatatcttgaaccatttttgaaatacacttaacatgtatagatgaaagagatgagtagtagaactaaccgttctcggtgacatagattaaagggtcaccgtatttggttttgaagtgctccattacgtttaacatccctcttgggtggtaataactgcctttagagaactgagaaagagaagatactatgaatcataatattttgcgtaaaatgaatgaaataataagggtgaatcatgcataccggtggaccagggggttgaccatttgcatcaagagctgtaaacacaaggatgatataacttgatggtcacaaaatgttgtgattaccaaaatatagaaaggttgtaactaatgaaatgaaagtatatagagagtggtacatgtaaggtttgcgagtgagtccgtcatggcagtgagtttttccggaggacttgggtcaagggcgtgggcgtattgagtgacgtaatagttgagaccaagaaaatcatatgaaccctttaaaaggcgagcttctgtgctgttgaactttggaagccgattaccaacaagtttcctcatgatgtatgggtatttaccctttgttagcggctccatgaacctgatgtacgtacatacatatttttattaatttacatattaatttttaaaatcatttcatttataaaaaaaaaaatcattttatttttggatattgatatataccatcccaagaagaattctttggccctccaagttgcttgtttgctctctagagtgtcatcatatggtagaaaccatctagttatcatcacaggtccaatcttccctccttggtactgtggtcacatagacatatatatacacaatattaattaaaatattatagtattacatcacatgcacctttcacaaatattggagacctgaccttatatctcgtcctgtatagatcaacgaccgtggcatgagcaagaagctggttatgcgcaacgatatagggttcggtggaagaatctccaccgtaacatcttttatccacccattgggaacatcgaccgggtgcatctgttcccaatgcatagcctctcgtaggcactgtgaaaagctggttgatggtgatccagtgctttactctatcaccaaatctctcgaaacatagatccgcgtaatctttgaaatcgtctctgcgcatattttatatatatataatcatttccttaatgcaatttcaaatatttacgtattttgtaatctttcttattaagcagcatgacatcaataacatacatgatcgttctgtccaagaaaccttcatattcatcttgcaatgattgaggaaggtcccagtgaaagagtgtaacgaaaggcgttatgttccttgcgatcaggccatctatgagaccgctgtagtagttaataccatcttcgttgattcccctactcctctttccttctgctcatttatatattgtatatttaatactcttccaaacaatcacaatccaatgttactatatacatatatggatcaataatgtgtacatacttggaaggattcttgaccacgcaaaggagaatctgtagcctttaactccaagctcttccatcacgtctagatctttctgcagtttatatacaaaatcatatgttaatccacacgcagttaatagatcattcagtgcatatatatagtgatgagaaattaacctgccaagtccggtatgagtcacaagtagtgtctccattgcccaaatcggctccacctttctctgatagcgtacgtatataatgacattactatgaatgtatagagacatatatacataagaaatatttcatatcatatggatacgtaatatgatacgtcatttggacaaaaaaaaaatcatatggatacgtaaaacttaatttataggaatcatgcaaatgacaaacctgggtatcggtgagtgaagccatcccaaacgttaagtccacgacctctgccgccttcgatctgaaatgaaaagaaacaaccatgcaacgttggattttagagttttgacgttaaatcatttcggtctggcaatacaatgtgtacttttgttacatgcctggtaagcagaagatgcaacaccgaagatgaagtcgctttcgaaatcttgtttgttgaaacgatctgtttggctacatgtgaatggaacgttctcttcgcaagtaatctcttcttcaggtttgcaagtcgccacaactaatagaatagctaaggcgaacccaagaagcttcatggttaatatgtagatgtatgtgttgtgttgcatggaagccttgtgccaatctagggtttatatagcctttgtaaagaagagtactgacctatgcattacattgtgcttattattttccggaggtttaggtgacatgaatcccgtgggttcaagggttcacgtacacgtactctatctcagtgtcaccgatactaattctttttcccacgttgagaatgggttagattatatttgatataatgaaaatttctttatctcaagctctcaactgtgaactgttgattaaaaataaaattaaaatatactcttgatatataaattagaaaaaaaaaccgttgattatttctatttttagagtttatttggtaaagagaaatgggttgtgtgacatctaccaaatcaacaccacacggatgccaagcagtgccggaatacgggaataataataaaaacattcatcatggttaaaatatacaaataaataaatatgaatatttaccttttcaaacaaatatttattggtgggaaaaggtaaattttgctaattttctggtcaattgaatttacaccacttttttttttttttgacaaaaatgtacgcgaaattttaataattttatgggatcaaatgccacccctaatctcttcttgtgcctatgccgccgcgtcaatttgggttggattggggattagcatggcatgcatcgcaggtttgcgcaaaactagaaggatatggatcaagattccttgtagtagattttgtttgtttttttttgtgttttgggcaaagattccttgtagtagattatgctcatcaaagcctcttaattaaattggacgtacagttcatttggttagtcgaaatagtcgtatgttttacgcttattagaaaatccggtgaattggccatttgatggttatactcatcttgatgaagtgagatggtaaaaagccggattatctcctagttatccaaaaaaaaaaaatgttgagcatagagttttgaattaacaccagagagttattgaaaacgtttatagatatattttcgactgtttaatttagagttacaatgcgttcgttaagaaaaacaagtaaattcatcacgaacctcaccgctgacatcacatatcctatggattgtggccgctcgacgatgcttttatcacatgaaaccagagactcgtcctccaaaagaaaaggaaaaactttttttgcactttttaatcgtttcaaaataattggaggtgcttttcatctgaaaacagtcatattttcgttaccattacatttttttattggttattcatatttaaatacattaagaaaatataggtttatttcttatatatattaactaaaaaaatatatagggtttcaatcttgttgttttgtcagggtaggcatggcattcgattaaccagtcggttttggttcgtttgcgtttagtatcggttagttcggatatgttaatataataaccattcagatattttaggaatttcgatttggttctgttcggttacttttcgatttggttaggttttatcaaaataaccaaaattaaccgaaactaaaagaaattaaccaaaaaaatacggaaagaaaatacaaaaaaggaaaaatttataaagaatattaaattttggttcagttttgtaatagagtatttgactttgataaatattaacaagatttgaatatgttgattaattaaagtacttgattgttttgattctaaaaataattagtattttgagtttaaaattatagtttggatattatttttgggtattttctagggttttggatatgtcaattaatagtttaagcatcggttcagtttggttcagttttggctagtttggataagggagtttactaaccattcgattattttaaaaattttggttcgaatacgttcagttgttattgtttaataatgcgaccgtacacatatctatggctaaaaatgtttagagaatattttgttgacaaaaataaaaggaaaatttataggttaaagaggcaaaaaaaaaagaaaattttgcggataaaacagaaccaaaaggagttcataattttttgagaatattacacgtataggcactattttgaaactttagccacaaataggcactttgaaaggagaaggcactttaccaaatcaaaattcctaaattgccctctgaaccacaacgctttctcctcattttctctctcaactcttttctccatcgtctttatttctctctctttccaaaatcaaaatcaattttttacgggaatctcaatattccaaatcaaaactaaaaacccaatttcatatgatttatcatcatcttccctgtctctcaacaattatttgatttggttccatttatttctctccttgattaaggaatctctgtcatcgattacaatgaaaagtgaggatgttaaccatgatcagttaccttctaagcaatctgggcttgaaacggttcgtgatgttgagaacgcgagtagcagcaaaaaggccattgtcgatgtaacttcatctgaggcatagttgtccattgatgagtgtccaagcattcaagtccaaatggtcatctattaactcacatttgaagcatagttgtccattgataagtgtccaagcactctagtccaagtggtcatctagtaactcacatctgaagcatagttgtccattgatgagtgtccaagtactcaagtttaagtatataaagcgtgtaagaagatcaattgtagcagcaatgttctgttgttgattcttaatatattcttcgtttttaagttatgatagagaattttgagataatctcagaatttctatgatttgtaagaattatagagaaccaccatgattgatgattttgaaaaagaaaataaaaatgatgaaaaaaaaaaaacatggaagacagagaagataaaaattatgctagtttgtctccatgataacttgtccacgtaaacgtaaccatgtggaaataagtgattctcataagcaaaagaatatgcttttaaggttagacgttcaatgaaacatcaatttatcaagaaagaatcaaattgtaccaaacaaggcgatcaaatggatatgaaatttaatactggaatttgccaacttgggttttccataaactctcaaatgtttgattttgataaactcttaaatgtttgattttgcaaggaaagaaaaaaaagtaataatgagaagagagagaaagagagagagagagaaaagaagaagcgacgaagaagaaggaaaaaaaaggaacgtggagagatgaaactttttttttaattataattttttaattttcaggggtaaattggtcaaaagtttaatgaaaaagttggaaaagtgcctcatccctgacaagtgcctcaaaaggaataaaattctctaaaagtgtctaaacgtgtcacattccctatttttttccctctagctataacatttacaaaaatataacaataaattttagaaaagttgactctataatttacatgtttaggggcctatttaataattcctttgggcctataaagtgtttaaaccataccggatcaagcatcaattgtttttgtttttttaatctaatattaaattatatttaaaataataataaacatcaattgttatttttcttcttgagaaaacagagatatcaaagacttgaagttctcgttttattaatcaaaaaccaaggaacaagaaacacctttcgaccctacataagcgtaagtcgataacaacaaatccaaaacgaaacaagagatagacatcggttctcttgagcgtgagtcaaaagaaccaaatgttttgtcattattagtaaccaaataaccaatcaaaaccttaaaattcaatataataatagtaatgtggtagattatcatctttgaaaatgttgcgggttattgagaacaaatattcattcacgaaagagctttttgtttatggatgtggcacaaactacttacaaactttgttgtaatacatcaatgccataccatctacatatacatttttgcagccactttgttaaataaatcctcaagttgaaacttatttacaatggttgtcattggtatttaataattgtttttcataattaaaaagtaaatcttaggattaaatatttgcatttaactactttcccacaatctctccacattaactacacaattagttactaaaataaaacttccaaaatatttaatatcatttaaacactacaaaattattattttttaaattgcttttttcatgactataataattcgattataagcatcaaaccgtagagatatttgataacagttaattactacaaaattacaaaatgtttaaacaatgattcataaacatatcataaataagatcaacattaacaaaataaataggtttttttacgggacggattggcgggatgggtttggcaggacgttacttaataacaattgtaaactataaaataaaaatattttatacatagatacaatttgcaaacttttatatatattaacttttaaaaaaataaattgtccccgcggtataccgcgggttttaaaatctagttgaaaatacaaaaagagagcaactaagtgagattttataacctgccaagatcatacacgtggaaatttaatagtctctcctcccaccaaaactaactattcaatctcaccttaatagccaattaaccccaactccacatacatttatatgatatctatgttaaattcatgagttttcttagtgacgttacctactcaagaactcaaaagtttgggtgcaatttgaaccaaaggctccaaagcactaggagaaaactttctagcaaagagataacacatggatgtgtagccaccattgtaagtgcagttgtcacctttgagaattctggcaaagaactcctcattgatgtcttgtgctccaaatgtagctgggtgggcaccacctctcgaccagtcgacccaagtcacacttcggttagccaaggcggccggtttctcaattgtcaacattgttgggaaataatgctcgtccacataacaagcaggttgacaaaactctttgaatttagggtaatataatgtatctttgacaatggaaaccgcaagctcccggttaatctcaaaccattgagacccttttctccattggtctatgaaaacttcaggggccatgttgccgtggtagcggcctctgccatatgcaccaggatcatcaaatgaacccataaagctatgctctgatttggtcatgtacgtgtagatagttgtgaagttgaataggggaatgcatgactcggagaggagaacaaaccattcgtttgagatatcgagtagcgcatttgcaagaagccgcctctctgcatcgcacattgtcattcttccccattctgcaacctgcccaatggtgaagataatccaataaaaattagatataaaaacaagttaccaactagtcaatgaatcacaagttttcctacaaatcttgcaaggtagattaagagctattacctgacttggtatatgcctacggtagaaaacagaggaagctggaaacttagctgaagaagatacaggtgaatggatataaactgagtaaagcttctcatgaccctttaataacctctcccaaagcggtgcaagaggcaaaggacccattgtcaagaacataaacgcgattttagggacccgattaaacgggtactctttcctccgaggcatgaaagatgcaccccaaagaagctcttcatcgctcatattatgcatgagaaccacaagaggtttgatccatttatcaagatcatttattttctcgtggcaaggcacaaaactagaagtgactgaagtcactacactattgattccataatacttgatggtggatacactaatgaagaataaaacaacagtaaaagctagaaaaaaacctagcaagagaagcaacttgtaaggaaacgccttagtaagcccggtccggctgcttgtaactacaatctctttaccttcttccaactgaagaaccctactacactgcatccttacactagatattaataaataggtgtcttgttataccgcgttacgattctgcttcttgtatctttaatatactcatgaactagaataatcaattccacaaacagaatcaacaaaattctccaacgttttgaatataaacccacagaatagctagctgattcaattcttgtaatcgccaaccataattagaagcaattgatgggaaaccgtcaaaaaatcctaaaagaaaacaaatgaaatcaagaactacttcaataaactgaaatagaatgtaaaaaagacttacttacaatggttggaagagcttgcgaagccgtgtagaagaaacttagagaagatgagcttaaaaaggtggccatttgcagaaagtttgaaaatttcaaaaagtgaagacttcataagtcagagaaggttaggtatccaaagccgtcctattttaaggcaactagagtgtttggtttcttaagaaggtttggttcggagttcggtccacttgattcctaacatttttgttaaaacttaaaagcctgtattaagggttgactttcataatatttagcttcttcctttctgttctttaaaaaaaagaagagagatttgaattcatattttttaattattagttaacataagaaatatcaatatgcaaactcttaattattttataagtttatttgttgtgtgctataagttttgtaattttcttaagctaatatatatgtaatggggatggtaataccacaattctatcgcctcgacaatagaagataattctatatttctattactcattctgtttcaaaacaaatgatatcttaaagatttttttttttttttttcaaaactaaatgatgttctcatttttcatccaaattttatcattttcaacgtttttagccatttatatatgcagtttgttttattatttgttgatttgtgtttaagtaaataacaattaaaatgctttggctttaaaatgtttgatgtttaaggtttttgcatcttttctaaataaaaacattggtttaaccattattaaatattttaacttatcccaaattttgcctattcaaactcacaatgtttcttccttaaattatcttccttacttcttgcttgtgaagtgtgaacatgttttcattttttccactcttaaatttagttagatcaattataatgggcaatttacgcataaatcacaattaatcaataagtttataaatagataaaccaattagaaaaggtgttgtttatttttaatttccaattttttttactgtgaaagatgaatccttttatggctttatcaaaagaaagtattagcaaataaaattttaggcaaggatagatagtttaggcgttaaaaagatagtcaaaggattaacttaattacgttttgcaccgacttaaaagcaaaccaaaaatctagaatcggagtagtaattaccggagcattcatatttagtacgttaagcttgctgagttttatagcacgaagaattgaccaaaaggtttacaaatccgttttttcaatatttatgcgtgatagtatcatattaactagaagaagaaaaaccattaggttttgtaaactctataagtaggaagaaggttcaagattcaaagcctatatcctaattctattccttcaacctagtaaacacacacaacaaaattccgcaatgagattgttcttaatatttgcgattctgtgtggtttttacaatgaagcctatgggaaaggttctttagatatcgatatgaaactgaagtctcttaataagccttccttgaagaccatcaaggtatggactaaatctaaatgcgaagatatgacattttctgtatattttttggtttctaagctcccaaatcgatttgtagagcgaagatggagatataatagattgtatagatatctacaaacaacatgcctttgatcatcccgctttaaggaaccacaagattcaggtaaacaaattctactatataacgatcatataaatcaaagattttgtatatacaaaatttggttatattttgctttggacctaggaaagtttctatctttacctaatctacatttatacatgcagatgaaaccgagcgtggactttggtacaaagaaaactactattccaaacaacggttcttcggaacaaataacgtctcaaatttggtctaaatccggaaattgtcccaaagggacaataccggtacgtagagttagtagagaagacaaacagagcctcttcaccgtctcattttgggaggaaaactcctcacagatatagctttctcgacaaggctcttcaacacaagggtagtttcaatataacagctgcaaaaataactcatgcccgcccaaagcttcgatcggtacgttaaacataatttattttgttattcgtatctacattcatagtttataattttccttctctttgctaataaaaatgaaaagagaaccaaaaaaacaacacatccattcaaaagctaaatcgttagactaaaacctatatatggttaactagaaaacacttattgtttgttaatgatataggaggctgtccttatggccttagggtataattttattggagctcaatccgatataaatgtatggaaccctccgagggttcaggctagcgactacagctctgctcagatatggctgcttggtggcctctcagatacttttgaaagcatagaagctggttgggcggtatatttttacttccatcgaagtactatatctcgtatttgaggtaaattttaaactgatcgctatcaacctatttcaggtgaatccaagtgttttcggagactcccgcacacgtcttttcacatattggactgtaagtaataacatcactaaatcactaatgactttataacatcttaaatctcttccatgagttcataacttctctttctatttggatttgcagaaagatggatactctaaaacggggtgcgtcaacctcttatgcgcaggttttgtgcaaacaactactaagtttgcattgggtgcagcaatagaacccgtttcgactacctcgcaaaaacaacatttcatcaccgtgagcatgttcttggtaacatttttgccttatacacatatccaatgttttaaaagtagtctaggtagttgtctatgctttgatagaccgtaaagattggagttaggtgtttatgttattaagcggagttaaacacatttaggcagtccttagattcgttttttttgcttttatcgtatgtgttttggttaatgcctcaaagttggcgttataaatcaaaaatatgaagcaatagtttcctttggcacatgttttagaacctgcatatatactcttttagcttacaatgtttaatgatcgactatgtttgcaggataccaacagcgggaattggtggttgacatgtgctaacaacgtgataggttattggccggggacactcttcgcctacctcaaacatagcgcaaccgctgtgcagtgtggtggagaagtacatagcccaaacgtggggaagaagccacatacaagaacttcaatggggagtgggcaatgggcctcttacctctgggctcaagcttgttaccacagcaacattagaatcaaggactattccttgcagatcaaataccccaaatatctgtccgagtacgctgatgagtacgagtgttattctacaaagctccaccggaaaacatacatgtcagagccctacttttactttggaggacctggccagaattctcgttgtccttaatctttgggtgaatttgttaatgttcattctctttttttgttagtcttaacgatatgtactgaattacaaacgtcgattacataaattaacaaactgcgaaatctaaaagaacgttgaaaaagaacagaaagtgaaataactagatattctcagtattagtcaaatgatatatgcaaatgtaagaatataatgtacttaattattaaaaacatatacagacaagtttcatattggatattactttttaaatggatttcaacaaaaataataatttgtcattgtatgcgataatacttctacacgatttggtaacgatttctctcgaaccgaaaaacaaaaactaatcaccgtttaagtttcttcattttagtttcatatcattgatatgttgcgtttttggtgttttacgtcttttagtattgagttatttatcgtatcatagtccgtcttttgcgtcttttcggtcgtgtcttgagtcatttgcaggttttaggtgtttaagcgggacataaatattttcgcgacttatcgggctcatttggaccagaaaagatagcaagaatcgagaaatcgtccgccagcactggatcgatcgatcccaggtgatctgcattgatcatcatcagccttacacacaaaaaggctatcatctgcaaaaagtaaatggtgtatagaaggaccttcaggagaaaacctcataccactgatgagaccttgctgttcagctctgtttagaagatgcgatagtccttcagtacataagacgaagaggaagggagacaaaggatcaccttgtctgagacctctctgtggaaccacaagaccatgcgggtggccattaaccaagacagtgtaagacacagtagtcacacaagacatcaccaactcaacccaatcattatgaaaacccaaagccaacaacaggtgacgcagataactccactcaacacgatcaaaggccttagaaaggtctgtttttatggccataaaatccttagacattgaatcatgagttctcagcgagtggacaatttcatgagcaatgagagtattgtctgagattagccgctcttctacaaaggcagactgagtgggcgaaacaagatcagcaaggataggctttagtcttgaaaccagaatctttgagattaccttatacatcactgaacaaagactgatgggccgaaggtcagccataagactagcgttagtcttcttagggattaaacaaatttaaacaaatttatcatataagtctaatcgtttattttcttgcatttacatttgagaaaaccaaacaaacacccttttcgctttaggtaagaacgagtctcggaaatccttagagtatctttggtcctcgtggatcgacctcgcatatactacatttcggttaagtgtatcgagcaattactcaagcaataaatcatcataccttagatataattttcttacttaaattatgaattcattgcttaacaaaaaaatatataacccaatgaaaggatttttttagaaataaaaagagaccacaacaaaacataagcaaattttgattttatccacaatatcgaaacgaatgtcatttgttaattgcacaacacaaccaaatgactaaaactacatcatttttcttgaaaacaaaatcaaaatttacacatttcatttgcaatacaatttaactacctatttaatcataataaacttgatttttgttctacacacttcatcttgatgaataaacgctaaaagcaattatatcaaactaatatgtataacatatcatatcaaatctatattatagttaatattaaaatagttaacaaataacaaaatcaaattcaacaaactaacaaaaaaaaacctttaacaatagaatggcgtaatggtgcttttgaagagttttttggtttggtgaaaaaataggaaattatctatttgtttgagtatatggaatcttttcccttttaggattaataaatgattgtaatttccaaaattattgaattttataaaataagattgtacaaaatctgaaatccttttaaaattttaaggaaaagtaatttttgttttgttttaaacttagtagactctaataaaaattagtaaattattttttaatttctatttatatttaataagatacatctagttttctcctatatccatttttttgaaaaaatttagtttccttatacttatttttaaatttataatttcttacaattatccttttatagcctttaaattaataaaaaaaactttctatatacgtgtcaaataagatcaataaaattgacatgttgcataatcctattagttattttgaaaatcatactttatataataagatatatatatatatatatataatattatttttattatgttagaaatcctcatataaaattttctatttgttaaattattaatggtaattaacgttaatacaataacatcaaattagtattagtattgcttaaattcaaacattaatatataggaaaacaaaatgagatttcaaaattatttatcaatatttgtttagaatttaatattagatttaaaattcaatgaaaaatataagttaacataaaaattaattaaaaacattgaaatattagtatggtattgatcagatacacatattaatatatatatatatatatatgttatttcatcaataaaaagaaatatttagtcaagtttctcaaactaaattgaactaaaaatagtgatattatattagtgagaaagcttatgtgttttggatcgacgtaattaaaagcaaagcaaaatataggagtagtaactaccagagcattcatatatatttggtgagtagttattttaaaataaataaaaaacatatttggtaagttgagctgtttcatatcaaagattttgtttaccatatataagtttcccaaatctgcagatgattgttgtcatgacttccgttttttctcaatctttgtgttgatattaatgtgattgatattatcacattaattatataaaaaacaccttattgttttgtaacctttataagaatgaagtttcaagattcaaaagcctatatcctaagaactccaagacaaacagccacaatgagatttttcttaatctttgtgattttgtgtggtttttacaatgaagcatatgggaaaggttctttagatattgatctgaaattgaaggctcttaataaacctgcgttgaagaccatcaaggtatggactgaatctgaatacgaatatataacatctttgttatagtttttggttttctgagtttccaaatcgattgtaattttatttgtagagcgaagatggagatataatagattgtatagatatctataaacaacatgcctttgatcatcccgctttaaaaaaccacaaaattcaggtaaacaaattctactatataacgatcatataaatcaaagattttgtatatacaaaatttggttatattttgctttgtatataaagaaaccacatttatgcatgcagatgaaaccgagtgtgaaatttggtacaaagaagactactataccaaacaacggttcttctgaacacataaaatctcagatttggtctaaatccggaaaatgtccaatggggaccataccggttcgtagagttagtagagaagacataagcagagcctcttcaccgtctcattttgggaggaaaactcctcacaaatacagctttctagacaacgcacttcaacataagggtaatttcaatataacacctgcaaaaataaacgaagcccaaccaaggttaagatcggtacgtacagtgtaaggtcttaaatatatttttttaagactaataaaagcttcatatggttaactagaaacacttatgctttgtggatgatggtataggaggcatttattgtggccctagggttcaattttgtcggagctcaatctgatataaatatttggaaccctccgagggttgaagctaccgactacagtactgcccagatctggctggttggtggtctctcagagaattttgagagcgttgaaggtggttggatggtacgtttccattgctaaaagtattatactttgctttagaagtaaaccgtgacccgattaacaaaatcctatatttcaggtgaatccagctgttttcggagactcacgtacccgtctcttcatctcctggactgtgagtaacacttttatataactaccaactttgaaatatctcaatcacttacgtgagtttatataactacgctttctatttggattttcagacagatggatacactaaaacagggtgcatcaatctcttatgcgcgggttttgtgcaaacaagtaaaaaatttgcccttggtgcaaccgttgaacctgtttcgagttcctctagtacgcaatatcacatcaccgttagcatattccttgtaagattttctagtttatatatgatcaacattctacacaattttacaaaattataaaattgtcccttttggttaatgccccaaaaaccggtgttaaatttttttgaatatgttttggaacgggcttgtattgtcctttaatgctttatgatcgattgtatttgtaggatccaaacagtgggaactggtggttgacttgcgaaaacaacgtgttgggttattggccgggtacactattcaactacctaaaacacagcgccacagctgtgcagtggggtggagaagtacatagccctaacgtagtattgaagaagccacacacgacaaccgcaatggggagtggacaatgggcatcttacatctgggccgaagcttgtttccacacaaaccttaggatcaaggactattccatgcagctcaaatacccccagtttctatccgagtatgctgatgagtacaactgttattctacactgctccaccggaaaacatatatgtcagagccccacttttacttcggaggacctggccggaactctcgttgtccttaatctcatgttgattttgtcaatgttcattctcctgtttttttgttagttttatcttcggaggacctggccggaattttgtttgtcttctaatttaaactaatcagagaagatcttatattgatcataatcttttaatttttttcattactaacaaagcctaagaaagtggaaaacacaatagggagggtaaaagaaactgagccaaatcaaaaggaagtctctaaactgctaatcacaaattgcatcgagtcttgatgccgcggtggaaagtttcaacctctacatgtagaacaaagagacatgttgaaaaataaaatgtgataaaataatttttccgtgtatacataaaaaataaaataaactagtttcaacctctatataagtatatattaccgtcgacatcaatagtaataaaaaatactcaaatgaataaaaacaattctgtggataataagttccaccaaaaggaaggatcaaccataagttcatgacttttgggattatctttggtagttaatcttagtttcatagcacaaagaatgagccaaatgtacgttaaatatgcatatttttattaatttgtatatatagttttgtgtatgtttcttatcaacttaaaaaagaggaaaagtaaaatcatatatatatatatatatatatattatataattgaattatactataaggagaaggcaaattttaattgtgtctaagttactatatatatatatataattatgtacatataattaattttgtattaaattaaatatttgctaccctttatggagcttatataccaaattttgtattaaataaaaaataaataaatagtctttaacctttataaggtactgaaaacctttaattcgtataaattaatatatatgttttgtttcacaataactaaaaaaataagtaaaagtagaaacaacagatatgtaagctctataagtagtaggaaaaatgtaattaaggatccaaaataataatatttatattttatttgcaaccgaaaattttatagacaactcgcattgaaaatgttctcaacttgtttttataggaggcaatacttcttgcggtagggttcaattatattggtgctcaatcagggaattgtccgatgccattttccagtggaatttgatagaaaatttaaaattaagcatcaaaaagttgtctgatggcattcatcggagttgtcttgaatcaccatttttccgtttcatctcctaacgtctgtttttcacttaaaaagtctccaattccagtataacttcgtaaaacttgtacaaaacaaccgaaaaatacattaaaaacgaacaaaaatgtgacaaacaactcaaaacaaacactagacaaaggacataagacactaaaaacacaatataccacatacaattttggagacacccgcacaccgctcttcacctcttggactgtcagtaacattatgacatgactatagacattacattcactttcatgaaatttacaactactctttggatttgggttgcagaaagatgcatacagtaaaacagctccatcaacctcttatgctcatgtttcatgcacataagtactcaattagccataggtggaagcttagaccctgtttcgactttcgagtagctcggatatatatgcattatatcacatatcccttagcaccatattttctaatttaatttacaatatcactcattgccacaagtgtataaaaaccatagcaatagaagggtatcaaagttcaagtaaccaattaaattagaacactagaaatacattctatcatccaatctaagcaatcaagttaaatcattagaacaatattgaactaccgccgaagtaagatctcgtctaccggagatattgtcagattcttgcctccgttttgtatttgttgttttgatttgtaaaactttggctcaagtccaattcaggtattataatatttttaaaaaaagaatattgaactattaataaaatcttaacattttctgttggtccctagtacttttgatgggctctctatatcttcgcttttgtatgtttgaagcattaaggccgaattcatttaaaactcaacttctataccaaaaattttattttaaattttatgtaattaaaataaactaaccaattttttaaaaattactattttaatcacatataaaattaagttttaatttatctttctatacaaaaatatcatcattaatgaaattaactaatttattatatttttttaatcattttttcacttataaattttatctaaaactgaatcgattaatttcttatatctctaaagatatccgtatggtaacaaaattgactccaaacatttcttaagtcgatttctaaaaccgctccaaaagaccattgtgcattaaaaatactaaaaatctaaaatttaaaatattctcaataacaaacatttacgaaccactgaattttattttattttaaaaataatctataacataataattgttttatctgttttctaacacaaattattctaaatacatgattgaaatacatttctaaattggcgttttatagactatagtattttgacaactttgttttcaatattggcgtttcattattttggtgaaagattcccaacttataaaaaaaaaaaacgaatttttaattttcgtcctaatcatttatttcctaaccaaagaaaaaggcaaatcgcgacccgtctctctctctctctctctccttgaaatcgaaagatcaaaaaagcgacactgaaaatggaaaatcggtcagaaatgggtaaccggaggcagcagaatctcttcgtcatagcttctcccgacgagattgctaagatccatcgagccgaaacttccaaacaaggtctcttcttctttctccgtctctctctctcttttttcccctaaaaaaaatcttttaaattgatgactttggattatgttacagccggagctattgccggagctaaggccgccgccgttgccgccgtcgccagtgcgattcccacagtaatcatataatctcacttatctaaattttttaaattgagatcttaaatgaattaaatgtaagagttatgtttctttgttgttgaattttaagacaaaagtgactcaccaatctcatgttctgtaataatcaagagtttcaattttgttacctattcattttgtgatttctgaatacaccaagtagagtcacattctttttgatgtgtatataagatatgaatttggtacataagcatgccttgttttcgtaacaggtagctgccgttcgtatgttcccgtgggctaaggcaaacctcaactacactgctcaagcactcattatttcttcaggttagctctatcagcaatatgccttaaatcattactatatgttcttcctggaactaagtagaaaaaagatactagctttaacattgttgtagaaacctcgaacttcccttttgaacctagttgagtttggggtttttaagtattcgtacattcatttctccacaattttcttctgatttctatcttgtgattatggtgatcattggaacagcttctatcgctgcgttcttcataaccgcggataaaacgattctacaaggcgcaagaagaaacaccgaggctcagttaaagaaagttcagcaagactctaaataatttctcttcttattgtaacacaaatcaatcatcatctttctctgttttgtatgcatattttgccttgattcttaataagagtgttattattataaggaataacaaattctttaagaccattttttattcagactttcagattttgttctcaaataagttacaagctggtagttatactcttaactaaaactttgcttacacaaaaactaaatggtttctaatacatttgtacatttcacaaaaaaaacaacatcaagtgttgtgattatttgattatacaaaacctaaatcttcatcttctacccttttacttgtccttcgacccgataaactaactagtagaggtgcctcatatgcctctgttgcagtcttcttcgtcgcctcaagtccttgttggcgcagaacatacaagacctctttcatggaaggtctatgactaggcaatgtgttagtacacatgagacctagcttgaaaactgttgtcatcgcctcagtcgtggaagcttctttgatgtcctcatcaaacgcctctgcggtcggttttccagattggtaatgtttccatgaccaatctgctaagtttgtgtgttcatctccgttgtttccttctcttccagtcaccagctctagcaaaactaccccgaagctgtacacatcgatcttctcatctacctttgacgtatatgcgtattctgcaacataaaaatattagagatcacacaatgagcgactctattcgactctaaagaatgttttttgtttacgggtattacctggagcaatgtaaccaaaggatccagcaacagctgacatggtatgaggttcttggttttgcttaatcaacagtttagccaacccgaaatctgcaatcttcgcgttgaattcagaatcaagcaagatgttactcgacttgacatctctatgtatgattgcgggagtacaatcatgatgcatatagcaaagtccttgagctgctccaactgcgatattcaacctctgtgaccatgtaaggttattagcctctacggtacctcccttcttctttccatgtaaccattgatcaagactgcgtttctcgagatactcatacactagaagctttgaatcttcccttgagatacaacacaatagtttcactatattcgagtgcctgatcgttccaagaatctcaacttcagcaataaactccttctcaagtttctggtccagtttcttgctgtcccatatcctcttcactgccacacattgtcccgagctttcgacgaaaatcttgtaaactttgcccgatccgccactaccgatcacgtagtgttccatcagattcgacacgatgtcggattccgcaaaatctactctatgaaatgaagtgagtttccacgtctctagacctcttcttctttgtttccttgtgtagtccctaaccacaaagaacgtaacaaacagagtaatggtgagaagcagaaccgcgatgactagaatcatcgcgaggattttcccggggaaccctcttgatccccggcgctgtttccgacaatccggtaagctgagaaccgggttgtctgcacaaagattagagttgttcaagaaacttctctcgtaagcaagattatcaagttgctctggtattcctccagtgagtctatttgatgacacattaaatgttgtcagcttcaggctcccaatctccggtgggattccaccggagaattgattctccgatagatcaagattgagcagacgtggcaacaatcctaaagctctcggaatttccccggaaagcttgttcttggataaacttaacgttatcaacgacttccatgagatgatctcatccggtaattcaccggtgagatcattctcatcgagaaagatcgatatgagattcgaaagagaagtcaattccttcggaaactcaccagaaaactgattgtttcccgccttaaactcaactaaggaagaccaagtaccgattttcttcggaatctcaccggaaaatcgattgttatcaatctcgatcctcgacatattccaagcaacattctccggtaactctccggtgaatgagttgttactcacctgtagactatacatacttgaagcattccagatccgagaaggaaacttgccggagaagtcattgttctgtaactgaacagtcaagagcgttccacaatctccgagcgactcagggatttctccggtaagattgtttgagtacacaaccactccttgaagtttaccacctttgcacaaattttccggtaactttccggttaactgattctccgaaacttcgaatctctccagctttgaatgaactccaatctctgcaggtatttctccggttaacttgttgttgaagattttaaactccttcaatcccggtagttttccgataaccggtggaatttctccggttaacttgttgttgaagaggtttaacacttgtaatttcgttagatttccgattgataccggaatcgaaccggttaaattattagcagagagatcaagaaataccaagttcgtcgccgaaattgatttggggatttctccggttaagccattagcgaagagataaaactcggtgagattcttcaacccgaataaaacatctgggatccgacccgttaagttattgaccgataagtcaacgtgctcaagatccgtcatgttttcgaaaacaacgggtgagatttctccgatcaaattcatctcctctaaccacatatacttgagtttcttcaacttcccaaactctatcggaatcttagccggagtaaacttatcgtttaacgctagtcgaagttcttcaagctccgataagtctccgatctccgatggaaacgtaccgtcgtattcgctctggtacagattcaataccttgagcttcgagatccgtccgagacttttagggatatcgccggagaatccgttagcagctaagtcgagatagtcgagttccggtgagagacggtcgatgtcgacgggaagtgagccgttgagaaggttctgagagagatcgagatattgaagcttcgtgcaattgtaaagaaccgtcggaaactcgccggcgaagtaattaaacgataagtcaaggaaattgagattcgacaaatcgcatatcgtcgttggaactgtcccagtgaagttctggttcttgaaattgatcccggtgacatttccggcggtgcaagtgatctccgaccagttgcacggtgaagatgtgttgttccacagccggagagacggtggatctccgagatcgcgtttcaggttcagaagcgttgactggtcgttgaactgcgaaaagacagataagggtattgacgtgaggaagaagaaaaggaaaggtaagggtaaacgagtcattctctaatttttgtttgttgaggttttgccgggaaatttcttcggcaaccgagtttgactgtgaatgtgaaatggatacaaactttgaagaagttttcaagtttttttcaagtctttatagagaagagtaggtgaagtcatcgatgagatgtgttttttttttttgtaataaaaatagagatttgatgtttgggtactcattacgtcattgtatctacatatgtgacgattttaactggatacacatttgacgattagttacttatatactgtacaagtacaactttttgattcgaaattttgatttcgttttgtctacagttttgttgtattctctttacgatctaaaatccaaaaccatgtaaaatgggccatgacgagggcttataacttataagtaaatgatttttactaatggtattagtttggaactttggtttcaaatatgttttaaaacatcactcttatctattagcatgaaatctaaaactttcaatttggcaaaaaacagagtctccgttaagcaccaataatgactaatcatatgatatgcggtccttctagaacattattggccaaattgtgaaaaaaataaaagtgtgcttaaagagctagtatgctaaaagttgggttgttcaattcaaagacgcgaacattataaaaaatcaaagagtaattaataggccatttctctgaaatatattgccaagaaaaatgtgccgtttgaaaagtcggaagtaaagtcaaagttatctataatctagaatgattttaaaaaaaaattgatgaaagaatctagaatatgattcgattgttctaataaattgatactattgttatataataattactcaccaaacctctattgggaggtgttgctctgtatatcaacatgtagtttcattttatttttaattatagtttttataaagtgttaatttatagggtgaattgcaaaaaatgacggtttttgaaaaagttattaaatatatagtactataatgtatgtaatttatttgatagcacatgtcagttgtgaaaatacactcaactctttcccacggatgcgcttggagagaaagagaagccactagcaggaggaaagagaaatatatatgactaatatatattcacccctcttaattttgtttactttattagtttaacaatattatttggttaaagttaataatattattgtaaaaacagatttttttttgtttatctaatatgatttgaattttaaaaaacggaaacgaattttttaaaaaaatgaatagtgatatcaaattctatacagatcatcatagaaagatagaatagtatatatttgtttaaatagaaacgtttattccgatgaatccaaataatcaattaaatactttttgatggaaggatactaaaccctaagataatatatagggaacccaagacttttaatataaaacactaatcaaatcacttaacatccttaatcaaaacaaacaattcattttaaaacgtatatagtacaaggtatacgtaaatagtatattcacaaaatagaatagtatctctcaaaaatttctcaaaatcaaaatcgatttattggttcaggataaggaaacaacgacgccaataaattagagagaccgaaaaaaagaaatcaaatgaaggaaacagagaacagagattgatcaaattcagcgcttattagcgagaatctcgactaattgaatttcaaaaaccaaaaccaaagtctcttaaaaaaaccaaagaccccaacaaaatctaaagtcgtgcctctgtaaatcaaaacctctaattcaatttcgagcaaaacctaaatgtcatttccaaaaattaactgtcttgtttttgtgcccaatatacctctgttaatcgttggcaaaatcaaaagcttcataaacggtggactggaatttgttagagccaaacctatgttcaaaagttaatagttggcgaaagaaaatagttggttttctatggaagggagaagatgaaaagcgtgtatttcaaacagggatagtattggcattattacagaaaatacaaacaatattgcttgctttttttgagaatgttatttacttaattataatatttttgtaggttataaatgcaaatttccctaatttacaaaatcttttgtattgtagctaatagtaaaatcttacagaaaccataaaacgaacttataaacaaagttaaaacaggtgattcacaaaccagagagtaaattttgcagaggacatacatagtctaaagtttaaaggatctccagactcatatactccgaattagcctgcttcggaatatgtttgttgaagaccagttgcccaaaagtcttgtttaccaaaagaaaataagaagttttttttatattgttttaatttatgttgcatggaaagaaaacgattatgtggatatgagaaacggttttttctaaaattagagattagaaacattttggaaatatatatacatatatttacatatatatatatatatgtatattagcatgaaattatattaaaaatggcttaaacaacacaagtccaagacattaatattaaataagttaattaaaattctaaaagatatagattaaaatgtttaagttcaaatatttaatttagaccaacattttcattctcattttaattagtttcatcaaatttggtttgtcaaaagatcttaaaactcaaagtctttcaaaataagttatatactttagtaatcttaatatttctaatttagtttattaaatttctaaagtcaataaaaaggatttgtcgtgtgactagttcggatccatcgtatttccaaaaatagattttttaaaaacgtgttttcgtaacattttttgtgtttccgacgagtctctatttccgaaacgtttcgaaaacggaaaacatacctcaaaacgaatttccaggcaacctaggttttaatttgtttttctaataataaattacaacttactagtgatcttaacggtaattattgttaatttgaccaaaataaatagatagtgtaatttcttaatactagcactaaattttggtgggttgcgacaaatcgcacttttgtagacttgtagttgtagcaaacagttacaggggaacttataggaaatttccagctttacgacttgtaatcataatttgtagtccaactaatcatactatcatagtgttactttctctgtttagccataatgtgtagtccaatagtttataatataatcataatgtaaatttaaccaacggaaattaatgggatcttattaactactgtggcagtggctactatatagtggtagaatacccaatttttgtaggcttctaagatcattagtataagtttccctttatcatctatttcggttatttcaaaaaaagaaatatattcaaatcctaacacttatcaacatatcatataaacagagcttttttgtttcgtttctcttcttttcattggtttttgtttttttttgtaatatttttgaaatatcggaagcaacttctgttttcttttaccttaccaaactttctagaaacttttaaaaccatttacacatcaaaatgataatacatatacattaaaataatctatgaagtaagggaattaaaaattgaatcagcatctgtaagagtacatcctcaacaactaaaatttatttatgaaaacataaaactatacggcaagttttgtgatccaaacatatgccaaaaaaacaaaaacagtcttacaaacacaatggtgaaaaaaccaatctaaccataattatgagccaaaaaatgagtttattgctggattatttcgctgtcacacatttttgtaccaattacatcattccgaaaatcaagattatgtttatgtattaaaatattccgtaatgaaaatgactaaccagaacaacaatttgccataccttttttattcgttgaataattccagttttctacgattttgctactctaccttggtacgattctaagcctcaccaaaaacaatatttgtttttatgtaaacacaaatataaaagttctgtttagttttattatatataatggagcgactatagggaaacaataatcaatatgatctttatcaaaaaataaataatgaaaaataaataaatcagtgttaaaatgatctcaccatacattaaaaaataggtatcttaaaaagttagtaacacatttgttatattttaatattttttatacacgttgtctgattttgaacgttgactattcgattcaacggcatgaaattccagaagagaattgtcaaaacataaaaacaaaatccagatgcgcggaccccttaatatttttagctagctgtcttcacgatcgattattgttttgtaaacaactctcacatattgtttttgtgattttttttttttttgtgaattttttttttcttttaatagtaactggacaaaatggtacacctttaaaagtcaattaggtgtttgaagtgtataagcaaatatatttttcttttcacgaaacgtatattacgattccttggtgtgtgttttttcactacagatttaaagattgtgatttagctttattataattttcagctatgaacttatatcttcggactactctcgacatttggattacaaaaaatccgattagtgtgacatgaaattgtagagttttctttcttttattatttggtgttaaacagcaatttcaagcagcaatttcaccaatttcagaaacgaagatctcgggacaagtatcgagttgtgatagcctcatttagatcgaactacaaatcaggtgttgttgcaaagaaagtgaagaaaaacaactctcattcgttcttgtttcctccttttaaagaatcgtcgatggtgagcgttgaaggtgaactctctcaccttgatacaaacttcacaaatggaaattgtattgaacaatgccacatacatgatagttttcagattattacacaaaaatctggtgaagtgattttacttagaatgacagaaacgtttggcatgacaatgaaggaaataagtgatgagatagggaatgcgagtaatattcatggcatagtagagaaacaaatagatggcttgtgtatgagtaaaagaatcttcatgaatgggaataaaccttttggctcttttgtttttagctgggatcctggagaaatcttatgtgaacaacttcaactaggctggatagatcattactttggtgagaataaggaaccgaaactactgccaagaatgttggaaatcgaaactctggaaatcactatcaaaggtaaggtagttggggttatctctctggagcaactaggtcctggtgaaaaagttgaggctctagcaatccaagatggaactctgcacttcatctctgggcttgataatcacgtttgggaacctggggagtaactgctgagctagagaagtggaaaatgttagagaagcgttaccaagtgaagggaagatttagggtcaaggaattctttagttttgatcaagtagcatggattggaacagagagagttgggtatgagaaacaaaagttgatgttgctgtttgttaaccgaagcttagtgaggcagaatttttcaagattcgtgaatttattggtgggattgaatcagaagttactgatcgcacttcacggtctagagattaaggagttgtcatggtttaaggagcttaatgagaaaggttctctgctggaaattgtcagatgcatggcttatgtggtggagtggctatttgtaggccagaagatgcagacaagtaaggacttctttccaaattgttgttttggtggaaaccaaccctcagtctctaagcttttaagggaactgttttctgagtttctggcaagtcgagtatgggagcctggggggttcctcatactagttaatcgagctcatgggaaagggtttgataagtgttacaacgttgatccatctgtgaaatgcataggcaagatagaaaggctgggatcattcttagagttaagggtgaagaccttgaccaaagtcctacaaaagtaaagatgaggagtgagctaaaagatgattttggaattgttctttattactaccttgaggacaaggtggctttaaaaggggagagtgagattgcatgtggaggaagcgttaaggaaatacaatgtggacatgacaagagtggtgaaagttaagagttggagctaagggctgaatatctggaagaagtttcaatgttgggatcagggaaggttgctaaagagaatggcgatgagattgaattttttgtgcaatccgtggtgaaacacaatgaagttgtagctggaagtactcaatacatgccaaccaaaagtgagaaggatcaaaccgtgtctaagatggcaaccttaacaaagaaggtaaggattgctgatttgattggagtagttgaggtctgcatttctcttaaagctgcattttcaaggctagtctgtttattaaaagacatggaggttcttgagagacaagaagtagagactagggaatttgctaccctagattggagacaatataaactgatcaaggagtttgatgtggtcatcatggacaagaaaaaggttgcaggtgcaggatcgacaagagttaagacaacttttccaagctttcatttccttccaccttgaggacaaggtggatctcaacgggacggtattgataagtcgcttattctcttgttgggccctttctaggctgcgtcatttagtatcgtttaagcccaataggtttaggattctcttgctatttagtctctctgttcatctctgtaaaggatcatcgcttaagatcatccaaacaatgtttatcttccttctctcatgttcttctcctttctacttctgaattcttctgcttctcaccttatttcttctatcatctcatctctttctgttacttaacttgatagcctattttgggtcttatcaaaagcaccaggccacatgcgagaaaagggtgagtcgaaccacaatcacgaacaacacgataatatggtgaatggtccttgttgattgacattaaacctttcaagaaaactccttaacctcgcgtctcgctgacacaagacaccctacatcatacgatagttaaacggttagaatagtcaaaagacttcttgttatacaagctgtaaacctgatatagaagtttttggtgggaaggttttttccatatatgatgataagtgtttccctccatgaatgaggaaggcggagtcgaggttctcactatgatggagatgcttggacgccgatgacccccgaggtctaatagtaggccgataaaacattagcatacgatttgaaagctagccgatttgtgatgtggaagcctacttagatgttggattttaacactttgaattgcttccatgagtaaccgtagaaggtggtgaccggcttaatgggttcggtttcgagaagccgagatacacgactatgattccaggaatgagtgatcagagatggtagaaactagcttctacaataagtgctcatttggagacagatcgagtagagataatcaatatagttctaaaccgtagtgggtaaaatcatgataaggaagacaaggcatgtcgaaattgggagactagatcgtttagtttgaagaaagaacgtaacatcaaacctagcttgctggctaaaataaaaggaaacacatatctgggccaaggtgaggaaacgttgagccaattaaaccgaagttgggtcttgacaaaaatagacttgaaccaatgcccagttggctagagagaatgtctagtcagttagttagtgaagacatctattgtgattaggtttctgcgcatgctgtcttagacttcaccagagatggcgcaaaaaatggtccaagaacctccaaccaccagaacctttccgatacctcgaatctgagccaaactaaattgataacaaaccaaagatggagatgttctaaggaacccaactgacgaaaaaaaaaacgagcaaaagtttgttgatgattgtaagaccatctccaatgtatagctctatatcttactctaaaatagagaagggtttctctcaaatgtatatctctattttctactctaaaaaaaatatttttagaaatattctatttatattttatattatataatttacaatttgagcccatatatcatagttttgcaaaattcccataaaatatgatattatttaaattaaagactaattatatattaaaaaaacattacatcatataacaataataaaatattacaaattttattttaaacaacaccattagaatattttttcccacatatgatcaattaaaggaagaaaacaaaattttattttgtgatttgaatttcgttcaaaacccaaatattcgtgcatattttgagattgaataagcacggattttacaaaaatgacgtgtccaacaacaagatcaatatcaagaaactcctcctccatctacttcatttggacaatattttaactatcttggtggatctacaagcaatttaccggaatattaaattgctagttttatgttttagttttcttatgttgtttattttaaatttagtaattatttacttattaattttataaaactatttgttgtagttgttgttcgtaaaatgataatatgtattaaataaaaataaataaatttgatggaccagagtataaataaaaaagttcaactctaaaatagagtagagaatagatttactctatatatagagtaattctgcagaaatgtctattttagagtccaatatagagtaaggttggagaagaattttgagttttactttatggttggagttattgataacttgttgtaaaagtgatttggtgatgcttattttgctgttttaatattatacattttgaaggagataaagagaattcaaaaaagaaaaaatgttaaataaaacatagaatggataaactggtgcatattatatagccaaaacataaattgattcctttataagaaaaaagaaccttaaaccccataaaaaacttaggatcaaagagaaacaatgctgaaaacatactactccagaagatcgactaaactcatactatgagttttcttcgatctcaacgaacacttacaacattcatcttacaatcgtgatgttttaaaaaataaacatctacatagttaagtccatatataatctcacccgtgtgagcatgcctctaagactacttataatggtgcagttgatgcttccgttgaaattgtttttccaaagttgtaacacttcaagcatggcaattctccgatgaaatccgatatttccccgtggagtttgtttctgaagagattcaaaactcgctagagtctctcccctgacattttgttagacaaatacattgatttcaaattcgtaagcgttcctagctcccaagttaatggccatgagaacacattcttgcaataaaagcgtattgaagatatttatttatattggtttaattctgcgtttgtttcggccagagttcattaaccattctggtttgtaagaaaccaatatgtatcccatcgtcaatccaatggaaataccaggtatggatccaattgcagctgctgtccaattcatcacctcttcttcatcttcttcaggctctggcatttcggattgttgtggtgttttcttgtggatatctacacaaactctttcaagtgaaaggccaaagagtctcgggttgtccgcaaaagaagagcaaggctgtgtttgaaactgagtgccccctggtactagacctacaaactggttttgggagaagttcatgtacgcaaggtatgagagtttccctagctctggtggaatttctcccgaaagcttgttttgagaaacatccagtgactcgagctctatcaggtttcccattgatgatgggatgtggccagtgaaaccattgtttgacaagttgagcacatgaagctcttttagtagaccaacggaccttggaatctctccttcaaatttgtttccagaaaaatcaattgtagtaaaggtatttaggatacgtaccatctccaatgctatgccttttatcatcacaactattgaatcactgtaatagtttgtacgcatgtagtttgtgcccatgtactgatcttcaatttttccaagtgagaacattgcagtccaattgacaaaaaaatctaatggcaaagttccattgaagtgattaccggatatgtcgatgattcgcaacttagaaaacccgttttgatttatcgatccatggaatgcattggagcgaaggacaagaacttgtagttgttgcatagaatccaaccaaaaaggaaacgtgtcattgattttgttgctttccacattgagaacttcaagagaagagatacggaccaaagatcttggaagctttcccgccagttggttatgaccgatgtcaattgactttacacttgtagatatattctctggaatacttccactaagatgattctttccaagatttagaacctcaagagtactgagatttgctatgcaacgagggattgaaccattgaatttgttggtagataaatcgagaaggattagagagtgcaactcacatatgaaagatggaatctttccagtgaaattgttgttggagcctaacaagtcactcatagatggttgcacggtagatttcgttaatcttttgaaaccggtgaaagtgttgttcgaaagattcacgcgtgttgtttgatatagtaactgagccagagaagccattgttctgtaacagaaccgacgagagtgtctcacaatctcctagagactctgggatttctccggtgagattgttcgagtacacaatcacactttgaagtttacctccgtgacacaaattctccggtaactttccggttaactgattctccgaaacttcgaaccgctctagcttcgaaataaacccaatctctgccggtatttctccggttaacttgttggtaaagagtttcagctccttcagttccggtaattttccgatagcccgtgggatttctccggttaactcgttgacaaagagatacaaaagctctaaattcgttagatttccgattgattccggaatggaaccgtttaaattgttagcggagagatcaagatgtaccaagttcttcgccgaaattgatttcgggatttctccggttaagtcatttgcaaagagataaagctcggtgagattcttcagcccgaataaaacgtcagggatccgacccgttaaattgttgaccgataagtctacgtgtttaagatccgtcatgttctcgaaaacaacggctgagatttctccgatcagattcatctcctctaaccacatgtacttcaatttcttcagtttcccaaactccgttggaagcttcaccggcgtaaacttatcgtttaaagctaattgaagttcttcaagctccgataagtctccgatctccgatggaaacgtaccgtcgtattcgctcatgtagaggtttaataccttgagcttcgagatccgtccgatgttttttgggatatctccggcaaaggagttagccgcgagatcgagatacttaagtttaggtgcgagacggttgatgtcgtcgggaagtgagccgttgaataggttctgagagagatcgaggtattgaagcttcgtgcaattgtaaagaaccgttggaaactcaccggcgaagtaattaaacgacaaatttagggatttgagattcgggaagttgcaaatcgtcgttggaactgtcccggtgaagttctggttctggaagtttatctcggtgacgtttccggcggtgcaggtaatccttggccaattgcacggtgaagatgtgtcgttccatagccggagagacaatgggtcgccgagatcgcgtttcaggtttagcagcgttgaccggtcgttgtactgggaaaaggcgggaaagggtattgatgtgaggaagaagaagatgaaaagtaagggtaaaaaagtcattctgggattttggtttgtcagaggttttgccgggaaatttcggcaaccgagtttgactgtgaatatgaaatgtatacaaactttgaaattaaagagtttctatcaggtggagttatccattaagagatttgaattttgggtactcgttacgtcgttgacccgtttgtacacatgcgacaatatcaagtggttagcttagtcgttaggggttaaataacttaaatcttgacaaatcaaaaacatagacacaaaaaaaaaaaaaaaaatagacacttggaaatccacacagcaaaacaaccaaatttcacatctaaaaactcaaaaagtcatgtttaattttttttgctcgaagtcatcaatcatcaatcctattaatatgttgctttaatcaatgttttagttatcttgttgctctaggtatgttccatcagcatcctataagaatcaataagatgatgcaatctcagaggatagtaaaatataacacagtaaaacataaatagtactacaaaacagcatttgttacaaataaaagttgatacaaggttaaaaactaacaaaagaaagaagagatttctgtcttaagaacgccttggattgataatagccataagaggataaagcttctgagaggtcaagccatatgtatccacattctcttcttcgccatctctaagcttccactcgaattcttgcactaatcttccaatagcaatgcctgccatgagagatgcttgaagagcaccagcacaaaccctctttcccgctccaaacgccattgtcttgtgaagatctgacgtttcatatttgccatcatcaagaaaccgctccggccaccagtcctctggtctctcccaacgcttcttatccatgttgcatccatatatgtttattgcaatctacacatcaagattttgaaactagactttgtaagtgaacttcaaatgtgaatgacttgagagtaataggtaggtttacctcacttcctgcagggacatgatagcctccgatttgcgtatcctcgtgggcgtagcgaatgggaactagaggagcaggactgtatttcctaagcgtttcatgaaagactccattgagataaggaacttgagacaattgctcttctttgaacttttctcctccgcagacattttggatttctttgcacagacgatcttggacacttggatgcttagcgagctcatagatggcccattcagttgtaaccaaagtagtgtcagctgtctcgataatcgtctcccaaaccaagatagcaatttgctccttggttagtgttttcgcttccgacatcaagaagttgagatagcaatcatcatcctgtttataagtagagattagatcagcagtgtaatgcaatatatgaaagactattcaaacaaaactaaccgattctgaaccattctgcttcagtcgatcttgaatcagagcattcatcactgcgagtctacgtttatgcttttgctggattcttgcttcaaaacttttatttggaatccatttcaagtatgggaagaagtctctccaatcaacatcaattgcaccttccatcatgtcatgtactaaaaccttgaagatctcgtctttcgacaaagtcacaccgagttctttaacataaatggattccacatctttcccaaaagcctatgaaaacaaaaccaaaaatccattttcatactttatgttgacgaagaaatgatgtataggataagcgaaacactcacttgcttcaatgctacaccgaaaagctcatgctcaaatatagctctgaagtttacaggttcttgtggatggtccctagcatgggcatgcaacttggaagacacattttcaatgagtgcatctctgtaatgtctttttcgtttctgcaaaaaaaaccaacacaacacaaaagattgattcagttgccattatgtataccaaggagaagctgcgggataaacgaacaatgaattcacctgtgcattagcacccaaaagaccgttcaagagacaccgtttcaccaacttgtggaaatcatcataatcactagtagcaaccatagatttgtcacaagtaaggactgtcaacgcatttgacaacttcctcgttgagatagacgaaaaccgcgtcaccatggcctgaaaacaaacacataaagagtaacctaaacgataagagaagacatcaactcaacttttctacataagttcagactacaatcatataaacaagagcaatcatcaagttgtgtaaggctttagtcatgtgttcaagatcgaaaaaggaacgatttttcgattccaaacatatcaatcaaacctagaaagctaacctctttggcagtctcagtagaattgaggacaataagagaagaagaacccatctttatagagtaaataggaccataaatctctgaccatctagtgaaagtcttgtgaggtttcttctcttttagttgcagcaagttcccaataacaggaaaccctggtaccactacatcaaaaacccaacttttaaagttctcaaagatcaaatttttagttccataaatcactagaatcaaagaaagtttcaaactttgaaacagaagtagtcaccaaacctatgaatcgcaaaacccagattacaaaatcggaaaaaaaaaaaaaaaaaacctggaacagaggggagagtggagacttcagacatgttctttctggagaaggagagaagtttcttgaagaagaagatgaagatgaaggaggagataacaaagccaaggagaatggagatcatggagaagaaggccatggaaggaatgtgattttgatgtgaaaatgtagtgttgatttcattgtgtaatagtgaagagaaaggaaagtttggatttttgctcttattggcatttggcaagattttggtttttggattttacccaattttggatttcaaaaaagagacatgaatctatccgtttaatgttatcttcttattattatagtttttctgactataatctctagtttttttttactaaactcatcgttttacgtttcatagaaacttgtgatgttttgagtaaaatactgtgtagtcgccaagtggttggttttggggttgctaaacgctttggaggtgatgatgatgatttgagatggaaacaaaagattatattcttaattggtaaagataaaaatttcatcagcatacggtatatttttgaagaaaaaaagtttgaaagaaagttgtgagacacaaaatttataggagaatttttaaattttaaattttatttactaattttaaattcattatttcttttaaaataatgtttttttacctatctcgacataattgagtttttctttggatcatcaattagtagaggtaatcggaccattttccaagttggattaacgggtcagcgaatgttcaacctctgatagactgatactatgttaagtttcatagattactaattccaaaaccaattgacaataagtaaaaactcatataaatatatatatatatatatatatatatatatatttatattaatgaagtctaaagtcgttttcaccatctgagttcgagtagtattagccaccaaaatttaagtaatttaacatggtttttccatactccataatcaatttttgggtgtatgaaatttttaaaattatatgagttataaaaaaataaagtatctttctccctactatctttactctaaatactattttaagatattactcgagttaattacatgttataccgaaataattcatgaacataacaagattacagttcatgaaataaatggtttgtcttttgtgaaataaacaattggtactcatgtgtgttacaaaacaacaattttttttggatggtgttataaaactcgaacccaccaaacttggatagcctcttgtatctatttctctattatttcgggtaatctttactcatacatagtaaacaggctctctggatttttacctctctgaaaaaaacataaaatgagtcggtttgatttcgctaattaaataccattttccctactaaaaaacgaaacgaaggcatgaatcatatcaggcattgtaatcaacttacgtgcttacactatttttatacacacgataacatactaacccccgatttcttaaacgaacagcatatttacaaccaaaacaagaaataacatagcaagcaaaaacctagtacataagtgaaaaagaaaaccagtaaatcaaagccaaaccccattagtttccacaaaaattacattaaaaacaaaccatcgaactgatgattttggccaacctctctctattccttgccatgttttctagctgtgaaaaaataaataaatatataagttaatttcaaggcagtaattaagtgatgagatgtatgaaaaagtttcgtaagaattgtaatcttacgtgagagtgagaaggcgtgggaggtctttaaaacatgcaacctctttacagtagatacaaacatcctaacaaataaagtaaactatatcattaatatgtccaatgattcaaattattatcagataaatatccaaaaatatgacctttaaaggaaaataataatctgatgagaaatggccaaactctttttaggaactcatactaaaaatatttgttaaattcgacaaaaacaaaagtagatagatataaaatgaatttttgataaagtaagttcatattcagttccagaaaaaaaaatggaattagttttgtttgatttaaaacttactcccaaggaacatccccgaccagaactttatctccttcagtgtcttcgtagaccaaagtgtattgtctgtttagatcccacgaatctttcttagagaagagttggtcaacggcatgtgaaagctgttggtagttgttataagctgaaaggttgacttttcttcctattggaactccttccatgttgatcttaacgtacaattccttctcttcatcactctccttcttcttcatctcctcctttagttgtgccgttaggtttctccgggatgatctcaccggcggccatcccaccactggagctacctcaaccctgttttagccatatctagttataacatatacacaaatactttttgataactagataccgaaacccaaactaatctccgaaaactgtagaattaccaggattttgttttttatttttattttattatcatataagacatctacaatgaacaagaatgattcaaatcattcatgagaagagattaagagaacctgttattggaaaggaatgatgtttctttggtcgagcttttttgtttagatccattgatgttgttgttggaagtgaattggtgacaaggaggagctagccttagctccaatctcttttcttcttccatttttctaagtttgtgttgtgtttttggtgttggggagtattattatatgggtggttggcaaggaactacaatcccaatctttttataaaagtagtctctttatattttctaatgaaaagagattttattttgaattaataaccacctaacagatcctacttgtatggtttccgtatgtcaaaaatgcgtttacatacgtgtatgattctacgaatgtgatgcggattgatgggagacacacatatattatttacaacgattactattatataaagagaataaatttatatgatgatcattagaaaaatccaatagactaatttagagttataggtaggtggttatcaaattaaaaacccacttagaatatatggtaacatggttcatagccgtgtggggtctcatactaccgaataactctgattaattacaaaacatatgattccaaaaatcttagatgtaatcaccaaattattacgctgtctagacgtgtccattatcattctaattcgatccaaaaagatgtgggtaaccgaaaattaccaaagaactaaaatgctaccatagcaccaaagtcaaaatgaatatccaacacatacacataaaccaatttaaacaaagagatatataaataacagtgattagtaatacccctttattagctagtgacatgaattaaaatcatattgaaaaatgaaaatgaatgctattcttacttagaaaatgaaaactataatcatataaactatgtacaattgcttctcttatgcatgacatttgtaacacatgtattttagaaaattcatgtatgtcaccgtgactcatgagacaaagaaatgtatcatgcatggttgtgtcatcatgtgatcatcaacatagtcatcatatgatcatctccacacccattcttggagagtagaggccgacatagaaaaggaaacaagaaagaggaaagagattcctaggcatgcttaaatgagtacctaccaataaaaggagtaaagtagtaggttttcgtttactaaccttcttctgtttatttttatttgatatataagtactgcaaatattaattgtatgtatacttagaattccactacaaattctctcttttttcacgaaaagtccactaccaacttggtttttgttactctaatttggcctccataatgtttgtcctttttttcaagttacataatcgattgatttacggaaattgccaacccatgaaaagtcatcttaaacataatcaagtataactttagaaatatatcaagatggtttaaggatctttcaactcaatcttaaaaaaacttaatagctatggcatataatcaaataagctgtaatttgattagtgaaaataactaaaatgggtcaacgctcaaaatactacaaataaaactgttgaaatagacacataaaatttgtggctatttcacagtttcttatagttgaattggtttatacttatcttgtgtcttttgtctagaaatttgtggcaatctagaaattctcttttgtcttttgaccttttttcatgggtcatcacctatttgttttattctttttaactcggggcaaaacaatttcttcagccgatttatattaattaaccgagagtccgagaccaatataccatgactaatcatcacactaataatgacagagcttatagtgtaatttttacttgattctgaccctgcacatacgtgtatataaatataatggaatacatttttagttaaaaatattatagtgtataaattataatatgcatagaacagtgtacagtgttaattatgataaaatagctaactttttttattaatttatattatttatattttatttatattttgcatggtaaatatattgttagatttgtttggatttgctgaatatatagagatatttggaaaatctgtgtatttttgttagtttgatgtatatataaattgattgtttttgtttgaaatttgatcaattagatgatataatgtaaatttaactccgcggtacaccgttggtcgattttttgtaactaaaaattcaaattttaagatatagttgttttgtaaatattgtttattttgtttagtgtttaagattatataattatgttatagttattaattctaagattttactcgtagattatcgtcccgtattaatatcaacccaaactcgttccaccatataacttcattccgtaaaatgaaaatcattttgttatttttaaatattgttattctaatatatataaaaatcgacggatcgacatgtggtacatcttggattaatatatttaaaaataatttgtgatttacaaatttatgatattgtagtatataaaaccaatttttagtgtatacctttcaataagatgtagtttttataattaaagtataatagtatttggtctttatgttaaataatagtatttggtttttttataaactattaaattagttgattttagttaaaaataaaaaattaaattaagttatatttgttttgtttattgtttaagattgtataactataatctagtttcttataatctagtgttgaccctgaaacaaaaatccataagaatacgcatagatggatagtaatattagaagataaacatcattagaatatgaagtactttacttatgaatctctatatattgttttaaagaatcgatattctagattgattgtgaggcaatgtgaatgtatgcataacatttataattataagagatggattgtacggaaaattagattttaatttggattcaatcttagctttactgaataaactaatctgaattgcgttttttttcaatctaaaatttactataatctcaacaattttggtattttttgatcaaacttatccttatgcattatcgcaaatatggtagttattattgttcgaatacaattattgatctgtcaaaataatcatattactatttgttcttaaaaaaaagtcattcaaatttaaaagaaaaaatatttttggtgtgaatcaatattttctcattttgaatatttgcattaaaaattttaaacattggtattttaaactctgttttattgtttaaaaaaaaatcaaatctagaagaatgaatattctaaaagcttgtatctattataatacgtttaaaaatatattttctttcatataattcaaatttagcttagcgatatatttttaaaataatgaaaattacatgtttaaaaaaatcctttaaaagtttatatcatttaaattctaattaaaatgttaaatatttgaatctatactgataatatcttctagatatttacaaatctaaaatccaaaaattatcttttgaatatgctaaatcataactaaaatcgtatttttatgtgtactaatgagaaacaattaacatagttttgttaaagaaattgtttaaaatctaaactaaatgataatttgttattaaattagattaaagtttccgaattatctaataacatattaccaaaataaataaattttcatatatacaattcgaattaaaatagcctgatatgttatggaaatgtttttaaatgatttccaaaaatatcgggtagttatgaatttattgattttaaattcaattttttaaaagaacaaaatccaagatatttatttagttgttgtagttgttaatttactaaattacctatgcaaagattcatttagttaattttaaactactcttagaatgttgtagttcatacaatgctttccaattaataatatagattagtttgttgtcttgttataactcgaatttagtttagaaatatgtgtgttactttgttaacaacataaaataatttatatgatgcgtaggttaatgctaactaatctgagaaactaaatttatctatgctcaatcatacattatctaataattttagaaaaatatatgtacgaatcaatatataatatatttcaaaacattttggtagaaataatgtataaataatacaaattttcaaattaagagttatataaattttatcagctttttgttagctaaacaatataaaaagaattttaaacatctaaaatccaattaacttaaacattttatcaacgtaattttagacggataaatctctatattgttatttttatagcaaaacaaataaaaataaaaataaaaataaaatggcaaataatatgttccaaaagaagaagttatgatgaacatcttggtactaaactactaatactcggtacacatttaggcatgcctctcattttgaaagaaaaaggttaagaaccagtatagatgttcaatgaatgtataaccattctaacaaaaagaaatcaaacaatcatcattatcataaataactttgctactaatagagggccaccacttgcaaatttacctttttatctaccaatttattgttatttatttatcttttcttgacttttaagattaatgatggatgggatcattgactttgcaatgattataattttaggcccaaaatcacttcaaatattctcttttacactcctttgcgctttattcttttcccttttaatatattttttgaataaatactttttaatatattataaagatatataagactttatattaattatggagattattacggattttgtcattttccttacaaaatttacgaatttgccagttttattatttgaatagtttaaatttacgatttgtttttgctaaaatacatactttataacaaatactaaattttaaaaacaaaagtaaccaactaaactcaaacatcacatgtgaaacgctttgtcaatcctatttttatagcttaaagacaaatccacaaaattttagtgaaagtggcaaattcacaaatgatactccaaacaatgacaaattttatcatttttctaaatctattttttcttttcattaactgtattatttcccccattatttcgtctcatttgtgttccactgcagatttacctaaattaaatttatttaatgtccggaaaacgccataacctaacacgcgtacggcaaagaaatgagtaatggattatttcacaattcataaaagttaataaggtttcattatttaaagttaaagcaaaagtataaatagtttagaagttgtcgtatatagaaagcaccaaaactgaaaagcaaaaagtaaaaagctgagccaaaaatgttaaaaagaatgttttaacggaagtttctgtagacaggactgtacatgcagctctctgccatctttacgaggtccttaggacgaggcagattcgatgccagtcctgcaaaaccaacaacaacaacaacaacaacaacaacaacaacaacatgtacatgacataagatttttgccatggagatttttttttttggactgatcctatttttaatatgatcaaaaaacaagaattatgaaactaaccgagttcgtaggttttggctcccacactggctgcaatgttagcagagatctttctgatgtttgcaaaaggcggatagatcagtccgttcgcaaaattctcttccgtcacttgggaggccagcgcttccgctgatagaacaaatagtttaaaaacacaaatggtcttaatagtaatagtgaaatttttcgtgacaaatgatctagataatgtttcgtgattattggcggatttttaattgactaataagcgaaataaatgaaagactatgaaccggaataacaaaaaaaatatcttctaaaacaactaaaaattatatggcaggttaagtatggaaacaaagtaacaaacttatgagaaaagagttgtattttagcttttaggctagtaccataaaaccatttagggccaacttagagagtgcagtgttatatcacaatgcgtcaattttttaataacagttttaaaaggagtgtgttgtacttacaagctgctagaagcatgtcatcacggacacgaatggcaccggacatgatcaaaccaagaccgagaccagggaaaatgtaacagttgtttgcctgaaaaaggaatgttattggaaggacatgagccatgaattatagagaaaaaatgttaaaagaaaatcaacgaacctggccaggcgtgaattttttgccatcatactgaacagggtcaaacgggcttccacttgcaaagattgcacgaccctataatcaaaacacaattcttttttcatagttgcatcaaatatatgcaaatttacattttgtgagagtatcaataagcttttgattgttaccttggtccatgtgtaagcttcttccgccgtgcactcggcttgagaagttgggtttgagagtgcaagaatcaatggtttctgtaaccaaccacacaaagatgagcataagaaacaagagcatagctagatagaaatgagattcaaagaagtaaacaaaagaaacctcgttcaaggtagccatggcctccactacttcctttgtgaaagtcttacccacaccagaggttccaataagaacagttggcttgattgcctgatttaagacaagaacgaaaagtctgagatatgttttttcatctactcatgaagagatttaagatgagtttattaaagtacattaacagctgccaagagctccttgacaggcttgtggtcatgcgcccatggctgcttgaaatgttgaagcgattctttgcgttcgctaacaatcagtccctgcaagataatccaaaaagaatgttttgtaaatgaacaagaaatcaaaatcaaacaatcatgtagccaacaataccttggagtccacaagccaaatcttcttccgggtctcatcgattggttttccagtctacaagacaatacagtcacaggttcttggtaagaaggagcaaaggaatcaaagaaatgtcaagaaggcgcggaaccgcgaaaaactatctaacctctttcgaaattttaagagcaattagctcagcgattccggttccagccttcaaagaagataaaaagctttagcaacataacaaatacttaacaaaaaaaagttcatttggtatatgttttaaggtctcacctctccagcacccaagaacaaaaaggtatggtcagctaggcttttaccaagtactttctgagccgcaataagcccggcaagcaccacagatgcagttccctacaatttaaaacatacaaaacaaattcttgctactaggcacctttcaaaaaacttacaaatgatacgaatgttgaacacaagtttttacttggatatcatcattgaaaacgagatgacttgagcagtacttagagagaagctcaaacgcatggtggtttgcaaaatcttcaaactgaaacgaaacgttattatatcaacataatactaaaaacaaaagtttttagtaagaagctaatgatataatttacctgcaccaacactttctctccatagttttgtttaacagcacacataaactcctgcaaaaactctgcatattcctgaacaatacaagaaactagacctttcagtttccgaaacattgatctttaaacacacaagaagtgcataaaaactagaaagatagtagtgaaacctcgccatttgccctcttctgtttaaggccaatgtaaaactcattattcaacagcttctcattgtttgtacccacatcaatggttattggaaggcactacaagaagaataaagtgtacacttattactaaacataagcaccaaaacattcatcaggcttttatcgttacttacagccgatggacggattcctcccaaagctgtgtaaagagaaagcttcccaacagggattcccattccctgtaaaacttccccaccatccaaatcaacataagatcaaagagagactaagtgtttcaggttggttaaaactctgtttacctggcaaccaagatctccaagaccgagaatccgctcaccatcggtaacaacaataacttgaatccctctctgtggccaattcttcaatacttcaagaatctttccccttcagaaataccacattttacttaaaaatgcaaataaaatgaatagaatgatattgtagacaagtattaaatcgcagttacttctctttcaagctgatgtaaagaccttgtggcctcctataaatgctcccatacttttggcaagcctcaccaaccgtcggtgtatacacaaccggaagcaactcctccacattatcaatcaaaagcttataaaacaatctctcattcctttcctaaaagattcagattcaccagctcacatttccaaacagtacaatacctaaaccaaaaacagaacatttaatcacctgaagatccatgagagccatgtaacgttgcaaaggaaccgtatactgacgaagattatgcatcactttcctctcctataaacacgcaaactcatattaacataacctcaaaagaaaatgaagatattactcaaatcataaacataaaaattcacctgaacatcttgagataaaactacaggaggaagaagaccagttatgtaatgagcatctctctctttatcagtaaaagcaagtcctttattgtaacgtggatcacgcatcaatgtatacccactgttcaaaaaaattactaattttgtaagaaaaatctctctttctttcttatacaacaagaatagaaagatccaagatttcttggtttgcaagttataacaaataaatcaatttcattttaacagaagattccaaatcaagaaattatgaaatattttgcgaatcttgaatagaaaatccctgaaaaagatattatgatcgtaccttgcgacagaggtaacccaaggagtgacaagttgatccaacgtggcactatcttcaccgtatacatcagagattcccccacctacaccggaactgttaccggtaacatattcatcggagatctgagtctgattggtgcccattattcacaattttgatcagaagagaaaagatgagtaaaggaaaaagcttttagaggaaaaatgatgtttatgaagagattaaagtggatcaaacatagaagaagacaatgtgattaataatcgccgattttgtaggcggagacaatgacttatggtctgaaataatcctattttcttttgtcgaagttgaggaagaaagacgtcgacgagtctcgtactcttgtctttgagaaaattgcaaaacaaaacacaacttcttggttttgtttatgtaaacctaccttactaaatttgagatttgatttaaaccctaaactatcaaatgttacaatgaaacccttcttcgaaatttgtcaaactacaaatcactcactaaatttgggatgtattttaaaccataaagtatcaagtgttgcaattaaacccttcttcgtcactttttgtttctttatctttcgttaaatgtacctaaacacaaaagcaagagagttataaaagaccattgttgatatagataagttttaatcacttggttaaaaaagaatccaaaatttttcacaaatcataaaggactttaaattgtcacaaatcaaatttaagcctttaaatatactcctgtcagaagccatttaattaaattttagttgctaaactaacaaaggaaagcaatagtaattttgtatcactgtaaatgtcacgcatttcaatggcatagtactagtaaacttgtctcttcaggctatttctagtgttcacacgtaggggattaggcgattagctataagcctatcaacattactaaagaaaaaaagaatcgttcgacaatttattagttatttattacgatattaatcaccgttcagtgacagctttttgaatttcatcggtaccacaatattatgaaaaaatttacacgccaacgtcttatcaagttccgttaataacaaatcttggaggtagatagattcttcgtcaagtttataaaaatgtcgttttatacatgaacttttaaaaagtggatattcaatatgtgaactttgacattagtcaaataaaatatgataaaaacgttgacccgctatttaacacaaatcaaaatgttgactaggccaaaattcccgaaacgttaactggcattaacagatctgatacccgccgtaagcagacgttaattacgttaattgtttctgttaaaatcgaaaacgacgtcgtttcatataaaatgaaacagcaaaatccccaattcaattttaaaatccctaattctatcatcttcttccatcttcaatccctaattcgtccatcttctaacttaatcaaacttccatagctttcatatcatcttttatcatccatggttgcttaatgaagctatggaacaaagacgtcaaccatgcgaggaacgtttgggattgagctgtgaagattcttcctcacgtggaccacttttggtataagtatattcacatggaggagatacttggtaatcgacggagctagaaagatggatgaagatggaagaattaggatttcgaaatcaaacaatggaagaagatgataaaattagagatttcgaaatcaaacttaaagaaaatgatagaagaagatatggaagatagaagaatttgggatttcaattagctatggaagaagagtgaagaagatgatagaattagggatttcaaaattgaattggggattttattgtttcgtgaaacgacgtcgttttcgactttaacagaaacaattaacgtctgcttacggcggttatcagatctgttaatgccagttaacgtctcgggattttggcctggtcaacattttgatttgtgttaaatggcgggtcaacgtttttatcatgttttatttggccgaccgcaaagttcacgtattgaatgtccactttttgaaagttcacgtataaaacgacatttttcccgtttaaaaaaaagaaattttcaccgttgacacctttctgactttttctttcacaaagagacaaagtgggctcgcccaaccagattttagccattcagccaaaaatggacaaatttgccctggaacgagaaatgaaaggaggcggttcagtttcgtttctttatttttctgattaccaaaatttaaatttaaaattaaatcaaaaatacgttattaactttctaacaaccaaagaaaatcaaaaactgtttgtcgaagacgaataacaattccgacgaaacacaaactccgatcgaaagtgaaagttcgattgaggctctgtgcgagttctattcgttgcttaagttgaggaaatttcgatcgagctcgtgataaaggataacaaaaagaggattttctggtttcttgaattattgttcatactcaaatggcggagataaagaagagtagtcggcggcgaggagtttcggatgttaatgagttaacaagcggctgcaaaattagggttgcagaggttgaagacgagtgcaaaattacaattatacccttcattaaaaaaaaaatttgtacgtatatgtaatttacggtatacgtacacacacattactacatacattactaccgtgtacgtacacattactaccgtgtacgtacacattactaccgtgtacgtatatattattaccgttacgcacatatgtttatatgatattgctaatcgtgaattgtcttcaaatgataataaataaaatattatttaaaatagaaataaacatgttagatgttgttttattgtaaaggcgacatacaaaatatttattgagtttgtacattagaaacttttgattattttgattagataaaatatcttttggggttttcatcataaatctattcatatataataattaaataaaattatatggtcagagtatagttgttcctcgtacttttgaaaaatgttatgtacgtacatgtataataatgtacgtacatctttgttggtgagttaaaattgttgagaataaacaagattttaaactaaacccttaaacatacacgataatattgagatacacgtacacgtatacgaccgctctaaacagttacatcataaaaatgtctaaatcacataaatctaatactatgtacgtacacaaaaatatttattggaacgtacatggtacaacattaaaatgagtttaattattctctaaccattgtctacgaaaaaatttaattttatttttttgacatccagattaagttattatgtaagttatatgtatgctgtatattttaatatagattatgcatatataatatttcaacgaatcgtactctcattcatgtaaaaccgatcttccaatactaaattgcacaccattacaattcatttcacttctaccatgcctatctgtattcgtgtacgtaaaacatttatctttacataattcaccagatacataattactagtgtacgtatatattctttgataaatgtacgagtgtacgttaacttcgattttataactgtaatttgggtaattggaatataaaagtctaaatataatttatgttaaatatataactatatttgaatactcattcggttctcaatttgctttagataattttgggtttacaaatacaaaaagaatctccaacaaaacaatttatgaacccagaaatttttaaaaacgtatcattattttcatatcacgttctcaagtgtaattaataggattaacacgaatttcttacccagaacacagattgtctctccttcaatccttcaaactttgtaaaacagcaactgaaaacttcagattcttcaccgtaacacaatttcgaatttcttttttccccagaattctaatctcaattatgtaaatatcttacaatataatctctattataataggtaatcatgagttttaatcttgtcaaaactttttagcattaaaaacttctaagcccaactaattttttaaaaatttaattccaatctcaagtgtcaaattcgccgaaacccagaaatcatttaatgcatttctcaacgatgaacaatgtacgtacgaacccgattcacttggattctaacgacgcggtccgtacgtataaaccgggttcaatttcgtcaggggcattttggtcagtttttggctgaatgtctaagaaatgaaaggcgcagtccacaatgtcaaaatctgaaattaaaagtgggtcaacggctactgtgcgcaatttacccttaaaaaaacaagacaaagcaaaaactctttcttcgtgtgtgtttacaagaaaatcaatcagttaccttttcgatttcgaaaaaaatcaaacagtttcgagatggaggatatgaagagtttgataaagacttctaaagaactgaggaaaaggatagagacaaggagggaaaacaaagagatggcaaaaatgagagagacgagtgacgaaaaactgattgagaaggacgaagatgtgacaaaagcaggagagtttaaggaaatgctcgctatagaaaaaacatggcaaatctgggaggagctccttaaagagcatgacgaatttgaggaggtatgtatgtatattatatatatatatcatatatgtattgatcgttcttgagttgtagcatgcttttcatagatttcagagatacttgtgaagctcgagaagaaatactatgagctagaagaagtagagaatagggaaaatcttcagatgaaagaggtatttgtctatatatatagagatgtatatttcaggttcttgagtgctgatatgcttagtgtgtttcatagaaaactttgaaacggaagtacaaaagagagctgaagaagagttctaagatcaaagaactagaggaccgcatgataaaagcaggccaaatcaacgatgagcacgaaagagagctgaagaagaagtgttctaagataaaagaactagaggaccgtataagaaaagaaggccaaatcaacaatgagcacgaaagagagctgaagaagaactgaagaagtgttctaagataaaagaactagacgaccgcatggtaaaacaaggccaaattaacgatgagcttcgagaagcacgtcaagaattgattagggtattattatataataatatcatgttcatgatttttgtatttgttaacttgtgttgttggtttcacatgtctatttttatttctgcaagggattggaagattatacggttgaaggatctaccatgatcggattgaagaagttgggaggaacaaggaaggaagggaagcaacactaaaagaagtgattacttacataattcaacagaacaaaaaactcaaaaccattgttgacatcttttgttagtcagtgtttctcattttgtagtctccaatctaacattagaatgttctcttctgtgtttcttgaaaatactcctagtgtcttttgaaaatctggtacattaacaattatttattttagctcgttcaaacttcaaacttggatcggagtgtaggttggtagtggtaagggaagctt

SEQ ID NO: 746 - DNA, 77036 bp, Arabidopsis thaliana
tgagtcatctgagagtaaatctccatcggcaatggatgatagtacagagaaagaaaactttttggaagttaaatctagttataaagccgccaaaatatcaatgacgtcactaagcttggatgacattactgagtctgtagctaatgattttctaaacatgcttgaacttgaggagtgttcttatgtttatacctcagatggtgaacctacatctcctcgtgaatctctgcttcgagagtttgagaaggaagctttcgcttctggaaactttctcttagatttaaatggagaagcagaatatgtttctgatattgatgagaaatcgaatgatttctcattctctgcaagttctttggatgttggggaaaacaagcgtgagggaaaatctcagctgttaatagacaggagaaaggccaaggtacttgaagacttggaaactgaaactttattgcgagagtgtgattttgatgacaacagttttgataactctttatgtgtttgctctgatgggtttggaagtccaatagagcttccagttgacaagggattagatttgcttccacttggagataatattggtccttctgtttggacaaaagggggagggtgtattcggtccatgaatcatttactgttcagagagtctaaggaggcatcacaactgatcatgcaagtttcagtcccggtggtgctagtatcagaattaggttctgatatccttgaaatactacaaatttttgcagcttctggaattgaaggactttgctctgaagttaatgcattaattcctttggaagatattatggggaagacaatacatgaagttgtcgatgtcacaaaatttaagaggttcagatactttccaccatgttgatacaatacattaagcattaaatttctactttcgaagtcctaaaaaagatatagttttcatgttttcttttttgtttcatggcttacagaactggacaggattgttctgacaagagtaaaggtgtcgtggttcagaaaccaccaggacagctgcatttgtgttcttcaaatgaagaatttggatccagtatgtgtccaagtaatgtacctcttgaagatgtcacttccttagctattgatgagatatacattctctcgatagaaggattaaagattcaatgcagcatgtcagatcaagatccaccatcaggaattgcaccaaaacccatggatcagtctgacgctctagagttgatacgtttttccttaaccttggatgagtggttaaggcttgaccagggaatgctagaaaacaaagatcaagatttagcttctaatggaaagggtcatacgttaaggaacaaattgacacttgctcttcaagtgttacttcgagatccatccctaaataatgaacctattggtgcatctatgcttgctctgattcaagttgaaaggtctttggattccccaaattcatctttatgtagtttggctcaagaaggaagaaataaggaatcctttggatatgatacgcagttgtggagaatcactgaaattggtctagcgggtttgaaaattgagcctggtgcagaccatccatggtgtacgaaatcacaacaacagtctggatcccgctggttacttgccaatggtactgacaaaaccataaagtgtcaagcttcagagtcaaaggtgatcattgtatcaaacgtgcaagcaactagaaagaggttggacacattgtggagtataatatctgataggcaccatcaagaaggtgatttgagtaactctgctgcctctgttccatttacaagaaatttagacgtgatcttttcaaatgaagtaacagaaagatcgtgatagtagcatttccatcggcatattattatacttctttatttccactctatgctgaagaaccagtcattttgatgtgaaagcagtcttgttcatggtggaaaatgcttcgctggctcctctttaactacttgaaaaaagtagatgtatatgtcatcggatttatcaaggtgtatgagaaatagaattttttattaaatattccagttgcgaatttaaggcctttgtctttcatctatgcttgtttctttttaaaaagttgatcttattccagtgactagaatatgattttccgtcttgagtgtactgcctttaggaatcactgtgatgagcggagacttgacgtcagataccgagccttcataggagaaacatgtctgcttcatctcatctcactccaggagggtcaagccgtcaaggctaaattcaaggtaatgttacatggtaatggcctctatatgattatttgtcatggatattgattttaatgtgatatcttccttgtgaatggcttcttcattattgataccttaatggctggcaagatcccattgtgttcattagtggtttgggaattgttctggtaattatctgcttagatttgcattgatattctaagattgctagtttatgatatgatatgaggttctctggactgttacgtccatcaattctcacttgtagcaaaataagatgctatagaagtactacagatttagaatgtcataaacctctcaaaatttgtgaacctgcaaccagtttacaatggatataaagaactagaagcagttttaagtatcgttcgtaaccatagaaaataagatgtgctgaatatagcatggtcgccttgagccttagttcgagtcttagttcatgcttgagtgattgtgggaaccctcgtaagttgttatcacaaagctcggatcatctctgtctcgttcaacccttttcttcacgggacagccatcaactgaacatttgtagtagtttctgcaaattacagagaaatcattgctattaaccaatggtacttttggtgtattgattttcaggtcataacagagagcagctcgaatttaacaggcacgtaatttcctagcttttgatttctcacatttggtctgcttctttaatagaattaagggaactcaatgatctttctgtgtgttttgtttagtcacaatagtatgaaagggttggatgtgaaagatgtaattaagcaataagaaatgttgttccctaccttggatgtgggctgttcttcaccatcttcttcccatactttctccacttgaacccgtcgtcaagcacttccacctcggaccgtgtcttgaacgcaactctccctttaatttttttcttttctttcttgttttggttgtcttgcatatggaaataggaaaaaagaaaacagagttaatgacttgtaaactgcaaatgttggttcacctaaaactgttaggctcaagtcctaatgtctacgttcgcatagttaggggcttatgtttttgaattaacgatgatctgttcttattgttagaaaccaaaagagaaacttaccggcagaagcagtggctgtagcagcaacataagttttggtacttggagattcaggatgactgaaacagctagaagaacctgagaataaagcaccagcaacatcactagtctgataaccataagactgattcatcccggaaaccgcagacacaagatcatcatccatccattcatctgacaagtctagctccggaaactcgaacacagagtgagtatcatcgctgaaactactccccaagtttgtgtctgcatcattcatactcaccactatttacgaattacgcctataagaatgcgtgatcttcccttttcttggtctgaagactttactttagaaaggaagcttcgatgtttagtgtttgtaagaaaatgagtacttgtgtgtaacagtttctttaaggaaacttacataggaagatggatgcttcaaagccttatttgttctttctctatgacaaagactagtggttgacttgtgtcttggtccacgattactctttttattatttttcttgtttttttcaagtcttttcacaagtcttcttgtgcaaggacttaatgcttaagttacgctaccgcaaattaccatctctcatcttaaagacaccatttttttctttctttttgcatctgtgtttccaagcaatagagacatatttgaacataaattaaatgacaaaagatagattctctttggattagactgttgagtttaattttcaacgtttggttgccttatctttataacttagaacactttgaattttctagtcaagaggacttgttatgtaccattcctcggtttctaaggacttgcgcactaatgcggagtcatattcttcttcttttttatacaaaaagtattgttagatgatatagaaatatgttttagtgtatatactatgcaaattgcaatatctaactttgaaacaattctcaagacgttgtttcaaaacatatacacttatgtaaggattgagtcattgagatcgatgaataaattacatgatcgacgtgatgctgtgaatctagatattatacaccactcttcttgtttgtgttatgaatttgatggttatgtaatcatttttgaaatactgacttaacaagattgaaaaatgtaataagtcgatagatgtagacatttggaaaactctcataaaaactcaaggacacaaatctgaaactgaacaagatcgtgatactgaacatgccaacatgggcttgaaccacaatttgttgtgaaccggagtaaaatatgtaaattggtgctataggaatttgatccggtttaactgaaaccgaaaacggtgcgtttaaagtcaccaagacgaagaaaaagggttttagtttttgtgaggggagagagactgagaggttatcatggtggcgcgtcgtaacaaaccaaaagcgccgctggtgaaacaccgattttccggcggcgacagtcacaaaccaaaaccaccaccggctactaaacaaccattttccggcgtcgagagccacaaaccaaaaacatcaccagctacaaagcaaaagttttccggcgtcgagagtcacaaaccaaaaacgccgccgggaaaacaacgattttccggcgccgagagtcgcaaaccaaaaacaccaccagctactaagcaaaagttttccagcttagagagatcagctctctacgccagaagagaagcagctaatatactccgtaccgttctccgtggtgacgccgagcgacgagccgttgcttccatcaaatcactcgtcttaagtccttccgttcgcaacaaacgcggcactttcgctcttgtctgcgagactctcaaatgtaactaaacttcttcttcttcttcttcgttcctaattttgagcttaaggaactaatttgttgtgtattcagatcttactgtgattaaagatgttcttgatatagctaatgtattgaatagtaaatggaaggtatgtatttgttcatatgaatttgctaaaattgctctgtttcacttatctttaatgcttagtttacttttgtttgtagaggcaagagccattggtcttcatcgtttgctacgatatcctctttggcaaggtaggtggtcgccagttgcgactggttctgttgtaatagcttaattcaattttctgtgatgaattaagatgttttggtttactagaagaggaatttgtgattgtaggatactccatcaattggtgatgcagagaagtttcttatgcggcataaagaggcgttattgtcaggtttagctacgcttttagtgaggaagaaagtcgatagtgttgatcagttgttgggttctaagcttactggtattttgttaccctcctttatataatgtgtttcacttacttttggcttttgagtatgtttctgtagcttgatttttaaatttggatgcaggtcatttgaaaccacggtatgttcgtgttaatacgcttaagatggatgtggattctgcagtgcaggagctggagaagcattacacggtactttccaagttttttatataaaccttgaagaatacttgtgtgctagatatgttgtttagttctcgcaggatgagtgttagaattagttattgtggaagggaggtctagtttaagtcattcaccgggggagttttctctgaatcctcgtatagttagtgatgttaaaatcttggatgtgtacaatatatgtgaactgtgctttctatgatgtcacaatcttctctttgttatgagatttcattttaactcgtattttttcactataaaaacaggtgcagaaggacgagacagttcctgacttgttggtgttgccccctggcagcgatttgcatgctcatcgtttggttgcgaatggacgtatatttttgcaggtaaattgtgaatgatctttgtgaattctgtttgatatttggttaatttgactgacatttattctttcaaatgataggggaaagcaagttcaatggtagcagcagcactgcagccacaagcaggatgggaggtaggccacagttctcgcattcatttaccagtatttttccatttgacaaaaaatgtcccatttggtgtttctcatggtgattgtggaatagacttaatgtatcttgtctgcctagttaatgtgctttatttttcctatgttatcaaggttcttgatgcctgttcagctccaggaaacaaaactattcatcttgctgctcttatggaaggacaaggaaaaatcatagcatgtgagctaaatgaagaacgagttaagcgtttggaacatactataaagctctctggtgcctccagtatccttctcttgccttctttctcgtataactcttttagcttctgtttgataatttgtcacaagtgagtttaattacatggaatttgaagaaaaaacttgattggataaatgcttgtcaagtcatgtccgtctatgagggcttttcttaatgccaatttgtagatatcgaagtctgtcatggtgattttttgggcctaaatccgaaagatccttcttttgcgaaggtaagcattacttagtctgtagcatgactatctatttttcttattgttccatgaaaggttcccacaccaacgttcttaaaatcatttcttgattttggatctatttaagatagtacaagtccagtattttcattatcttttgttttgatagtctaccgtgaagagtcactctctaaaatgaacaagagtacccatctgatagcattgtctagagtcttgtagcaaaagcagatatagtcatttgagttattcttgatgcttgggtgtggctgactattgcagattcgggctatattgttggatccttcttgctctggctctggcacgattacagatcgtttggaccatctccttccttctcattcagaaggtattagctgatcttctgtgtgtgtgtgttatgttacgaagtgactgaaccttaacacacctttccatgtagataataacatgaactatgactccatgagactgcacaagctcgctgttttccagaaaaaggctcttgcccatgcactctcctgtaagtttatatacttgtctcatgttagctaaaacaaaaaatgagggttttacttagcttttgaagaatctcccaaacacgttgatccatgttaaatttcccctctatgaatgcataaaccatatatacactaagagaatcttactctatatgtagatatgaatgagaactaaaaacttatatgttttaattagttccaaaggttgagagagtcgtatacagcacatgctccatctaccaaatagaaaacgaagatgtcgtctcctctgttttacctctggcatcatccttgggcttcaaacttgctaccccctttcctcagtggcagcgtcgtggtctccctgtatttgcaggatgtaagtatcacccttaccatcgggtttcacctgattgactctgtttctaaccttttgatcatgttggctttggcttgcagctgaacatctacttaggatggatccggtggaggacaaagaagggttcttcatcgctttattcgtcagggcaaacaaactcgataacccaaaatcgtctgaacttcccgatagagtgtgtagacgaagacccaaagaaagaaccatgcagttacatccctatctttgtcccaaaatgttcagagcttggagtgggaccttgcacaggctcaagactaggttcctgttatcacgtaatggttgttgaattttcaattttgtttatgcctttgatcttcatgttgtcgtcaaaattttgcaacaaaggcatgaaaggaacatcgtaaggtaaaatcagaacctctttaactttttatcacattacaaattgcagtacacaacattatggttttttcatcaaaacagaacacacaaagagagataataagctcaagcgacttgagcctgaatggtttttggtttcttaggctcgggagaaggaagcttctcaacggtcacccctcaacatattgtctatgttcggtgctcattacttcggtaaatttaacttcctcactatctcccacatcctctcagtccacacgttctcctcttagcttccctctgcttctctccgctcaccataagcaccttctcattctcaatctctactctgacatcttctccttcaaactctggcatacccaccacaaaagtgtaggcgctcgggtacttataacataggcattgctgacatatgctcttgagggattgctgcggtctgccttttcatgttcctccgggaattcgttctagtatgtcttcgaggaaaatggtggtgttgagcctaacctgtccacaccaagatatattcgttgtttgcctttctgttatgtctttagtcctaaaatgatatgttgtattgtatctgtgcgttaggtctttgaagtttatatagattgattaggaaatgctttgtattcgtaacgtatgttcccttgcaggtacataaacgacgaagcgtggaagatttgtgtcctatgaatggtctgaaacagtatttgcgatatctggttaatctttttacaaaaaatgtctgaatggtgaaaaataagcattggatcatagagattgtacatttgatatatataaaaataaaggcaattattaagcatagatcacagatttagactaaccactgaacgtagtgagatttatataaaaaaaatagcattgaacttattaagacacaactatgaaagtaattaatgtgatctttgccacaacattattatttagattacagtttaatacgttgcatactcatcacaagagaatcgagacatttaagagaacataggcatgatgtatcagtctcatccttgctcttcagaacaaaagcatctttgcatcgcaacgaacatatagtacaaaacggtcgagatgtatggttattggaaaccacttggaactcacgactacataaaagaaaactgtgccctggcctcatgtaaggtgatttaccgagtacgcagtcgatatgaagagtcgaacaacatttgtcacatgagtaaaaccacttccttggatcggttggtttttcgcatatctcacaccaataattaccgtagcgatatccactgtatcgtagatagagaggatgtttgtcgttcttgttgaagacctcttttggtaaagtagcacatttgaagcacaaaaagaaatcaagtttaacacaactcagtgagccgtacaccatttggtcacacgccgagcactcccgaggaaaaagtgagaggataaataaggaatgcaaatgactatcatggttaaactcgtctgagattgtagcacaacgaacatccaactttacatttccgctctcgtacctaaacccgttgcttggtctttgacaagcaacacatgtgaaaaagcttttggaaagctcgagatcttctccaggtttaggattcgggtaaagagtaaagtgattcttgtgtaactcatgcctttttgtccgcggaagattagcgcatgtttcatgaagaatgaaatcacaatgcgtgcatatatagcatgcatcgtagtagaatggaagaacgcatgcgtagcatctttggttttcgtcgcgaataagaacatcttgataaataaatcttaatatatgttcatgactaaagtgttttataactttgtcatcaatcacctcaaatggcgttatatcctcggttttgttatctccctcttcttcaggtattccatcaagttctttcccatcccatacatcatcccttattgcgcacttggaatggactgcataatgacaaaccgagcaagaatacgctccatattggttattgataattttatggcaaactccgcatatccactcctccggtctaagaatatcgacatgagaaatacggtgatcatgacgattaatacttataacactaggtaaatcaatgcaatctctatgaatgatgaagcaacattgaagacatgtgcaaggatatgaggaattatctacagagccgcaagcatcgcaagtgaaggagacagaatcgatgggcataagggaaagcgggtgcttgtgggatgttgtcttgtagataagtaatggcctcttcagacaagccatacacacctcgaacatacaacgtgaacaattgtagaacatatccaataacttgtatctacaaagacaacattggtcccgtctacggtaacctatgatacgttcatgcagcttaagaggatgcttatgatgagaagggctggtgatctcaatgcagtcttcatgaagagaaaactcgcattgattacaagtcaagactttggtgggttcaagtctctctatggaacacactctgcatttagaggaaatgtttgtagggaacaaaaaatgacgatgaactgccaatttaactgcaccaagaaacccgtcacggattttgtctatctctcccatgttttgattgtattgaatttacataatatgtgtatatatatttttatattattgtgtatgatgtatcttaaggagcaaatgattcctttcgtctagatcattgtaacaaaaacctttcttataaagtaaacgaaagagaacacttacaaaaaactattgctttgttttgaattaagttatgtccgaatattagctggggcacgtttctttgctacttttctataaggaatcaaaaaggtgaggaaaatatatgaaattgcttataaacgtgtgtcttatttagagagacaatttaagtgatgtccaaaaaaaaatgatgtttatgtattgtgttaacaataacgtcaaaagtagtgacccagtggtaaaaaattggggatatggtgtcaatccattcctcccttatattcgatttttactgagaattctttcacttctacttggccagtcaaaatagtattatactgtccaagcctctgtggtctagtggcgcaagctttgatgaagggtgaaaccttcgtacctaagttccattttcttttgaaacaaaattacatttgtttggaaagtttgacaattgggtcttaacctaattaatttatctagtatttagaaatacaggcggcttgactaaccccttgtttaccagatcagccgatagagtatataaaaaaaaaaaaatagtttaaatcatttgaacggatatttaaaagctactttcatccagtaaaatagtgagatcggttttggctagatttgaactagtctggtatgagaagtgttagtgtagtcaagaatgctgaacatgtacaccagaactatacaactaaacacaacagtcaacacatataccaaaaacagttaatatttatatctaaatcctttaaactcattaaatttatgctccacaacatttaaagtgacatggaaaccaagcagcatttggtgcagtgacgagttaggtctctcataaaaagtgagatttatggccccttgaattcgaggcttttcagttaaaattgacgagacatatgaggaatcaacggctgactctcgtaaattgtgagattatggaaatcagtttgaaatgatttttctactttatcctaagaaaaatcaaacgaaattacatgcaatcaaacgatttaacaatgataaacaagcatttgatcataagaaccgagaagattgacaaaaataaacataaagacaattatattaagtactagactactagtatagagagcacatagatcacaagatttagtattattctgtttgtcaaaacactatacacttaacactttacttatcatctaaaatcaataaactttcatttacaatcgaaaacttgcatttgcaatctagactatttcttggaccttttaaaaaagttatttatttccataaaatgtaagaaattctataaataggctctgttatccatactattatacatatgcatctaattttatttaaaatgtaactaaaacagttattgataaatacattatatcacaaaataatcaaatgcaaaacctacagaaatcagtaaaaataaaataaaataataaatataatccacagaaggatgaaacaagtggcgattccgacagaagccactctcttctcagcctcatgtaaccttaaaaactgtgagtttctctaacataaaccaaccaacacttgccacgtgcccagtcccattactcctcctcacacacctcttgagtccgttaaaggccgctccttttatgttatccacacgacccatcgttttggctctgactctatattcactataataatattaatacacgagttcatagattttgaagctaataaatccacagagattttctctctttgatcacaattcaatcatacactctattctcatctcttactcaggtcaaaactctctaaagttggaatcttgatttggtttttaaggtaagattagctcaaaatgagtttaggtgctttgatggaagagaagagaagagcaacaacttcatcttcttcttctcaggtacatatgtcaaatgatatagattggcaaatgcttgataaatcgaggtttttcttcctcggtgctgctcttttctccggtgtatccactgctctttaccctattgtagttctcaaaacaaggcaacaagtctctccgactcgtgtctcatgtgccaacatttctctggctattgctagacttgaaggtcttaaagggttttacaagggttttggaacatctttgcttggaaccatcccggctcgtgctctctatatgactgctctagagattacaaagagtagtgtaggtcaagcaactgttaggttaggattgtctgatactacgtctttggctgttgctaatggtgcagctggtttgacctcggctgtggctgcccagactgtctggactccgattgatattgtgagtcaagggcttatggttcaaggcgatgtctccttgagtaagcatcttcctggagtgatgaactcttgcagatacagaaatgggtttgatgcttttagaaagattctttacacagatggaccaagagggttctacagaggatttgggatctcgatcttgacttacgcaccttccaacgcggtttggtgggcgtcttattctttggctcaaaaatcaatttggtctcgatacaagcactcctacaaccacaaggaagatgctggtggctcagtggtggttcaagcgttgagtgcagctacagcaagcggttgctcggctttagtaactatgccagtagacacaatcaagacgcggttgcaagtcttagacgcagaagagaacgggaggagacgagcaatgacagtgatgcagtcagtgaagagcttgatgaaggaaggaggagttggtgcttgttacagaggattaggaccaagatgggtctcaatgtcgatgtccgcaacaacgatgatcacaacctacgagttcttgaagcgcctagcaacaaagaagcagaaatgatatattgataaaaccttgttgtgttaagactaaccaaaatacttttgattgagtttgaagaatgttaataaacaaacataaaacagagcaaaagatcattacccctaaacaaagagttatcccttcaatcgccaaaatgtaacaatgaaaaaactaaaatgtcttcctaaattaccaaatccatatgacaaatctgatctaaaccaaacagttaagctgttcatcatcatatgcaaaggtagatacacagaagcgagcggtcaacaaatttaggaacgagcccttttgttgctgcaagaagggcacttgtattgcttgatgtgctcagctcttgctggtgttatcttaacacactttccatgaaaccacatctcacagaggtcacagcaaatccagaactcatcagctgcatagctctcaccacatgctccacactgtgtttcaccttgctcatcctcatcctcctcttccacaccttcctcttcctcctcctcatcatctttcggctccggctttgagaacttggcacgggattcagatcctcgctgtaacgtgagacaaagaaaccagaattagtacaaggattaaactgtagagaagaagtacagtggaaaacaaagtctctaccttggagcttgatttggatctgttgctgctgttgttggaaacagaggacttatcttttccttgtttcttagcagtgccagctacaacctcaaagattgttgggaggtcattcaccatattgaaaagcctcttcctgtaacaaatgtgaaagaacataaatcacagagagctacataaacggtgaaggagtagaacaatgagtgactgagaggcttgcatctatataccaccaaggaacatagatgtaagaagattagacttaaagaggagaaggatatacatacctatcagctttgtcaaatccaaacctggctccaaaaaagaaagcaacagcaagaagccaagcatcactgtggacagcaacaagggacaaccaatccttttccgccatcccgtctctggcaaaattgatacccaagacaggctctgggagctcaggaggaacctcttcagctggcaaattcacttcccagtgctcatttggatgtccgtaaaggcaaaggttctccttttctataatcacaaaaggaaaatgatgacaattgttcaaaaaaccttaaattaaaaccaagtcaaacaaaaaatcaacactttgactccgctcaaactctacactgcaattcaaataaatctgacaaaatcacaattttatccacaaaacagagacaatagaatctatgaaccctaaatgcttcactgaaacaacaacaatcagattgaaacaaaccacaacgaagcaaattcaaaaaaccaaactttcgccggcgagaatcaatctcgaaggaacaacaacactcacaaggatcacaaacaaattttttctttagttgaaaacacaatcgaaccaagtcaaacaaaaatcaatactttcgacactggagcgcaattcaaataaatctaaacaaaatcataaacagaaaagagagagagagagagactatgaaccctaaatgcttcactgaaacaacaacactcagattaaaacagagcaaaacatagaaaaattcaaaaaacacaaataaaaatcaaaactttcgttaattcaaatcaaatctcaaaggaacaacaacactcaccgggatcacaaagtcggaaaaactcctgaacatctgcacacacaaaagggtaatctcaaaattcagtttttttccggtgacaaaactgagatagtaataagaagaaagaaaaaacaaattgttaccagtggttaaagccttaatcatgccagctctacgacccttaaaatccctaaacacctcttcaacagtgcgtggattgtacgcgccacctgcttccatctttcttacagaacaaacagcttcgaaggagacaagacaagagtgaaagagagagagagagagagacaagtatttgaccggcgctgagagaatttgggtttgcgagagaaagaaagatgtgaaagagaaaaagggcggacccaaaaacaattaagcggatttaataagatgaggaggagtccgcaaaatgaatctgatgaggaggagagcacgataagttttatctttcatcctcttagatcttgacgcgtatctcctgatttctgttgttgtatctatggatatgtttttaattggattggcttatttttcgggtaatagatgtttatcaagcttgaaattaagagttttgtgttaatgatacattaaattgtaatggttgtaagattgcagaaagttttattagatactctgttttttcgaaacaaatgttcggtaatctggtatctgcgaaataaatttgaccgtttttctgtttttcgcggtaaatgttcggtaatctggtaactcagaaataaatttgaccgttttctatattttcattcgcgctctttttgaacatggtaagggatacatactttattttagattagtgagaggtttcggtaagtgtttatcaaatattcagtttttcgctttaaatttcggtaatctgatatttaagaaataagtttgactttgttctacattttttggtttcgttttgtctttcgcgccaatttttggtattctggtatctgagaaataagtttgactgttaattttatttcttcactcgaggtctagtcttttttttaaaagagtaataatagtctggttttgattaatgagagcttttaaatagtcttactagttactagatacctttttcgcaccaaatttttggtgatctggtgtttgataaataagttcaatctcttctctttttcaaggtctttttgattttttaataagtactatgcattattaatattttggaaaaaagtttattcaaaatacttggttctttcgtgtcaatcatccaaatatatcgataacccatatacaatttgatagatcgaactatacactaggaataaaattgtagtttcatggatttcatgaatttatgaatcatatctaattccaatatagtaagattttgaagtagtgttatctataaaatcatgattcagtcctcaattttgatattttatgtggatagaaaatcttaacttgtaggtaatttggtgagagtgagactgataaaagagaataagaactatgttttactgaacaaagtacttaaagcaatgaatatatttttgttttctaaattgaattgaagagacacggagagagtagtaatgttgatagattcaaatgtcaaacacctcctctagaatccttaatctttgtatgaggtacacttcaagatcttcaagaattcttttgattttttttctaaatcaaatgcaacgttaaatttgactctagaaaatgggcttgaagtctccaagctaaactcattacatgtcacacagacacgcaagatagtgatctgatggctttatttgcccaaactggatacaaaatcccaataccatcaataagttctgtaataatgcaagcaagacgataagcgcattgaactatattgcattcaaagattgtgatatgcatcagatgtcattgaatatttctcaatttgatcttttgataaagatcccatgaaatcattgacggttgcataaaaattcttaatgttttcgctagttattattacattcacaattaacaaaattcaaaatttatataaatcggctcatcttccacttttccaattactcatatgtatatgatttttccacaatttgaattaaggtaacttctattatcgtcttgatataattctcgcttatcaaactttatatttggaaaataacatattcaattggacgagaaagatacatatgtgaaactttcactaatcttaaagaaaaaacattaaaatttgggattgcataaagttaagtctcactaaaatccaacttggcaaagttattgcacaaagataagtctaacaaaatccgacaaatggcaagattctaattagttttggtttgacatatattattattattattattttcattttgacatatgttatttaataaattaaatctaacacttgtgaagaaatttttattctaaaaaatcattaatttcttaatatcatataattttctaaaattggtaaaaaaaatctaaaattgactatttttctttgtttgagttttattgggtctgagtttttggaaatttaggattttgtttcactaaataataaacaattaaacatggtaagttagaaaactgtgtaacagttgtaaacacactgttttattgaaaaatctcaaaaacaaaattatcttcacactcttctcatttctctttcgtaatatatataagatataaattgactgcttctttgatttgtcactttgaactgctaatcattcaatttagagagtactttgttgataaatggtttttcagttcaacttggaggagaaataagaaggttacaagcttacagcccaactaagctatatagttcttgggcttagcccaataatacaatactgaatttagagagttttatgagggcttcgaaaagtattgagaatagaaattgttttcaatactcactaccaaatgcttgattgtgtctatatggagttatagtctagtaccaaagagaaatctataacaattggcagagctaaagatcggttattattctcataaattgcatctcatatcatacaatgttatgaattctcaataaatgcagagcaaaacaaaacatctcaaggtcaagatgtgatcaaatattaagctgaaagataaagagttaacattagcctcgtcaccacaatgcttttttaagttagctccataacttttgctgtcttcatgatgcaaagacccgttgacgagtggaaacatgagcttgagacttgacggatacatgagaaacaataggcttcaacaatgccttcacttcctccggtaaatcgagttgcttcctaacctcattcgctaactcaatcacatactcttcctcatgctctgttatcacaacatttcatctatcaaaaatcataccaaaaacagtggtttctttaatataaagtcgttaagaaagctctctcttataccaatgtcgaacattgctttctctagcttgaaaagatactctcggttgttcccacaaggtcccgaagccgtagcgatttgcctcgccatttcttccaatggagctggacctaagtagtatttgttcgacactttgtctggtgttgacgtgaagctacacaaagaaaccaaactgatttcaacattgaaatttcctaattagaatcattaagggatatttatgattaaaacttacacaataactccggtaacgattggcgtggaagtgtcattttcctgcattcaagaaatagaaatcaaataaataaataaaaatactaaaatttgggaaaaagacaacaacaataaaacagcaacaagtttcttacagtgtaaaactcaacaagtgtttttgagtcgtattcacactctcttcgttccaagtactgcagaagaaacatgagccatatcaacatatattaagatccaaacaaaataaacacacaaacacaaaactaaaccaataaaaatacagaatcttctttttacctccattgctagtttctctttctctggtcctccacgaacacaataagcagcaccccactgctcaatttaaacagaaattttcaacatcaatttcaaattgcatttttgccatagactaattaagtataaagctatttctaaagctaaatatggcaaaatggacagtgctattttgtaaataaatggtgcattttaatccaaaaatacaaaaaagatatagaaaataattataaccagaaattcgttaaaattcggcacgaaaattccaacacactagtgattattttgcaactaatttccacaatcttctatttactatacttatttaataaaattaattttttttgaacaccaaattctaataaaataattaaaagcaatgacttacgcaaatagctccggtggattgctccagcgtacaagtcctagcaggatgttcaggagtacctctatgatcaatacacgctacaaaaaagaataagaaaacataagcaaacaatttgattcaatctttcaacaacaacaaaaaaacaatgtgttgttattatacatacctagatcgaagacacgtttatagtccttgatataaccaatgagtttttcatcaaaatcaaaacctgggttccagatcaaagaaccatatccaaatacccacaaaaccatctttgatccttagcctcacacacaaacaacaatctttagagaaaatgagaagaagaaagaatgtgatatttttgaaagaagtgggagagaattgtattaatatatacagagtgaaaaaagattttgggtgtaaaaatagaatcccgagatgtgtgggagttaatgatttgaatctagacggctttttgaggtttatacattttttaccgtacatttcggcatttaaagcagatcctactctcttcctaactctaatctaacgcatcttttttctttctttcttgtttttagtttgtgatacattgaatcaagacacctttttgttattattattcttacctaatagagacagaaatggtccaacatagcataagtcttagcccaaacccacgttttttcattctggttaggatatttttttgggtaaaagtcaaattttgtctttaaatattggttggtggaaacaaaagggagatggagaggagtggacagagccacaagtgcacaactctcaaaatatctatcttttttgttgatttggtgtatatggatgtaatgttgacgatgattggctactcgaaagagatcgatgtgtaattggttgagttgggagagatgattatggagaagtgactcgttttgggagtcaaattgatgactaaattttactataagttggtgtaagctacacaagtggatgtccttagttgggtcgcatcttcttttatctacaagttgggctcttaaaacggctgaatttatttatggggagaatagttgggccttcttaagaaaatatagtttctacgaaagtacaaccaaaaaatgaagaaacaaaatgactctagtatcggttctgcagccatattatttatattagcttgaaagcacgttgagccgtgggttcattggtgttggaccactcattttggatttggtggcacgttttggttgtaacttgtaattactgtcactccctaaacaaatactaaagtcattatatactattattgttcaactccaaattgttaattataccaccgtcataatgtttcttttgttatttagacatttacgctctatatagtcagtatacgtagggcatgtgtagcaccgtatcgttgacgacgaccttcaacggcagaaatgtagaagccgacgaaagcaaaggaaacgatcgatggtcaaagaatggcaccaacgtcgttgatttcagagcaacatcactaagatatatatttccggtgactgaatttttgtcttcacggaaatataaaagttgttaccaaaatattgaaaattaattaagttagctgattcaattaattcttctattgttcgccgaaagtagtcttacagcgacactgtgacgatcagtctcacaaactctttaaattttcagagcatgtaataaatattgtcgttgagacagcgatgctagtatgctacagaagtcattaaaattgagagagctggctctacgaagagagattattgagagtgagagaggcgacgacgtggccgaatgtgattgggttttatttgtaacaaaaccaaaaaaataaagcactagtgctttgtttcctccgccaaaaaagaacccgacggtttcatctctctctctacaaaacaaaaatccggtggtatgatttgcaattagtcgacggcgatgatgtgtgtaatcgtggatctgagacgccggatttatttaattggcagacgccggatttgtgttgatgagataggttccattttttatctctcaataagagagactgttggaatctcatctttgttaacaatatgcaacagagattggaagagaaagatgtgagaagatggtgagagtaagaacaatcgtaactcgtaagcaaaagaagaagagaacaagaagaagtgtgttgtaggtggaagaagaacaaataagaaaaaaagagaccactctgttttgttttgttttatcttaattgcgagtgtgcttcgtaatcttgttaatatgctaacatacaattgtacttgagaatttagttcaactttgaaaatggttcagccatgaaaatcaatacaattccacttacattgattttgacctttactttaacaaaatatctataagatttgggaatttgctaaaacaacaaaatataaagcaaactgaacttcacaagtcgatttatcttattgtacatgtatgcctacaagtctcagagattttatgggcattcgatatcaagttcgtgatcaaaagatgcatttgcaattgaaaggtgatttggtagaacatataagggaaattttttgcaacaatcaacagaacaactgatcgttattccatttttttccacatctatttcaaaatatttcagaataatgtatgtttaatagtttatgctttgtaataattattaagttatataaaataaaatagttttattttaatattttttttagagaactcatgttagagaacctaccattggagtataaaaaactataaaaaaaacacaaagctctctacttcttcttttttaaaatttaatcattaaaaaggggagagagcccttgaagggactctctacattggaggtgctctaaagatcttactaaacacatatcactggttatcattaactgtctatttccatgtaacctacccattttttttgttttactaattgttcgactaatcattagtcacactagtagctactgtatacgtttctaattatatgtaatttaaaggtttttttacttcttttaatataagtgttgtttttcacgtttctatacaaaaattaaatttatttaatagattttaaccaattatattttacatcatatttttttattgattggattagttgtaattaatgatgtttttataggaaagaaataaattaaatgagatttgtatgttttcttaatttgtgtgtaaaaccttaaactacaaatatttagaaaaacaggaagtatatagtgtacagtaaaacttatataaattaatgttgggatcgagaaaaaatattaatttagaaaaagctttaatttatcgataaattaatttatagagaaattttaccaattttgtgatttcttacaaaaatttaatctaaaaaatagttttttctatacaatcaataatcttttttaaaccaattactagtagaaaactatttttatagatgtttgaaaacaaattaaacttttttctacgtagtaaaaatattagaattaaactatacaaataattaatatcaattgaaaaaaaaataatagagtaatattttactaaatattttacataatatatattcataaatataaatataaatatatatatatacataatcataaatttatgaaattattaatttataatattgatgggaccagatatttacataggattttcaaaaaagttattatcttattcatttatcgatttgtatcaatttttacactagtctcaactcagaaccggaagaacttattaatttatagaagttattaatttatagaggttttacttcaatacacaaaaaaaaaattatttccaaaaaaaaaaaatacagtaacagtcaaaataattaaaaagatcacacaagaaaaataaaatattaatatttgttaattagaaggtattcatcacatatagtcatgtttcatatatagtcatgtttcataacagttaacgttttaacatttgaatgtcatcttctgaattcatttcgttataatagaaatcttaacaatttatgatatgtgaaatacgaaggtatagtctactaaaaaaaagaaatacgaaggtgggtctaactggtaggtgtttttagaagaaaagagtatattcttaattgttctgaattcatctgtgtattcaccagtctgaaaaaaatgagaagaattatttttcttctgaaagtcaaaaacagagtaaagtaggagatttaattcctcttcaaaaatagctaaagtatgtatagatttatttaagtctattgaatgaaagttgcaagccatattacaatttattgaatagatttaccaaaaagtatgtatagaatagtatataattacaaattaatatttacagagtagtgaatagtgattaacgttttaaataccctattttggttattattagataaaatttatataaattctaagcgactactattattattgtactctctatgtcccaacctatatataggatgttttaggttttttgtttcattttattagattttctcaagtctctatgaattaaatttaaaagcttataacaattgaattgtgcagtatttatttatgttggttaaacttttataaatgaaaaagcatttctttttttttgtacttttagccaaaaaaatcttataaaatggaatagaggaagtattatattgaaatgagtaggtataaattcattatttaggtctattaaatgaaagtttcaagtcatattacaatttcttgaatagatcaaggataaaataggtatataaatatatcgttacaaaaatatttttacggaacaacgattgactttttacatagattatttcgaatataattagatcgagctgatattgttacaaagtttataaatttatattgttacaaaattcagtggctttttggatgaaaaacatttataaatttatttcatttaacattggattgtgtagacattttcttcaaatatatacttaaggtcattctaattttctgttgtataacatttgaaaaaacgaaacaattgaattttccaccaaactttctactttgcttctcagatgtcttgaataagcgaaatatttagctgtgagtgttgtcatcgtgaacaggtgcggaaactggtgcaggagatgtcgacacaaataaatgctacaaaactggtttgcatggcgaaattattcctttttaaaacaatttatttgcttattctttctctattttttatcaggaaaatattctctctttatttttaagtctaaaaagcatattaatatttttctaggatgtaaatatttacacgttccaacaaaatttgtacaatactgataatcaaagaccttaaatcacccatagtgtcttcgactaatttgattgcatcctatagacatatttctacttttgtagtataaccttttaatatatgaacagtttattaatatcaaacatggttcgccgcaatacatgactatcatcttttttttctttcttaagctttattgtcataggtaaaattgctaccatactattatttttgaagtacattttaaaatgtaacttttattatggttaattattacaaaaattacattacttatatctatgcatccggtcaatttagcaattaattctctatcatttatatagccaaacagattttttaacattaattattaaattaaaaataattatataatgttccataattaataatattgatatttagatgattttgttgagatttaaaatataatttgccaatcatctttgtttgattttgttatcttattatttgaaatcatatgatacataaatctaaaaacatttttgcatatcttgtggttcaaattttaaaagatggacatatattactcaactaataaaaaaatgtgtgttcaactttccacatttgctgaactgtttagtagttatttggagttatgttataaataagatcaaaatgaatccaaatctgaatgagcatgaagcttaacatactttggttttttagttggaactatttaatttttcttgaggcataaattttaaatatcttaattaatatatttaaactaaatctatttttttaaatattatagatattaaaacgtagaaaaagtttaaaataacacgggacatgttataacgcttccataatgtaaattctcattttattattgtgttaacacgatcaatagacatatcaaatgaaactaatttaattaaaattacgaaacaaaaattactcacactaagttaccatcggttggttgtgcccattactcgttcttgaatccaaatggtcccaggaaataccatcacagtcattacggagatttacataccaagattatcatatgtatcccattcgttaatgttttgtgaagttctaaggaagaccagattaagtcgaagttcctggacatataaggttggtttttagaatttaaaccaattatatatttaatttttgtaaaaattaatagtaagaacttcttaagaacccatcaatgaggatggtgtaaaagcatcgtagactattaattttgtctcttaaccattatgatgaattgttttattgaaaaaacttatagctaaaagattttgttatggtttgaagctcttaaatattcttttatctcttacctaattagcaactcttctaaactattcacatattatttttattatattatacctaaaatttatagttagaaacttgcaatgaggatgatctaagcctcataacgacattggggctcttgtcccctgtccatcatcagtcaggaactaaattgatatgaaataaactggatcccccactaatttatttatgtggcacattaattggtaaacactacaacaatgttgtgttttgttaaatcacaaatccatttaaatttagaatcgcaggttaagagatttttttttgctaagaatataaatattattataaaaatgagacgtttagattttataagatgatttgccaattgcttaaacctattgattggtcttaactttaccaaaaatatatattaaaaaacatggaaacaaagacaaagcgaaattcagcacatcgacatatcatgcatgcattaatacaaacagattaactagaccattggtcgtccaaccaaaacaatacaattatgccactattgacaatttcatacatggataaagtgagatgtcatgaatgtggttgtacataactaaagatggaactgaagtactaaacacaaattgtaattaagagatactacgttacaatttttatggtgaatttgtgaagtttaaattatttgcaatattcgttttctgaacatgatgcagtttaaccaaagaaattgacattttaaaaagcttgaaaataaggcatgattgtttaaaactttaaatggtggtgtgtttaaaaatagtatttactcatatagctaaatgttaatttgttgaagaagaaatcataataatgatgaagaggtcccatacataacaataattagatttcactgtgcttgtatttataccatcaagatggtcaagaaatatatgaagagcccccatcattaaatggagacattatttattggctatgattaaaacagaagtaaatatataagtttgtggagtataaaaaataaacaaagtgtatagaagcattgactttgaccacattagaatctttattacgtaccccaacgcttctcaatgcaaaagaagcacatgcaaccatccacttagaaccaaacatatgcatatgtgtgattaatgttgttgagcttctactccacgtatacgatttaattgtacgtaacatatcagtatatcatttcaataacataacaaaatctatagaaacatgtatttcttgtaaacatgtttaaattactatctacgtaaattttgcgtgtgggacggagtggaacaaacacaaaattcagtttctaagagattaatctaggttgaaccaaaacaattcctgcctttttttgtaaaatgatcaaagttggccgtgatcattataccataattagtcaccatcgatttttttttaagatatgctcttttagtttcacctatttactttgatcattcgacttccatacacatacagtaatttgttttggtgtcaccctagagaattatattgctcggtgcttttcctgttttgtatatatgaaatttcatattataaactaaagatgacaatttcgtaggtgtaagtttgaaatttctaattataaaccatgaatgggatatttcgtacatatttcgatctctttataaatatttcataattccaatcaatcatatatgtaaaagtacatcatatatgttcacccaataaactagcaacattactttcaatgacttttagcttttcctaggttacatcatatctaaaaccatccttagaagttagaacaatgactaaaatatattttctggcatacaaacgtcaaccaaatttgtatcaactcgtaaccttttagcccgccaaataactttattagccgattttttttttagagagacattctccacacaaaacaaaacaaaaataatagttggatacaagatatttttcaattgagatattaaaacagagaggttcattcatttatcatcaacagagaacaccgacaataactatagagaccagagagagaaaagataaggtacgaagaagagaaccagtttcgcagaatagtacttgatgaaggtactcaataatccaattcttcaattatttctaaaatataaaccccaccgtcgttttcttgttcctctcaattatttcacaacgtctacatttcctaatttatttatagatctacttatcattatcaaacaaaattacaatatcgaaacaatgtttcgttggatactattttttacctaccatatatacaagactaaaataaacaacgtagtatgaactatgaactcgagattagtatgagttttgatattaaactcggaaacacttaaatttaagatgaatcaccaaactacaatgtcttattatgagttaagttaatcaaacataagtgtaaaaacaaccaataacatcgttaataaaatagaatgtttgaatcacactaaaacaaaaattaagacatgaaaaaaaacattgataaaatggaaccaaaagatataagctagatctcgagactactaaccaaattcttctgtaacattgagttcttgcaatgagcaatagctccttgaatagcactttgtaactcttccattgaagatgacacactgttgttgttgctactgctgctactgcaactaccttgatgaaccggaaaaccgccacgtgtcagtacaccggagtgattcggagatgacctcatcgacgatggacaactcgccgcgcatcgtccacgttttgtgtatttcattaggtttccggagaaagagattgataaaccaccaccggaggagacaacggttggagcggcggtgacggtggttacggtggtggtcccacggatgttgttaccggaatctttgagagatgatgatgactctgtttttatattggagctctgttttggagataatttttcgtataatggtttgacttttttcatgtatttccgtattacttctttagctgttgagctcattctcttcaccgacgacggagctgcggcggttgttgcggtggaagaggaggaggagtggtggtggagattggttttgggatctttcttgaaaacagaggagaatctagaaagtgagaaaccaccacttgaagatttgttctttggaggtttaaagaagaaatcttcatcgtcagttacagagctaggacgagaagagtcacaacaatcaagcggaggagggtgaaggagagggaaagaagctgtggaatcagtggaggagttagattcagtggagtcacgtgcggcggacgttgcgacggaggaggaagaggaagaagtgtagtctgaggaagaagtagaagaaccaagtgtacggactagagagagacgaggagagagctgaagaggaagaagctggcctttgtaaaagagttcatcggcgggacaaagcgaagaagaagcttttcgcggcgagattgagatgttaaattcgaattccgatgaagatgacgacggagatgagtgagattgcggtggtgagttacgtggacgtggtggttgacgtctcattatctctctctctggttcttttgtatgagtctctctatgcttttgtttgtgttatgtaataataatagaatgatgaaaatgtattttaattttattataaggtttttatatattttattttattatttttgatatttaagagggctactctgcacagtgccacgatgatcgccagattgaagctgtagtcacatgcaatgcaattaaatatggagcgtaggattagattagagagttgtttaatgacgttagttaattataattataagtttgtaggagtaagaagtgagcaaagctagtagtgacctgtgtgtggtccgatctctttatgttccggaaattatggtatccctagttttgttgcaggttctatttcattgacttggctgtaaattttgtttaaacaatactatgtgaattttaatcaagtttaacaaaagttggactaactagtttggtgtttagctagtctttatttatcggttgtctatttatttctttgctacggaaagagagagagagagttataaatacattagagacaagatggctaattagttgaaatagttgtttgaataacgagtatgattcattacacatggtcttgatagtgtttgagagacatgttgtgagtgaatagacaaactttttgcaaataaaaagtaatgcatgcatgagttttggaacatcaatattttgttttaggggcttttgatgctcaaatcaacattttacgatagaatctggttggagacaaaaaagttttaggaaaaatatggtcaagatgcgccatgttttaaagaatcgagcagcgtgtattgtaccatcttgtaagttattttcggatgagatcaacaaatttgtttttgttaaaatcagagcgaaaaaataataagtttacctaaagagaaatcatgagttaaattttaattcagaatcaaaatctctaaaagaagaaactgttctacaaaaaattatggttcgtaagtataatggatagacggtatgaaatttaacatctattagtggtggtctaaacattaacaatgaataatcttttggtacaatgtgcttttgtaatgaatcagaaaatcttatatatataaagtacaattttaaaagttagtaactcacaagattatgacacgtgttaattttagcgattttagattttgacatttgttagtttttttttctaattttttcctaaaataaaataaaataaactaaaaaaagaaacatatttacaaatattaatttatatgtctatatcttaaaaaataacttataattttcttaattaaaatgaaaaactaacaataagatgtagtgtatacaattaaattatatttattaaattaaactagatatttaaattgtattgtaaaatcgattttctaagattgaaatttggtttaaagaattactaaattaaatactgaaaaaatatgcgagttactatttaaacttcaaatatcatcaataagatggagtgtatatggactagatagttcagattactcatgtgtatagaaaaactaatcgcatattgaatgaattagcaaactctgcattttatttaccgcttagtctgcatttatttgatgtttgtctgatagttgcaagttcgacattgtttgagtatacacatgagatgttttttttttttttttttaatttttttttgttttttttttattttacatataagatgttgtttctacaaagtgtttgaatgtacttttatgttatgaataaatcatatgaggattttgttccatatacattataaaaaaaaaaatggagtgtataaaataacaagataatttattatgatgaaatatataattaaaatatattgtaaattgaatgtgtttgattgaaattattaaataccaaaagttactaaattaaattttaaaaaagtgtgtggatcaccgtttactatttaaaatttagatattattaatgaatatttgaataaatttatatcatacactcgcctatttaggcgggccttaattagtattgtataaaacaccagtaataactaatactaggtagtactagtattttatgtcattctagtatatttcgaatattaatgttttagtttaattatatatcagttatgtaatttttgttaggaaatggtgatataactataactatatacatttgtaataatatatgaaaccgttgtcgtcattgtcggaaaaatacagctgaaggtgtaggaatagaaatagtgattttatcacgtgacgctaacgccatgggtggcgatagctcgtcccatctttcgttcgtttgtttttgttcttcgatactaatagattctctctatcagtttcgtattattatatccttaatcaattcataactacgccgtttattttggatgggtcgaatcattttcttatttctaaatcaactacttgattaaacaaatcacagtcatggcggtcaattaataagctgcttaattgataattcatgttttatgttttgatatttgttatatattaatttattattaaaatttagtatttttttcatttgcggttttttttatttatagatattagctaataaatttgtaatgtgtaatgtggatattaatattctacatttatttgatatatttggtttaagtagaaaaaagagaaattgaagtgtatttttttctctatcagagatatacccgtgatataccgcgaattgatattttcattaaaaaattaaatattttattttaattaatattatttatatataaataacatattaagaggtatatcacagattcacaagcctatattttatcaaaaaatgaatttttgtttttaagatgatctatagatatatgatattgtttgttttatgtatgatacaactcacgacgatatttataactaaaacatttgaaattttaagttatatttattttgttaatattgttagttgtggttagtttttaaaattgtataattgtatttttattgttaattctaagatatcacccaaagtatataccatcccatattaatattaacccaaatccgtctcaccatacaactcacgacgatatttaaaattgtattttttatttatagatattagctaatgaatttgtaatgtgtaatgtggatattaatattctacatttatttgatatatttggtttaagtagaaaaaagagaaattgaagtgtatttttttctttatcagagatatacccgtgatacaccgcgaattgatattttcattaaaaaattaaatattttattttaattaatattatttatatataaataacatattaagaggtatatcacagattcacaagcctatattttattaaaaaatgaatttttgtttttaagatgatctatagatatatgatattgtttgttttatgtatgatacaactcacgacgatatttataactaaaacatttgaaattttaagttatatttattttgttaatattgttagttgtggttagtttttaaaattgtataattgtatttttattgttaattctaagatatcacccaaagtatataccatcccatattaatattaacccaaatccgtcccaccatataaccccgtctcgtgaaattaaacatcattttgtcattttcttataaaattcaaatatttctaatatttgaaacttcaaaaaaacttttaatatcgatctaaaatttatgattgtattttgataggatttcacccgtagtataccgtcccgaattaatagatgtttaaatattttaaatattataaatatttaaaaagtttttaaagtttagtattttaaacttttaaaaatgtataatatttaacttttaatagagtttaaatatttataatattttgaaaatttttaaaggttcaattctttaaattaaagaactggagtaaatcggataacacttttaattttggatgcctgataaatcaagcttccttctcttcttattcacaatcattttggtcttatttatattttgactctgaactattgcccaattttttaagcaatgtgtgaccttgtacacttatttttttcttcatcaattgagtaatatatgaccgtttttaaaattttgaattgcatatactgaagatttgttgctggattgacgactacgagaagttgttgagccgccattgaagagtctctgagaaagttgaagagagagagagttcgagagagagagagagtttgggaatcagtcttgtgtattttattttgtgtagatcaagtttatcataattgtgtttatgaaatcttgaaaaatatcgaatgaataatattatttaagaattacatcatatgcagaaaaaactaatatttttttttaactatatgtattttatatataaaatattttttttagatatattaacaaataaaagtgtaataaaattcatatatttattattaatgtagagattttaggaaattagcatttaattgaatgtagttcaatgaatataagatttaattaaggatataaatctagaataatatattctttagatagatttgtagggactaaaaactaaataaaggaaatagtatattcaagtgttttatgcgaaataacgatttgttagtttttagttataaattatttgtttgatattaaatttgtaacgattaatattgaaattagtaaataggtgagagatttttggccaaaaatcttaccaaaaatgtatatgtagatatgttatacaactggtattacataatgtaggtatttttttcatatttcgataagtacaaactaaactaatgtatgtgtatgttgtgtacatttttcctaaactattggtttttcatatggggatgctaacaccatgcaagctgattgccaatgttgatgactctagtattagtgtgagtagggatgttaaatacggtttctgatctagtccggtcctgtttatttaaagtccaacactaaatgagccataaccctttttaagtattattttttttaaaacaaggttgagccctatcctagccctttctaactattcaatcttttttccaagttaaagagtggattttccaacaaaaaatttctaagtttataacactattgtttaattatcaaatagagacacaagaacatcacaacatacaaaaaaacaaaaaaactcataaatatcatattacaaatccaaaataaacagagcgaattataaaacttctcatcatgtgttagaatctccaactcatgcgtgggcagcagcacgtgacatatatagacgttttttttatagctcgagttctttagtcgcgatttacaatttctatatttgccatctttgtagcatcattatattcttgtttttcagtgtctcctacaaattaatgatataagttagttcaagagaatgattcatataagttaataacttcattttacaatttaccttcaaaatctgcatatctacgaagccaattgcggatggaaattaatgtttgcatattttggagaaaaaaatgattcctaaaaagatttaacacccaacctccaacgctgaaagcagactctgatgctagtgtggtgattaggatgctaaacaaatcagatggcattgaagccaaatcaccatacctatgttgattctctttctaaaaacttaaaatttccatgtcagataaagttttcatctctactctcggttgatcatctaaataaatttccaaagttgacttagtaatttttgaaacaaatataaagttactttcaaagcaaaaaaaaacttgtaaatatacaaatacacacaagattagttaaacgagaacaagaaagttaaagatattcaaatatattattatacttacatcattcacatctgtttctattggcgatttattgaaaagctcgttttgagtaattagtatgagattcttgtcatcacatgtgtaagtgcattgctcacctctgtgcccgttaatgcagtttctgaattcttcctagattgttcagtaaggagaacatatggcaccgagagccaccatttttctgatcatatgtgcaatcaaaaacgtcactagagccattacgatggagaatgagctactggtgccgatattgaaagtaaattacaagattacgtatttcttctaaaagattttgagtccaagtcaacataatttggaacggtaacgttgatgcatacgatattatgatttaaagttgacatcaacatcttagaaaagtagcttttgaggtcatcaagtttctattcatagtatgagataagctcaaggaccattatggaaagcgatcttcggtataaaaaagttgtggacgaatgttgctgatagaaagatcacagggaaagaagcaataacaaacatgtacaaggagcttgatgtgtttgattccactcccaatgaaagagttttacaaaatggaaattgagaaatcaataaaagcatgaaggcgtaggagcactttaagcctaaggaagtccattccaaattgtattctttttttttctttctttttttttgttttttgttttgaggtatttttattagaataatagaggtgctatgttaatggcagttcatgtataatgattttccatgtaataatagtttattcccacgagtcttttttttttttgggtcaatagatgattaattacctccactcctacactatcataaatcaaaaactaatttcacaaaattcacattatgttaataaaatatgttcccgctgtcccatattgtaaacctttatagctaaaaacacagtttaaaaaaaacataaatgttttattattttacataaaatataatcatctaacatttatttaaaactttttaaccaatagatagtagaatggaaataatcataatatactaaacaaacataaattatgaaaaaatatttatgttttatttagtaaaaaaatctaataaaatgaaacaagattttttttaaaaaaatatatatttatgtagttgtgaagatttttttcctctcttttccgatgatatatagatttttgattagacgaaaaaaacaacaatttaaatttgttctatttacaaggcaaagtgtaaggcccgtgaaccggaaaattggttaaagtttgtttttaaatcattcggtttaattggttgggttaattagaaatcctagagtgtgcctataaaagaagcaaactcgaaattagggctttagttagctacttttcgttttataaaggaaaaaaagagagaaaaggagaaggagcagaatcgttagggtttgggagaaatcagtttcgtcatatcaaatcgtggtaaaaggtaaccaaatttggtagagttatttccaagtcctttatagttattctccagtttatagaattggatttggattaaaattgattgagttattcgcagtttcgtgagacacgttttctcagacgcgaattaggatcagcggagattgaaactgagatcgtggtctcgtctgttttccgatcggcacgagattttgtgggaagctttgtgacgtctgcagctaggatttcaccgcagcgattgaatagttaacggttagcttgtattttagggtttcgtctttgggactgcttgtttctggtttttcctgtccagtttgctccaaggttgcttttggttgtggacttgttgtaggacgtttctggactgtttcagacgcaaagagagtctctcctggatttaattgctattagaatcaatttgttaaggtgagtgcgtgaccatgagcttatctgagcgattgggttgtgtgatgatatgtaggtatggtgaatgtgttttgggtgaattgttcaatgactggtttgtttgtattgtattcgtgattatacctttttatttgcttgtgtgtatagctcgtagatgggaggatcgcctcactaaatatttatgataatacttacgcatctcattgtgttgttgatgcaggtaaaaataaagtgtgattgtggaatcatggcaaggaagagaggatgatctaggaactcgtttgttttatgtttggtgtttttggttattgaaacccggttaggattgtcagttattcttggttttgttgatcgaattatttatttattcataaaatagtatttctgacttgcggtttaattattatgttattggttggtttaattagatatttatgggaatatttaattatatatatatatatttttttttttaaaaaatgggtcgggttgtttcaatttggtatcagagcgattacggttctaggatgtgtagaaaaattaattgatgaattattttcctgatgattgatgtgggatgagctagggtgttagcatattgaggattgattatggagtgtttagtcaattgtgtgttgttggagtcctagcatcatcttctccgagccttaaatgagattccacggtaagttgtttgtgatatattcgtttgttttagtttcttagccatttgttcttgagtagcgcagatggttagaggagctggagttcgtggtcatggtaagggacaagtcctcgagggtaccggcgagagtgatggccacagtgccacagttgagcagagtgtgggttcacagcctgagtttgtggagcccggggttaggaacggttttggtgccgatatagctggtgcagccggagtaggggctggtggagctggtgtcggtaccggtgtgcatgtcgttgatgctgagggcccaggagtgatgggtgccgcagctggaggagcccagattccagaggttggtttggcgggcctgctgaggcagttgttagagcggttaccaggtgtggtactagtgcaggctccagtggcgccacgagtgacggaagtgcagcagagggctgcggttgctgaggaggttccatcttatttgaggatgatggagcagttgcagaggattggcaccaggtatttttctggtggtactagtcctgaggaggccgacaattggaggttgcgggttgagcggaacttcggttcgagcagatgcccggggagtatcgggtggatctagcagtgcattttctagagggagatgcacatttgtggtggcggagtgtgactgccaggaggaggcaggcggatatgtcttgggcagatttcgtggttgagtttaatgccaagtactttctgaaggaggcgctcgaccgtatggaggcgcgttttcttgagctgaaacagggtgagcggtcggttcgggagtatgaccgggagtttaaccgactcttggcgtatgcgggtcggggcatggaggatgaccaggcccagatgaggaagttcttgaggggacttcgaacggatttgagagtgcggtgtagagtgtcgcagtacgccacgaaggcggcactggtggagacggctgctgaggtagaggaggaccttcagaggcaggtggtgggagtgagtccagcggtacaaccgaagaagactcagcagcagatgacacctagcaagggcggcaagcctgcaacggagcagaagaggaagtgggatcatccttccagagctggacagggttgtcgtgcaggatgtttttcttgtgggagccttgaccacaaggtggcggattgcacgcagcgagctgagacgagggagtgttaccactgtagggaaaggggatatctccacgtcaaggttgctggagggcaggttctagcggttctcgggagagcaaagggtgtagatattcagattgcaggagagtcaatgccagcagatttgattatcagccttgtagagttgtatgatgttattctaggaatggattggttggatcattatagagtacatcttgactgccaccgtgggagagtttcttttgagcggccagagggaaggttggtttatcagggagtgagacctacctcagggagtctcgtcatctcagcattgcaggcagagaaaatgatcgagaagggctgcgaggcttacctgatgacgatatctatgccagagtctgtggggcaggtagcagtgagcgacattcgggttgttcaggagttcgaggatgtgtttcaatcgttgcaggagttaccaccatcacggtctgatcctttcacgattgagttggaaccagggacagcgtcgttgtctaaagcaccctacaggatggctccagcagagatggcagagctaaagaagcagctagaggattttttgggtaagagattcattcgtcctagtacttcaccttggagagcgccgatgttatttatgaagaagaaggacgggagtttccgcttatgtattgactaccgggggttgaaccaggtcactgtgaagaacaagtaccctttgccaaggatcgatgagttgttggatcagttgaggggtgctacttgtttctccaaaattgatttgacgtcggattatcaccagatcccgatagcggaggcagatgttcgcaagactgctttcaggacgagatatggacattttgagttcgtggtgatgcctttcgggttgactaatgcacctgcagcgttcatgaggttgatgaacagcgtgttccaggagtttttggatgagtttgtgatcatctttattgatgacattctggtgtattctaagagtcctgaggagcatgaggtacatctgaggagagtgaaggagaagctgcgggagcagaagttgttcgctaagttgagtaagtgcagtttctggcagagagaaatgggttttttgggtcacattgtttctgcagagggagtttcagtggatccagagaagattgaggctatcagagattggcctagaccgaccaatgccgttgagataaggagttttcttggtttggcagggtattacaggaggttcgtcaaggggtttgcgagtatggcacaaccgatgactaagctaacagggaaggatgttccttttgtgtggtcaccggagtgcgaggagggtttcgtgagcctgaaggagatgttgacgagtacaccagtgttagcattgccagagcatggagagccttacagtgtgtatactgatgcctcgggagttggtttggggtgtgttctaatgcagcgtgggaaggttattgcctatgcatcacggcagttgaggaagcatgagggcaactatcctactcacgatttggagatggctgcagtaatctttgccttgaaaatttggaggtcttatctttatggcgggaaagtacaggtgttcacggatcataagagtttgaagtatatcttcactcagccagagctgaacctgaggcagaggcgatggatggagttggtggctgattatgatctcgagatagcttaccatcctggtaaggctaatgtgattgtagacgcgttgagccgtaagcgcgtgggcgcggctccagggcagagtgttgaggccttggtgagtgagattggtgctttgcggttatgtgatgtggcacgagagccattgggattggaagttgtggatcgagcagatcttctgactagagttcggttggcttaggagaaggatgaggggttgatttcggcttctaaggtagagggctctgagtatcagtttgcagctaatgagactatccttgtgcatgaacgagtttgtgtgcctaagaatgaggagttgtgacgggagatcttgagtgaggctcatgcgagcatgttttccattcatccaggagcgactaagatgtaccgagacctcaagcggtactatcagtgggtcgggatgaagagggatgtagctaattgggttgcagagtgcgatgtttgccagttagttaaggctgagcatcaggtgccaggtggcgtgttgcagagtttacccattcctgagtggaagtgggattttatcacgatggattttgtggttgggttgcctgtgtcgcgaaccaaagatgctatttgggtgatcgtggaccgtttgactaagtcagcacattttctggccatcagaaaaaaccgatggagcggcggtgttggctaataaatatgtgaacgagattgtgaagttgcatggagtacctgtgagtattgtgtcagacagggattccaagtttacttctggattttggagagccttttaggcagagatgggtactaaggtgcagatgagcacggcttatcatccacagagagatgggcaatctgagaggactattcagacgcttgaggatatgttgcggatgtgtgtcttggattggggaggtcgttgggcggatcactttagtctggtagagtttgcttataacaatagctatcagatgagtattgggatgactccttttgagacgttgtacgggaggccatgcaggacaccgttatgctggacccaagtgggggagaggagcatatatggtgcagattatgttcaagagaccttagagaggatccgggttcttaagctgaacatgaaggaagctcaggatcgaaagcggagttatgctgacaagaggaggagagagcttgagtttgaggttggggacagagtgtatcttaagatggccatgttgcgaggtccgaacagatctatctcagagactaagttgagtcctaggtacatgggtccgttcaggattgttgagagggtgggaccagtggcatacaggttagagttgcttgatgttatgcgtgcgtttcacaaggtctttcatttgtcgatgctgaggaagtgtcttcacaaggatgatgaggtgttggctaagattccagaggatcttcagcccaacatgactttggagacgagaccagtgagggttctcgagaggaggatcaaggaacttcggcggaagaagattcctttgatcaaagtcctgtgggactgcgatggtgtgacagaggagacttgggagccagaggcgaggatgaaggcaaggttcaagacgtggttcgagaagcaggttgctgcatgagtttgcctttccttggtttccagtttcagtgttgttgagtttttgagcttttgagttgttgttcttatttctcttttatttgtattttcgtttggagttgtaacgatcataacagttgatgattaataagatgagtattttttcttggatttgacttgagttgtcttatttaagattgtgttgtgcggtttccaaaaatgaaaagtttcctagaaaggacttgtctatttttggaaagtttgagtaaacaacctaagagatccgtgtgtttacgagatggccgggagttggtcataaggatattctcgagggatatgatggatggtgagacatagaggtgtcttacgcgaatccatgagagagtctggagatatgctcggaagcgtttaatattgttgctcgagggacatgaaggtcccaacgactcgtgaggagcggggtatgctcctgaggtaccggtaactcgagggacatggtgtatttagagaacgaggggtacggtggcttcgggtgacgatccgagagcacgctttagggtgacgacccgagagcgagttttgtggtattattttcgccaagtgtcgtaactcgatgactttgtggctgagagtgagccgacacaactcagggtttgactttgagtggggaagataatatgtgtgatacccgagataccgtagccgaggcctgagagtgacggtttatgctcgaagattgcagtctgagagtggagagtgagttgtgagcaacaatgactagtaaatcgtgagtatattgactggatagagagacctagagggggtctggttgaagggagtgcagactgtagtgatggttgcacggagttcctcggagtggaagggtgaagctagattcgaggacgaatctatgttagtgggggagaattgtaacgcccgtgaactggaaaatcggttagggtttgtttttaaatcatccggtttaattggttatgttaattggaaaccctagagtgtgcctataaaagaaggaaactcgaaattagggctttagttagccacttttcgttttataaaggagaaaaagagagttatttccaagtcctttatagttattctccagtttacagaattggatttggattaaaattggttgagttattcgcagtttcgtgagacacgttttctcagacgcgaattaggaccagcggagattgaaactgagatcgtggtctcgtcttttttccgatcggcacgagattttgtgggcatctttgtgacgtctgcagataggattttaccggagcgattgaatagttaacggttagcttatattttagggtttcgtttttgagactgcttgtttctggtttttcctgtccagtttgcttcaaggttgcttttggttgtggacttgttgtaggacgtttctgaactgtttcagacgcaaggagagtctctcctgggtttaattggtattagaatcaatttgttaaggtgagtgcgtgaccatgaatttatctgagcgattgagttgtgtgatgatatataggtgtggtgaatatgttttgggtgaattgttcaatgactggtttgtttgtattgtattcgtgattatatttttttatttgcttttgtgtatagctcgtagatgggagaatcgcctcactaagtatttatgataatacttaagcatcttattgtgttgttgatgcagtaaaaataaagtgtgattgtggaatcatggcaaggaagagaggatgatgtaggaactcgtttgttttatgttttgtgtttttggttattggaacccggttaggattgtctgttatttttggttttgttgatcgaattatttatttatttataaaatagtatttctgatttgcggtttaattattatgttattggttgatttaattaaatatttaattatatatatatatatatatttttttttttaaatgggtctggttgtttcacaaagatatctgagtcatatttggggaatgctgacattaatactttcgataacaaaaagaaaatacactcattaaacagaacaaacctcagaaacagaatttaattaaaaacccacaaaatgaatctaagatagtttgctttacaattcaaaaacccgtctctgtgattcaaaatccctaaatccagagatcgaactctcgatcatgttatcgaatcatctccagaacgggatcgaatccgataacctactctggtctcgtgtccctgaatccgatgatacttccaccgacgatattactctactcaactctcaccgtgacggtgacggaggtgtcaatagtctcgattacgaagtcatcgagaattacgcttatagagaagaacaagctcatcgaggaaagctttatgttggttactacgttgctgtcaaatggttcttctctttactcatcgggatcggtacttgttgttcttcttcttcttcgattattgttggttgcttacttcttcgtagattttccagaatccgatcttgtttttgatttcttcgtaggaactggattagctgctgtgttcatcaatctctctgttgagaatttcgctggatggaaatttgctcttacttttgctattattcagaagtcgtattttgctgggtttattgtttatcttctcatcaatttagtcttagtgttttcttctgcgtatattattactcaatttgctcctgctgctgctggttctggcattcctgagattaagggttatctcaatggtaacatcaagtttccttacttcacagttttatgttttgttttggttgaaattttgtaatccacagtcttctttggattgtgcaggaattgatattcccggcaccttgctctttagaactctcattggaaaggtgagttaaaacttttgaggaattgatggtgtttaggaagttccgttttcatttctgttttgaagacagtgttttatagtttgttatctcatagatatttggaagcattggttctgttgggggtggcttagccttggggaaagaaggtcctcttgtgcatacaggtgcctgcattgcatcgttgcttggtcaggtgagcatctgagttcccttttattctctcctccatcattcctgaggaaactaatatgtatggtttcgttttgatatagggtggatctacgaaatatcatttgaattctagatggccgcaactttttaagagtgatagagatcggcgtgatcttgtaagttccttgatgcttcttgtgaagagagctatctgatttgtttttgtttaagattaggcccaatcctcttgagagaccttatttctttgcctttgcgatgccttgaaaggtcacttgtggatgtgcagctggagttgctgctgcctttagagccccagttggtggagtgttatttgcattagaggaggtcacatcatggtaggttccccgttcctttcctcatgtccagtggctgaaattattctgctctgagaaataaccattttgaggaactttttttaccctcgtctattatttccttagcaactggtgtcacttgacagcaatgtagttatctttaggatgtcctagctagcgtgagtttgggatgctatgctgtctgtccatttaattgaatttgcatgtgctgttgaaggtggagaagtcaacttatgtggcgtgtctttttcacttccgctattgtggctgttgttgtgcgtactgccatgggatggtgcaagagtggaatatgtggacattttggtggaggtggtttcattatatgggatgtatcagagtaaggttctagtttcagtactcacttatatcatgcaaggttaatagtgctagaattgacctggaacttttctttctctcatttagtggtcaagatgactactacttcaaagagctactgccaatggctgtaataggagttatcggagggctacttggtatattttttcttttcctacacttttggttccatttatcttcatctgtctgtttcatttctcatggcattttcctccaggggcattatttaaccaacttacactctatatgacatcttggcgtcggaactctttgcacaagaaaggaaatcgagtgaaggtaatctttgatggacgattacaagaaattcttcatttatattatgtttatcttcttgaagaactattgtctcgttggtggagttaaataactgctataaaatctgaattttcagataattgaagcatgcatcatctcttgtataacttcagctatctcatttgggctgccactcctaagaaaatgcagtccatgccctgaatcagttcctgactctggtattgagtgtccacgacctccaggaatgtatggaaattatgtaaatgtaagacactgttatagagaatctgaatctttgagatctgttgcatattctttaccatgccgatctattatgatgaaattttagccaatttaacgtacatagactttgaaggtttatacctagaaaactttcagactttcctaacaaaactgtcttttaacattgccgcattcatgttgctttgtgtgccaatcatcgcagttcttctgcaagacggataacgaatacaatgatctcgctacaattttcttcaatactcaggtatcttcttctagaataatttcaaaaattttcattttctacttcgctttgttttcaagcctgactgtttcaattgaattgttctgttttttttttattttgacgacaggatgatgctataaggaatttgttcagcgcaaaaacaatgcgagagttcagtgctcagagtctactaacttttctggtatgaaattcttctattttgtttgttcatagtattggtatttatttcttggtaggtttgagtttgattgaatgatgtccatgctagcaatagaataaggaccatactaatatgacttttacattgttctatctataggaatatcttttgacttgtttattcctttaataattaatataatcgtcatttttctttgttttaaatgatgtataggctatgttttacacattagctgtagtgacctttggcactgctgttcccgccggccagtttgttcctggaataatgataggatcaacttatgggcgccttgtaggcatgtttgtggtcaggttttataagaagctcaacattgaggagggaacgtgagtctctttgtgtattgctttgttgatcataccacttcttcttttttttcaaagtttttggttgaacttttggcctttgatacaaaaagtctttgaactttagttatgctttgctgggagctgcttcatttctcggaggctcgatgcggatgactgtatctttatgtgttatcatggttgaaatcacaaataacctgaaacttctgcctcttataatgttggtacttctcatctcaaaggtacgagttacctaccaatatcatattatcttgattcttgaagaaatacgcttgttttaatttgttctgttcttaggccgtcggtgatgctttcaatgagggattatatgaagtacaagcacgcctgaagggcattccgttacttgaatcgagacctaagtatcacatgcgtcaaatgatagcaaaggaagcgtgtcaaagtcagaaggttgatatcatttctgcctcattaaaccactagatggagcttgtgacacgtgcttcttatattatgctatattataacttgttttctttgactttgaaggtaatctctttacctcgagttatcagggtcgcagatgttgcttcaattttgggcagcaataaacataatggatttcctgtaagcattgctttctttgacacagggttgactcgtgattacttagtcctctgtgctgatgttttcatattttgacattctaccaggtaatcgaccacacgagaagtggtgaaacacttgtcatagggttagtccttcggaggtacgtgattgtacatttcaaaaagaattattttaaacgaaatatagcattctgaattttgttcaccgtccagtcacttgcttgttctccttcaatcaaaagtcgatttccaacatagtcctttgccttgtgatccaagtgccaggaatatcaggtaaattaatgttccacattcttctttttttcactctcttttgaaagagtcatattttctgatagataaattgattctgcattctccaggcacagttttagcgagtttgctaaacctgtttcatcgaaagggttatgcatagaagatatacatttaacttcagatgatttagagatgtacatagatcttgctccatttttgaatccgtctccatacgttgttcccgaagacatgtccttgacaaaggtgggcagaagcttcgattatgttttatctgagacaccaatatccatcatcatttgttgagaatttgatttgtttcgattaggtatacaatcttttccggcaacttgggttgcgacatctattcgttgttccccgtccttcccgtgtgataggcttgatcaccagaaaggatttactgattgaggtaagtagatatacacacatcgatctgttgacgaaacccgacatattagtaacagtgatgttgctggtccatttatacaggaaaatggggaatcatcagcagtggaactccaacagtcaactagtgtaaggtctctagcttgcttctaatcttgtgtctaaaaccttgggagtctctcgagtttggtgttatgatcctctaagcaaaaccctcctcctataagactcattcaaaattttgagttctaagtgtctttgctctttgtcttaacctttattattgcccattgttttgcctgcagaggtcggtacagtgagacagcaacgcggatggacgctgcacgaccgcttctagacgatcttttaggttaataaaacagaccaaacatatacaagcagttgaagctggtagctaagatctttagtcgggccaattcttcgtccatacaaggatacaagcttgttccgcatgttgccacccaaatccggtatggaggatatatgatcgtctcttgagatgggattgtgttgttcgctaaccgatctcattctccgttcacagagagtagaaagattatatatgtagagggcttttgattgttgtaattgtgcaatctttgattattttcttggtcactgtaaaataatccagcttttgatatatttacttgattaacttaaaaaccatattgtaaacaagaaagagaaaaccagaatttatcggtcataccgccatggaaaaataaatcatattttaaaaagttgaaaatttggaaatagatgagataattttattattactagatgaatacccacgttacgcgtgagtttgtttcaaaaattgttaaaaaaaaattatgttgatttttcttgttgctaatttttgcttacttttttctttgttattgtgtatttaatcaaattaatcttaggtagttacagtttttatgattagattctttttttacttgaaatatcgatttatacatttttatatataaatatataattatttatatttctaagattctaatatttttttcaccatcatgaatacatacatcaacaagataggatatttttatacaattagatgtagttatgttatttgtgtgatgtgaaactcgcgtaacttgattataaatataatttcttgttttgtgtactctcttgatctaatacttcaattacatcgtgataaactcattattatatactagataaacataaattgaacaagatctcaagaatttttatatgaaaataagaaaaggaaagcaaaaactaaaatgtcatttaattcaacacttttatatattttactattgcatatagctatatatgagaaaagtcgtgtcttaaattcttttgtatgcctaacatctcaaaggctcatcacttgaaaaaatttgcatgtcaatattaccaacttatcggacacaaaaataaaaagagagaacgttatatattgagtcagatatgaacaacaaaacataataatgagaagttcacaaaaaaaaataatgagaaagactcaaagtaaaattactaaattaataagagtttaggtagcaaacaactaaattacaaaaataataaaatggtgaatattgataaaatctttttagtaaaataagaagaatataaagaaagtagtgctttttattaacataattttgtattgtttttttaaattttgaataaatcacttaagagtagaattgatggaggatttaatgctataaagaacttttatttttttcatttaatttggctaatttttaatttaaataatctaaaataacacatgtcattttttttgtgatgatgtgccagtcatatgcaaaaaattgaccaactttcgtatatatgatttagctctttgttttttttaatgttaatcatatacactaaattttttaataaaacttttggttttcgaaataatttttttggtttaaatcataacttttaaaaactttggtttttgagagaactaaaattacgaagcttttttctttttttctattgctacaacttctctaaacttttgtaatgaaagaggtaaacataataattgaatattctcctaatctttagaaaatcaaattgagaaactaaatttgcatctttgttcaacatcacagtagtcatgactcatgagtcatgatgactcatcatactagagtctagcaaatatattcaatattcatatgaaattatactataattaactttgaccatacaagattttatcatttatattatgcaacaaaaaaggaaaatatctgttttattccaaaaagagaaggaaaatatctttgatggaaataaaaaggaaatggggataggttttgttcttgttatatgttttggatataaccaaatccagacgtaataaagccatccatcgatgttaataacaatatataaaaaaacttacatgtaacagctacgaattaaaaaccactaagtgaataactgacattacgacagcaaaatattgaatgtaagaaccccaaaagaggatcaaaaacaatattactgatccaaaatctattgaccaaccaatcataatttcataacaaaatattccatatttagacaacctctttatcttctttttggtttctctatctttctgatctgtataaatatatgaacctatcattgtctcatttttgtgtaaagatttgtgtctgcttcttctctcgctcttctttacaagacagagaaacacagacacaaacaaagatttcttagagagcatagacgttaaaaaatggctgtggttatatcttctaatggtaattccaagtctttcgacgcgaagatgactgtttatgtcttcatctgtgtcattatcgcggctgtaggcggtttgatcttcggttacgacatcggaatctcgggttcgattctcttctctaacgttattttgtatctttttcgcattacttatggattaagaaacagaatctagccctttctttctgatcaagaaatgttaaaaagtacatatacttaaccaaaatttcattatgaaaaataggtggagtaacggcgatggacgatttcttgaaggaatttttcccatctgtgtacgaaaggaagaagcatgcgcatgagaacaactattgcaagtatgacaaccagttcttgcagctcttcacttcctctctatacctagcggctctagtggctagcttctttgcttcggctacatgctctaagctcggacgcagacccacaatgcaactcgcttccatcttcttcttgatcggtgttggccttgccgcgggagctgttaacatatacatgttgatcattggtagaatcttgcttggattcggtgttggctttggtaatcaggtataatgttatatgatctttttttatttcaagtttagtttgtgtttaggctgagatgctacaagatatgaattttcactgaatttttggtctggtttagtttatatgcattttagtttgtatgagatcttgaattttctggtgttcttcaatgactaaacattgtagaatgtgtctgattttcttgtaggcggtaccgcttttcttatcagagattgctcccgcgaggcttcgtggaggtctcaacattgttttccaacttatggttacaattggaatcctaattgctaacatagtcaactacttcacctcctcaattcatccttacggatggagaattgccctcggtggcgcgggaattccggctctcatcctcctctttggatcgcttctcatctgcgaaacacccactagtctcatcgaacggaacaaaaccaaggaaggaaaagaaacactcaagaagatcagaggcgttgaagatgttgatgaggagtatgaatcaatagtccatgcttgcgatatcgcaaggcaggtcaaggacccttacacgaaactgatgaaacccgcgagcaggccgcctttcgtgattggaatgttgctacagtttttccaacagttcactggaatcaacgcgattatgttctacgctccggttttgttccagactgtagggtttggaaatgacgcagctctgctttccgcggttgtcacgggaacgatcaacgttctcagcacgtttgtcgggattttccttgtcgacaaaactggccgaagatttctattgctccaatcttccgttcacatgctcatatgccaggtaacattagttaagttaacttttcttgtgtcacaagcgatcctcctaaactaacaattttctcaaacagttggtcattggaatcatcctagccaaggacctagacgtgacgggtacgctagcacggccacaagccctagtagtggtgatcttcgtgtgtgtttacgtgatgggtttcgcttggtcatggggccctctaggatggctaatccctagtgagaccttccccttggagactcgaacggaagggttcgcattggccgtgtcttgcaacatgttcttcacgttcgtgatcgctcaggccttcctatcgatgctttgcgcgatgaagtcagggatattcttcttcttcagtggttggatcgttgtgatgggacttttcgctttgttcttcgtgccggaaacgaaaggagtctccattgatgacatgagagatagtgtgtggaagctacattggtactggaagaggtttatgctcgaggaagatgagcatgacgttgagaagagaactgattgagcttgttgatcgatcacattctttctctaactttccttagttttttttttgtcatatggggaacaacatacagtaataagagaccaacttgttattcttgtattataatatgctttcttcaggtttggtatcttacataaaaaaagaaaactccagggtcatacaatttttatgtgttttaagtcacttgatacaagataaatattgttcataataaaataaagttgttgttttacagtgggtaaaagtgtcacattattatcaacgattgatccatgtacaatactttctatgttccttaatatttgatttaaaaaaaaaaaacacatgttaagaaaacatattaaaaaatgattctaaatattttgttttttgtgatttatatttgttataattttaaaccaataatatttaactatttattttgaaatttgatattcatcaataataactaattaatattgcttaggaaacctaaaaaatcaatctgttaaaaacatttttttttctttcaaaaaaatcaaataataagaaacagaaggagtaattaacaaattatcacccgaaaatattcggtgctccatttgtttctgattttagttgtggatttcgaattgaaaattttattttattttattatacaacatttgccattttatttccacagaaaaatctgaatactgagagtgagaggtacatggtcatgaactcatgatcacatggttttggtagcacatggaactgcatttcagttctacatgtagttgtaaacatcagaataactacatgtatggctatatgcatgtaaaaccgcagttgtccgtattcacaaacgtaccaatttttaaccgctaaaatagtcgttcaaaatgctttaaaaccgcaatcgcaggcatccataaattctcgcagtcgtgatcgcacgtcagctccgtttaaacatgtcaagccttgagtcgatcattacaataatatctcgtgtaccacgttatgcttaaaaaaattaatcatatcttaaacacttgccttgccacccactacttctagatctcccacaaatccacagaaataatatatatggtacttagaaaaatcataaaaatatcaaataccaaattgaagtctctggcatgagtcggtcactacaataataactaaactgaaatacattttatggctaattgatgcagaacctgaaattaaaaaaaattaaagatacaacaaaccatacctttttgtctttttttttttttaattattttaaagataactcatttattttgaatgtatgtacgcagttttcggttccgtattgtgtattcatagtctaccataaaatttaacatctacctttcccaatggacccaaacgcttcgaattgaacatgggcgttgctttctcttgtgagttgtatctaatataaaatttggataattatgatttcgtcggtgattttgatatactatatctctcgtgtacaacgttttgcttaaaaatttgttcatatcttgaacacttgtgacttgccacccactacttcgagatctcctacaaatccgtagaaatatcgtttcacaatagacttgcatgttacttggaaaaaggattaaaatattaataaccaaatcgaaatctgatactttacacattcgaagtcaaacaaaataataaaaatgaatgtgtaacaaatatatttttttccccacgaagaatccacttttagtattaactaaactcgatcagtaagtaatccgtctatataaatgtggaggcttcccaaaacaaaacaaaacaaaaaagatctcaaaatatggatagtcacaaatggagtctaggtttcacattacttgctttcctcttcatcacttcctcttccgctgagctcatcattaaacaggtttctattttaagcactttttcgatcttttggcttgttaccaaaacatggtttttaaaaattaaaaacaaaatccaggtcacacagggcagaggaatagagtacaacaactcttacagtctcacgtcgaatcttggtacacttattttttttttcttggttaaaacaaaaaaccaattattgattttcttgtatttttgttgttgtaattgatatataggagtgacgacaagagagttgagagacgagcgaccatcaagtaagatagtgacaatcacaagcttctctgtgattaaggacagaggagaaccctatgaatcatctatttttgaggctgccggttacaaatggttaagataatttacactctattcaatttctctctttttttttttttaataactttaattctatcttttgagctaattttgatggaaaacaaaatcaggagattagttttgtacgtgaagggtaatccgaaaggcggtataaataatcatatttcactttacgcgaggatagaagagacagaaactcttccaagagggtgggaagtgaatgttgatctcaaactctttgtccacaatcggaagttaaagaaatatttgtctgttacaggtactttaaaatgtgaaaggagttttactagatctattatctatttataagatatattggccaatgctacttttccttagcaattgtaaatacatgaaccgagttgattgtgttttggatttggattatagatggaacagtgaagcgatacaacgatgcaaaaaaagagtggggattcacacaattgatttctcttccaacattctacaacgcgaacgaagggtaccttgtgcaggacacagcttcttttggtgctgagatcttcatcgttaacccgacagaaaaacaagagaaagtcacattcatatcaaaccctccagacaatgttttcacttggaagatacttcgtttctctaccttggaagataaattctattactctgatgattttcttgttggagaccgatactggttagtgctcttggctagactaaagtctaaattaagctcaaggcttgcaactgttatgtgaatcccgtagtggccaagtataataacgggatttgtttttaatgtatattcaggagactaggatttaacccgaaaggatctggtggaggaagaccacatgcacttccaatcttcctatatgctcaaggccataaggcaaacgcagttgttacaaacacttggggagcggttaatctgcggttaaagaatcaacgaagctccaaccacaaacaattatattgtaagaaaactaaaaaaaaaaggcttaattaactctaggagtgaaaatcatcaatgaatagtaaggatataaattgttttttttttttttctatctttgcagctgcagcttggtacccgattcgaagcgattatggtgtgggagtgaacaatataatattgatgtcagagctaaaagatgcatcaaaagggtatatggtgaatgatgccattatctttgaagctgaaatggttaaggtctctgtgacaaacatagtctccgtttaaatatcactacttctttttcaacaacaaccttacgaataaagtggactttgatgagtttaatttgttatacgacaacgttgttgatgcttgtgatgtaatcgttgtttctgctctccgagttttcgttttactttttttttcatgttttgctatcaatgaaataaaggtataaaactctcttggttttaaagtattttaaagatccatgttagggaaagctggaaggttaaattacaaaaataaactcaaccattggaaaacattttttatagccaaattcaaacagaagtgcaggatcaatagacaaaatgagtttaaagcacgtaaatgacgacatggttatgtttggtgtatatatgtggaagaatggatataattagttatttcagctagaaaatcacagaaagaaccctgatttaagagctctagtggttgatgaaatgtttttgagatattaatagaaagttgctagagtataaccaatgtagtttggtgtagtcacctcctcagattaaggcataaagactttcgcagagtgatgttttaacagggtctagagaagaacatatattcaaaagggaaaggacaacttcaaatccaaagtggaaacactaaaccctctagttcataccaaggtccaaggacggaaatatcttagaagcaatgggtcatgtgcccccggtaaaaaagagagcatattagttgtttgttttaatttattgttatggacaattttacatcctcctatctccgagtaacatgtgaaatcgtcattgaaacagtaaaagtaaagtgaagtaaatccctatcgggaattcaccgagaattcgaagaaaggacaaataaaacatagaagctaattatgaagaaagaaagatcaactcagagaacattgatttggtgatggatgatgataagtgattatatatatatatatatatatatatatatataattttaaaggaaaatggtaggatatttttcttctaattacttatgccaagtctttagattacttttcaattgaaaatgataaaaaaaattcatggggctattacaggatgatgcactttttggggcagaaatttgaaataaggcataatccaaatgggcttatgagattgggcactttcaacaacctggaaagactaaattacccttgaaagaggcatctttgttttcgcgtgagatgttttgttgaggaacggcgtgagagaagctttgtgaagacaatgacattggtagacataagtgtaaaagagagcatcaaatgtgaataaactgtaaatcttgttacagtatggaggttttgagaatttcaaatataaaccctaagaattggaaaacagggaaccccaggagaaagtgacttagacgacatgtgttctatggaggtaagcattttcaaaaatatatacactaaggattgtaattagggaacccaagcaattagggaatagagaacaaacctaagaggagaggagaggaccggagccaagatgaatcttgttacaatgaatcatgagaaattatcattttctcttgttcgctgtatcaattgcagaggcagagcagacggtgttaagcgcgagaaaagcagcgaatcagacggcgttaaacggcgcaactttggcgagaaaagcatcggcggaagaaaataattgtacctgatcagattagttggagagaaatctccaaatatagaaacgagtgagtgaatggtcgggtatatgggcaacgacactagtcaggtaggtggctctaaaatggggaaaaatttagaagatgcttcaacagtagaggaagaaaagaaataaactagaaatcaaataatttagcggaagctttgaggggtgaagttgtaaaagattagaatgtataagtacctaatttggtgagtaatttgagatgttcctaaattcacaaaggcatagagttttttgtgccaatctcataattgatccaacttttcatatgaaacatttacaaagaacatggtaggattattttctaaaaaattcctacccgaataacggaaaattttgaattgctttcaatctcgtaccatatttcttactaacatttatgttgcaaaaaggtaggatatttcctaacctttttcaaaattttcttacaaatttcctattagttcaggtttcgtcaaaaaatcataggttaaaattaggatattttcttgtagtatatatcttattatataaagtatgattttcaaagttactaactcagaagattatgccacttgttgatttgatcgatcttagattgtgacacgtgttagaagaaaatttcttgaaataatcttaaaacaataaaattataattataaggaaataaaaaaaaatggatatgtaaataagatcattataaaaacctataattataaggaaactaaacaatttgaaattttaaataagatacatttataaaacctaagttagtaactcatacgattgtcctatgtgtcaatttatcgatcttagattttgagacatgtaaaacattttttattaattttaaaacaatataataaaatataacaaatttttgaaacaggaacttgtttaaatatatattattattagataactctaaaatatagatgtcagcaaaatacataaaatgttgagatgcatagataaatttataatagaaagaatcaatagtatcaacgatgttagaattaagtacaatcatgtttgagtaagacctttagtacaagttaataatgttcaaagtttaagtcacatagtagtagtaattttgtaaacaaaagataataacttacatgatttaaggataaatctagatagattggataaattgatataagcgttaaaatattaaatattgaaaaaatttgtgtggtttactatttaaaatttaaatataaaacaataatatggagtgagtgtaattagtattttagcttttattttaagatggagtctatagactaaaaatccagtttattttaataaaataaataggttaatttcattgtaaaataatatgtataaaaatgaaatataatttaaaaatatttagataaaatgaataagtatgaattactaaaagaattcaaaaattattaaaaattctatttatttgtcaaatccgcctatttaggagagttttatctagtatatatatacatgtttcctgtaaacttttaaaggaaaatgtttttcgccaaagaagggtattatcaaagtttatcattaagaagggtattatcaaagtttgattatctggatagtgatattgtcttgtgcctggataaaagacaatctacctttcccaaattgtcttgtgtttggactttggataaaagtttggttatcggtgacagtgatattaccattgacactaaatcgatcattgtagtaatatatcgtgtacaatgttttgcttaaaaatataatcatgttctgcaacccaccggtgttcaaaggaaaaaaaatagttttatgccacccattactcccaaaaatccatcgaaatattgttaaataatagactcattctaagtcgaaacaaaaataatatcgtttcccccacctttttaatatattgtaatatctcgtgtacaacgttttgcctaataatataatcatatttcgaaaacttgccacccactacctcgaggtctctcccacaaatctataaaaatattgtttaataatagaaatgggaacttgcaaaaagcattaaaataacaataacatccaaagtcaaacaaaaacaagaaaaaatgatttgtgtaaaaacatatacatatacatatacatatacatatctctcgcttttctgttcatcacttcagctgagtttctcattcaacatgtaacttttttttgaaatatgttgcaaaaacaaattccaacatatttataaaactagtaacattattatttataatttgcaaaataggtcatgaatcccttttttaatcttttttttttttcatttcccctcatgtttaattattaaactacttaatagtataatatttttcaaattttctatttatatacaaaagcctatgtttttttttctataatttgatatgtagtgtctaataaattcaaaaacatttttattcatacatctcattaattgttaagatgtatacaaattgatacatttttattcgtacaacttatttagtatacattagctatgaatatatgaataaaatatgtatattatgtacatttgtatactaaatgtgttgtatgactcttagtatacaaaacaacacaaaaaactttatcaaaaaaaaaaaaaaagctcccagacccgactcccgaggaaacctaagcttcttcttgctatggccttcgtggccgccggcgaggaccctcccttgccagaaccccctgacccgcctgatcctccctccatcttcgcccaaaccttcatacccgatccaccttctacttcttctctctttccaccttcatcgagtctagatctagatctatgttctaccgtttcttcctatggtgttactcctttcgtttttttgcgattctttactgctgtgtgcagtcccttctatcagatctgtacccgttccgtgtctttgcggttctttactgctctatgcagtccatggaaactagcctattcccagatcttgggatatcctctcgtttcaagtggatatgtttcacaggccataacctttgatgtccacgctgcccctcctacctcaactcagagagcctctcctactcgttccatggcccagacacgacaacggtttgttacttctgtaagatggtgtatgtctttgtttctggttttacccctcattcaaaatttcgtagtggtgcgatttaatgctgcagtatgcagtctctttgaactcaatctggccttttgtgctgtttgttttgtttctctttcttggtggcagtttgaaaagaaactaattaatacacctcgcctgatgaatctggttttatcgggtatttggtaccctagtagcttcttatcggagctagttatcttcccaaagttccctcctcagtggagtggtttggatgtccaagagtcgtcggtattgcaaggatcttcctcccgattgatgttcttctctgcatttgatgcagttcttgtaacctcttgtgttacgttggatacagtcttccaagaatctagccagatcgttcttattgttcgttttgccttatgttattcttatgacttctgttgcatatctatctatcctttaaccattgttatatggtctgttttggcttctgttgttgtgttttatgtagttttcttcatgttggttgtaattcctctttctgaggctcctaaaatttagtgaaaacaactattggtttgaaaaaaaaaaaaaaaaaagaatcttagtatacaaaacaaagagtaaaattgtctattttgcaaattgtaaatagtagtgttactagttacataattatgtttccaaaagtaactatatttccaacaaacccttttttaatgtatttttttgatagatatattagtagattttttttaacaatggaaaacgaacaaggttataagggcagatgagcagagtacaactgttcttaaagtctcatggcaaatcttggcacacttgtgttatctgaaatagccagtctttagattttcttgtactttttattttgttgattggagtttgaagagtgttgagagaggagcgacgaggacaataacaaatttctcagtgattaaaggtagcagagaaccctatacaattatgggttccgcattatcctttcgtaacctagatttttttttttatatatagttaaactcctagcctaaaactaaaacacagttgatgactaattggtggagaaccattaaaaaaaaaaaaaaaagacagagtagactaacgaaaccacacctttacatttttctatttatctcaccttcctaaataaaaaatatttattttaaacaaaaacacattttctgtacagacgtgggtttcgtaatgtccataagtccatccatagtctaccatataatttaacatctacttctctccagtggacgcaaaagcttcgaattgaatgtgggcgttgcttctctcgtgtctaatataaaatttggataatcatgaattcttcgatgatagtgatataccgttgacactgagtagttcattgcaataagtaagatcttgtttttgctaaaaagattcaatcatattttgaacacttgccacccaccacttccaaaacttccacaaattcatagatatagtaatacacaggttacttgacaaaaggaataaaagtacaatatgatgctttacacattctcagtcaaacaaaaacgataaaatgaatgtgtaagataatattgtttaaaaaagaaaaaaagaacaaaaaaaagataatattgttttcccgacgactaatccactttcagtattttataaaataactgaactcaagttgctcgatcaaacaagtacccttaaatgtctctctgtctatataaatgtacactcttcccaaacaaaaccatatctcaaaatatgaataatcaaaaatggagtataggtttcatatctctcgcttttctcttcatcacttcctcttcagctgagttcatcattcaacaggtatttttgatcttaaagctctttttcaatggattggctttttactaaaagtaggttttaacaatgaaactacaatatataggtcacaaagggcagaggaatagagtacaacagttcttacagtctcgaggagaatcttggtacacttgtgtagttgtgttgtctgaaatcgtctctctttggaatttcttggttaaaaacagaaaccaatttctttattttcttggaacattttttgtgttgataggagtgacaagagagttgagagaagagcgaccatcgagtaagatagtgacaataacaagcttctcagtgattaaaggcagaggagaaccctatgaatcctctgtttttgaggctgctggttacaaatggtaaagatcttacactttatcaactttttttataaaataattaattctattttttttgataacgtaattgggaaaatataatcaggagattggttttgtacgtgaatggtaataaaaacgacggtggaaatgatcatatttccctttacgcaaggatcgaagagacaaactctcttccattaggttgggaagtgaatgttgatctcaaactctttgtccataatgggaagctacacaaatatttgactgttacaggtactttaaaatgtgtagatttcaataataattctagccactgctatttttacttggcatttgtagatttcaaacattagtttcattattacatgaaccaagttgattgtgatttagagttttctttttttttgcataattgtggattgtagatggcttagtgaagcgatataacaatgcgaaaaaagaatggggtttcggacaattgattcctcgatcaacattctacaacgcgaacgaaggttaccttgaccaggacactggttcttttggtgctgagatctttattgttaaaccggctcaacaacaagagaaagttacattcatatcaaaccctccaaacaatgttttcacttggaagatacttcgtttctctaccttggaagataaattctattactccgatgattttctcgttgaagaccgatactggttagtaattttaataaccaaattaatctcaaaatttgcaactgttatgtgaattatgtagtctactaacatttttggttaatgtataattaggagactaggatttaacccgaaaggggatggaggaggaagaccacatgcacttccaatcttcctatttgctcaaggccataaggcaaatgcagttgctacaaacacttggggagcggttaatctgcggttaaagaatcaacgaagtactaaccatagacaaatatattgtaagaaaaataaccaaaaaaaaaagtttatctctaggagagaaaatcatcattgaatgaaactaacagctgatgtgaattggtattttgtttgtggtttatttgcagctgcagcttggtacccgattggaagcggttatggtgtgggagtgaacaatatcatactgttagctgatttaaacgatgcatcaaaaggatatttggtgaatgatgccattatctttgaagctgaaatggttaaggtctctataaccaacatcgtctccgcttaaatatctgcacttctttgtctacgatcaatcaaccttatgaataaaaagatgtttaatttgatgagtttgtaataagaaaacgttaatgtttgtgaattgtgaagttattatttctgttcttctgagtttttttatttcaatgaaaataaaactcttaccggtttaaattgtttgaaatatgttggggagtatggagtgttagttatatgaataaattcgacttatttggagtcagaaagaaactaataatttaatttacataatttcatttttgtaaccgaattcaaacagaagccaaaagaagataagaattgaacaaaaatttaaaagatactaaatatgtgaaaatcgaaatcgtatgatgctgactagtgatgaagatggccaagatcggtcatgttgaatgcggaatggccaaaaaaacacacaatttgcgactcccatataagttgcaaaacggtttatttaggactacttgaagactactaatacaatggtttcaaaatagtcgctaatgtacgaccattttctgacccctaatttttttcatatagaagcgactaatttgggatagaaaattgatgtcgtatatttacaactgaaaagcaacgaagtttacttagtgacatttttatgacgatatttgctaatcctaaatttgagacgaatttgggactaattcaagagtccgagttacgtgacccgtgatgtagcatttctatcaattaattatcgaaccacaatttgcaattaatcaactcaccaagaatacacataattgcttaatctaagctaataaggtgactttgagtgttcctaatcttagtaacaatgcattatcaagcaaaaaatgcaaaacaagataaaagaaagcaagaaacaaaagactaacaagtttcgaaagtaaacaaagcgggaaattaacaaattacttagttatcactaaagacgaattctcgggttaaggtaatcgattagaaatgataaatagatggattctagagcaacaaacaacttctaacaagcaatgatccttaggccatagaacactaaacaagactaatacatttccatgatattaatccttttactaatcaatcaatcatcaacaatttccaaaggcaatcaaatgatcaataagcataaataacaagtctatctagccactaataaccctaatcaacaatttccaaaggtaaggtatgaaaagcacttaaagattttggttcgggaatttcatcgaacaccttccgggcatgaaattcctagtgtctaaatcaacatgatcaaagttgatctagccttaaaagcaatcaataagtaagaatcttaagtaatctagccctaaaatccataacccaacatctaaaccatcctaatctaccctaaccaaagaactctaggagactactcactcatgatcatgatcatacaaaggaattggtttgatctttgtaaagccataatcattagagaatagatgagaaatttaaaagaaatacttgatatagaaacttaagaactcaacattcatacaaaaacctaagataaagaaccttcaagagaagttttgatccctaaacaaaagctcttttttctctaaaactaggttaagagtatttctagtaacaggaaataaaccggatcaacctagaacaaaccgggttttgacccggttaaggaaggcaatcgaccaagcaatagatcacttggtagattcaatatcgtccacaacattaatccttgaccagtagaccacgcaatcgaccactttggtagattcatattcctccgtagctctggtccggaccaatcgaccacccaatcgaccagtttggtagattcgtattcctccgtagctctggtcctgaccaatcgaccacgcaatcgaccagtttggtagattgtcctactagcttctcctctttggccactttgcattcttgtagctcatttgtttgctccatttgctccattttacttccaaaactttaaactccactcatgtacctaagaaaaccaaatgcaaatgcaaatgcaatactatatgccaaaatatgaatgcaaagcaacaaaaactaagagaaaaagaggttttaaaacacccaaaaacactagatatcaactcccccaaacttatttcttgctagtcctcaagcaagaactaagagatagaaaagaaagaggtttgaaggtggggattcatagccacaaaatatcaaacgaaggattcaactcaaagtccttaaagatagttcaaatttgcttgaatcaatcatcatactctttcgtacttctccatactcttcttagtgcatagctcaatttcaaatctccaactattagcaaagactcacaatcaagttgaaacatctctttaacattcatttaagtgtttggcgcggtctcgcaaatggaagataaatcattctcaatcggtcttggtgaaggcttttggaggtggtttcaaaagatttacattttggtgggtttctctaaaaaaaatagtaatgctagacaatcatgaaatccatctaagaccaagaacaatttatgcatacaaagtctagctcttgttgttctacccgtcttagatgtaaactcctatttctacccttcttgcaaactcttttcttcttcttttcaaccccaatcaatagacactttggtctttttgaaccacaatcctcaagatcaatcctttcttgctagtcacctagggaagacttcttcttttgacactttgttcttttctatttcttttctaagtttatctttgttcccaaatacttatagctttgcaagtttcttttctttggggaactagcttgatattaaactttctctttacacttagagatttagagctttcttatttataacttattccctagagactcctataaaaccattgatcacacatttcttttcattcattcttttttcttttcttttttccaaacccaatcccaagtattcaatctaaccacttaaatctttcattcccaacctagtagctagtccaaagatgttccaaaagctagctaaaaacaagagctaaaaccttgtcgttctcaatactttgaagatttcaaaatctatagcattttcatacaagaggcctcactcacaaatagtacataggcttgaaagaaaggttttaaggttaagggtagggaaaaccattttaaaggtgagaatggccattcgggttaacaaaagattggctaaacgaataagataacccgaatgagtctgttagactaccatgagaatacatttaggatccataagcgagaaatcaatatcaaattaagtccaaattcatagagatatttcaaaagtcatgtaagcttcacacaagtagaaattgctttcgagaaacgcaaaagtctaagcatgggttttccattttttccaagatgatcaagcaacgattaactgtgatcaagggctttaagctcaatcctaagcttgaatttctacaaggtaattaaatcattatcccctatgcaaatgcaaatgtacactagatgctactagactcaatcctaaaagagaaaattaatatgcaaacctacatgattttttttggatttttcaaaattttcagattttttttttatttttctcaaaacatagttattgacaatgcaagactcaaagaaagaaaatcaaaacataacacaacattagatggttagtctctcccccaaacttatttcacaccgtctcggtgtaaagataattccggaaaaaagactaacgaaaaacaaagagaaaatgaaagaaaatagtatatacaaaggatagataggaccataccttggccctagttgtgaaccttagggagtgaagtgataggaggagttgtgaaactccttgtagagcccttgaatgcaagtgtgaggacctctttcatcaattcttcaacactttttgaacctttttctttgaactccggtgtgagaatcgctttaaccgatgaaaaagggttggatcgacccttgcacttgactctatactctaaaattccatcattatacctcaaaagtgttagagtcatagaagaggtaggatttggtgaattgtcaagggtgggagggtgggttcttttcatcatcctcttgttcttctcaagaaccatcttagctttacccaactccttctttttagtactttcttcttgcgcatcaaacaaaaagtgtagacattcaccatccaagattttctcatcaaccgtgaaatcctctctattcttcgcattcacaactttgatctcaagttgatccttcaaacttttaggctctttctttgttttcacttcttcattagtgattgttccacaaaactttgtagagaaaggcttgattggatatgagacattaccattcacgtggagaagagtaactctcttgtttgggaagtcgatgttggctcccacggtgttgagaaatggagttcctagaatgagaggaaccttgtgggtgtctttcatctccactatcatgaaatccgttgggactatgcaatcaccaactttgagtggatagtcttcaatcaaaccaagaggagttgttgaagaagcatctccaaacatgatggaggaggtgtggtggttcatatctttaacccctagactctttaccatctcaagtgacatcacattcacgcttgcacccgaatcacataaggcatcatcaagttgtaaatcaccaagtgagcaaggtatggtgaatttacccggatcttcaagcttgataatagattttggttccgtttgtggtgtgattggtgaatcaaaggctctcatgatctcttccactttctctcgattttctagaatggcttgaatgaacttaaagtgaagaggaatttgagacaagttttccacacaaggcaaaggcgctccaactctactcatgttggctttaaaacttgagaaaactttctttttagctttggtaagaactcgcccgggaaacggaagtagaggctcataaggaagaggctcaactcttgatgcctctttcttttcaacactcttggttatcatatcattcccattcgtactcttcttggccttctcatcactagcaaccattaagttctcaacattagaaccatatagaagtttagagatctcttctattgccttttcattctcatcaattctaccatcctctcttgattgtgtatagctcatattttcaaccatatcaaaatcgtttatgaagatagcattgcaaaactccttatgattagtttcagatttaccctttaaagttcccattggatgcttggaagtggatgaggatgggctataaacatggacattcaaacgctctattttggcattgagctcaccataaatgtcatcaaccttggtgtgcattcctttcatttgtgtggcaagatcgattgctcctcttccttgcccttctagaatttgtctaagaagagcgtttgtatccgcttgaggtggaggattcgatgaactcccttggtgttgattgtggtggtaggcttgaggttttggttggaagttcctttggggttgaggttgatagttgggttgttgtgtgaaaccgggaggctttaagggtgggtagctttgatcttgtgggttctccacattattgctcctatatgaaaggttgggatgattcctatagttgaggttgaatttgttgtagccttgtccaatagcatagttgacctcctcttgtcgctctacacaaccttccatgtgttcttgatacccttggtagacatcactctcggatacaaaatggatcggtttttgattagcaagaatcatcttatctatcttttcattcaaagctttgatctctttgcggtgtagattactcatctcattactttctcttggagtgcggtcataatcttcaccataattaccatcactttgagctagattctctaccaaagacaaaccatcatcaatatcttggcccaagaagtttgcattgcttgccgtgtccaacaacatgcgaaatttagggagaactcctctatacaaggtacttagtatagactctttagagaaaccatgatgaggacattgcattttgtatcctttgaacctttcccaagcttcacaaaaacttttattactcctttgagtgaagctagatatctcatttctcaaccttgccgttcttgttgtggagaaaaactttaagaggaatgctcttttgcattggtccaagaggtgatggagccttgaggtagattcttctcccaaatacgagctcggtctccaagagaaaatgggaagagtctaagtttgaatgcatcttccgagatcccattgattttcaccgtgctacacaacatatcaaattggtctagatgatccaaagggtcctccattgataaacaatgaaacttagagctttgaaccatgttgatgaggcttgatttaatctcaaagttgttgttctcaaccggaggagcttgaataccgtttctatttccgcggatgtttggctcatcaaaggctccaattggttgatgagctcttggttgatgttgtggcatatgaccacccccattagcttggccatttccattatggcccccaacttcgggttcattcatgacgcctaaccgagcaaggtgttcaagtcgttctctttttcttcttgctctagcgttttctctttcaaaccggcgaatgtcgttaatctcttctactaagtttgctcggccgtaacttcgtaggttcatacacctttaagacaagagcaaagatcaagtataaaggattagtaactaaagtaaaaggcttagtctcaagcaaatatgaaatcctaatggctaataactattgcaaaccggcaacggcgccaaattgatgtagcatttctatcaattaattatcgaaccacaatttgcaattaatcaactcaccaagaatacacacaattgcttaatctaagctaataaggtgactttgagtgttcctaatcttagtaacaatgcattatcaagcaaacaatgcaaaacaagataaaagaaagcaagaaacaaaagactaacaagtttcgaaagtaaacaaagcgggaaattaacaaattacttagtgataactaaagacgaattctcaggttaaggtaatcgattagaaatgataaagagatggattatggagcaacaaacaacttctaacaagcaatgatccttaggccatggaacactaaacaagactaatacatttccatgatattaatccttttactaatcaatcaatcatcaacaatttccaaaggcaatcaaatgatcaataagcataaataacaagtctatctagccactaatcaccctaatcaacaatttccaaaggtaaagtatgaaaagcacttaaagattttggttcgggaatttcatcgaacatcttccgggcatcaaatcaacatgatcaaggttgatctagccttaaaagcaaccaataagtaagaatcttaagtaatctagccctaaaatccataacccaacatctaaaccatcctaatctaccctaaccaaagaactctaggagactactcactcatgatcatgatcatacaaaggaattggtttgatctttgtaaagccataatcattagagaatagatgagaaatttaaaagaaatacttgatatagaaacttaagaactcaacattcatacaaaaacctaagataaagaaccttcaagagaagttttgatccctaaacaaaagctctttttctctaaaactaggttaagagtatttctagtaatgagaaaataaaccggatcaacccggaacaaaccgggttttgaccctgttaaggaaggcaatcgaccaagcaatagatcacttggtagattcaatatcgtccgcaacattaatccttgaccagtagaccacgcaatcgaccactttggtagattcatattcttccgtagctctggtccggaccaatcgaccacccaatcgaccagtttggtagattcgtattcctccgtagctctgctcctgaccaatcgaccagtttggtagattgtcctactagcttctcctctttggccactttgcattcttgtagctcatttgtttgctccatttgctccattttacttccaaaactttaaactccactcatgtacctaagaaaaccaaatgcaaatgcaatactatatgccaaaatatgaatgcaaagcaacaaaaactaagagaaaaagaggttttaaaacacccaaaaacactagatatcaacccgttacagactaggatgatagtggaaaaagtgttttgtgtgttgaaaaaataatattggtccccatatagtcgtacataatgtttttttttagtgggagtagtctcttcaattgagttttagagttctaaattggtttgatgatttgattattattaaaaattaactatttttaggaattcacgaactgaattgagcaatatatttttagccaatgaaatttaatattagaacacatattgttagtttaacaaatttgtttgataatgcgaatttgactaatattacaaatgaaagtttagtaattaagtagtcaattttaatgactaatttcttgaaagaggagtaatctaatattgtgttcatgttcgaaagcggtgtttggttgttgaattttttatttcatagtttcgttaatcatcaatctttgaattattttgtggtttaatgtgttttatcatataattttaatcgtttagtttctttcataattttaattttaagcataaaaactaacaaacatttaatttgtccgtttaggtaaaaacgactctcgcaaatctttagaatatcattgatttatgtgatctactctgtatgtactattttacagttaagtctataagataataattactcgagcaatcaaccggaattaggtcgcatcaaatgtaacaacaccagatactacctaagacgttttgcttaacatttaaatcacattttgaatattacgctgctcacgtctaatctgatagttgacacattccaagtcaaataaaagttataataatgaatgtgcataaatattcataatttttccaccgtgaatccactttcagtattatatagtagtaactaaactcgtttaatagataactcgtgtctctattaaacaggtctttctattattcatttttttttttcttaatcacattttcaatcgattagctttttactaaaagtagtttttaacaatgtgccaaaagacgctgtcgtaccctaaaataaaattgaatgaaaataagaaagaagctgaaacagattaactgttatcaaccaattaatctgtcactcactttagaatttctttattgtttcttattcagtttttaacattgtctctaaattaaggaattttaattgtttgtttttttcaaaaaacaaaattaaaaaaaattgaaatgttaaaaagaaaaaaatatctcaagaaaaacttttgaatacttttgtaatagttttttcttaagataaaaaagatatatatttctctaggtcccagagggcagaggaactcaaaacgaatcttggtatatatttttttttgtcgtacgaatcttggtatatttattgtatgaaatcattttttttaatattttcttggttaaatattgaaactcatttcttgtttctcctggaaaattccgttgataggactgacaagagtcctgagagaagagcgaccatcgagtaagatagtgacaataaccagcttctccttgattaagggcaaatatgtaaagggtatagagatcaacacaacacagagaattgcttataagtatattcttattgataacaaactgtttacaaatgttatgtcggagattacttgatctattctacccaagagatcaaaaccgagtaagaatatctaagcctaattctcttatctgtttcttatcactgtcacgtgaagactaagagaattacacactcaccttcaagcttttgcaatgctctgaagatttcaatcgtatcgaaatattctagagtgcacgaagcgcctcacactaaaccctagagtacttatacttactctccataatcttaaacctacgatctccgaaaatctcgttttaaggaatcttttttgttttcttcaagcttattccttcctaaatcttcgagatgatatcttccatatcttcttgatatttcttgtctttgacaccacgccaagtcagcttccatctttggctctccacatcattcgccttagcttaccacgtttgctctcgcatccatgtccgcaaatcaagcgtctgatgaaactcgatgcagcttcctgaaatttatcaatgctctgatcgccatcagctgattgattgactctgcatcttcaatatgaaccctatgaatcctctgcttttgacgctgctggttacaaatggtaaagatcttacactcttacacttttttcaaaaactttttcataatttttgagtttattttaattggaaacaaaaattaggatatttatgctatttgtgaatggtaatcaaaacgaccgaatcttttccaagaggttgggaagtcaatgttgatctcaaactcatttataacccgaaccagtctatttatataaatgtattggctaatgtattcacttgaaaaatacttcgtttctccaccttggaagataagttttgatactctgacgaatttctcgttggagaccgatactggttggcacttcctcatcaaattatatcaaaacctgttgctcaaaatgtttcctaaaggaggaaaacatatttctgttaataacagtttttagttaatctataatcaggagattaggatttaacccgaaagggtatcaaggaggaagaccacgtgcactttcaatctttctttatgttcaagccttcaaggctataaggcaaacacagttgttacaaacacttgggagtggttaatttgcgtttaaagaaacaacgaagctccaaccaaatactatatagtaaaaaaaccaaggaacaatataaagtaaaatgttaatctccaagagacaaaataactagtttggtttgttccttttttttaggcgaagctt

SEQ ID NO: 747 - DNA, 112253 bp, Arabidopsis thaliana
gaattctttcacttctacttggccagtcaaaatagtattatactgtccaagcctctgtggtctagtggcgcaagctttgatgaagggtgaaaccttcgtacctaagttccattttcttttgaaacaaaattacatttgtttggaaagtttgacaattgggtcttaacctaattaatttatctagtatttagaaatacaggcggcttgactaaccccttgtttaccagatcagccgatagagtatataaaaaaaaaaaaatagtttaaatcatttgaacggatatttaaaagctactttcatccagtaaaatagtgagatcggttttggctagatttgaactagtctggtatgagaagtgttagtgtagtcaagaatgctgaacatgtacaccagaactatacaactaaacacaacagtcaacacatataccaaaaacagttaatatttatatctaaatcctttaaactcattaaatttatgctccacaacatttaaagtgacatggaaaccaagcagcatttggtgcagtgacgagttaggtctctcataaaaagtgagatttatggccccttgaattcgaggcttttcagttaaaattgacgagacatatgaggaatcaacggctgactctcgtaaattgtgagattatggaaatcagtttgaaatgatttttctactttatcctaagaaaaatcaaacgaaattacatgcaatcaaacgatttaacaatgataaacaagcatttgatcataagaaccgagaagattgacaaaaataaacataaagacaattatattaagtactagactactagtatagagagcacatagatcacaagatttagtattattctgtttgtcaaaacactatacacttaacactttacttatcatctaaaatcaataaactttcatttacaatcgaaaacttgcatttgcaatctagactatttcttggaccttttaaaaaagttatttatttccataaaatgtaagaaattctataaataggctctgttatccatactattatacatatgcatctaattttatttaaaatgtaactaaaacagttattgataaatacattatatcacaaaataatcaaatgcaaaacctacagaaatcagtaaaaataaaataaaataataaatataatccacagaaggatgaaacaagtggcgattccgacagaagccactctcttctcagcctcatgtaaccttaaaaactgtgagtttctctaacataaaccaaccaacacttgccacgtgcccagtcccattactcctcctcacacacctcttgagtccgttaaaggccgctccttttatgttatccacacgacccatcgttttggctctgactctatattcactataataatattaatacacgagttcatagattttgaagctaataaatccacagagattttctctctttgatcacaattcaatcatacactctattctcatctcttactcaggtcaaaactctctaaagttggaatcttgatttggtttttaaggtaagattagctcaaaatgagtttaggtgctttgatggaagagaagagaagagcaacaacttcatcttcttcttctcaggtacatatgtcaaatgatatagattggcaaatgcttgataaatcgaggtttttcttcctcggtgctgctcttttctccggtgtatccactgctctttaccctattgtagttctcaaaacaaggcaacaagtctctccgactcgtgtctcatgtgccaacatttctctggctattgctagacttgaaggtcttaaagggttttacaagggttttggaacatctttgcttggaaccatcccggctcgtgctctctatatgactgctctagagattacaaagagtagtgtaggtcaagcaactgttaggttaggattgtctgatactacgtctttggctgttgctaatggtgcagctggtttgacctcggctgtggctgcccagactgtctggactccgattgatattgtgagtcaagggcttatggttcaaggcgatgtctccttgagtaagcatcttcctggagtgatgaactcttgcagatacagaaatgggtttgatgcttttagaaagattctttacacagatggaccaagagggttctacagaggatttgggatctcgatcttgacttacgcaccttccaacgcggtttggtgggcgtcttattctttggctcaaaaatcaatttggtctcgatacaagcactcctacaaccacaaggaagatgctggtggctcagtggtggttcaagcgttgagtgcagctacagcaagcggttgctcggctttagtaactatgccagtagacacaatcaagacgcggttgcaagtcttagacgcagaagagaacgggaggagacgagcaatgacagtgatgcagtcagtgaagagcttgatgaaggaaggaggagttggtgcttgttacagaggattaggaccaagatgggtctcaatgtcgatgtccgcaacaacgatgatcacaacctacgagttcttgaagcgcctagcaacaaagaagcagaaatgatatattgataaaaccttgttgtgttaagactaaccaaaatacttttgattgagtttgaagaatgttaataaacaaacataaaacagagcaaaagatcattacccctaaacaaagagttatcccttcaatcgccaaaatgtaacaatgaaaaaactaaaatgtcttcctaaattaccaaatccatatgacaaatctgatctaaaccaaacagttaagctgttcatcatcatatgcaaaggtagatacacagaagcgagcggtcaacaaatttaggaacgagcccttttgttgctgcaagaagggcacttgtattgcttgatgtgctcagctcttgctggtgttatcttaacacactttccatgaaaccacatctcacagaggtcacagcaaatccagaactcatcagctgcatagctctcaccacatgctccacactgtgtttcaccttgctcatcctcatcctcctcttccacaccttcctcttcctcctcctcatcatctttcggctccggctttgagaacttggcacgggattcagatcctcgctgtaacgtgagacaaagaaaccagaattagtacaaggattaaactgtagagaagaagtacagtggaaaacaaagtctctaccttggagcttgatttggatctgttgctgctgttgttggaaacagaggacttatcttttccttgtttcttagcagtgccagctacaacctcaaagattgttgggaggtcattcaccatattgaaaagcctcttcctgtaacaaatgtgaaagaacataaatcacagagagctacataaacggtgaaggagtagaacaatgagtgactgagaggcttgcatctatataccaccaaggaacatagatgtaagaagattagacttaaagaggagaaggatatacatacctatcagctttgtcaaatccaaacctggctccaaaaaagaaagcaacagcaagaagccaagcatcactgtggacagcaacaagggacaaccaatccttttccgccatcccgtctctggcaaaattgatacccaagacaggctctgggagctcaggaggaacctcttcagctggcaaattcacttcccagtgctcatttggatgtccgtaaaggcaaaggttctccttttctataatcacaaaaggaaaatgatgacaattgttcaaaaaaccttaaattaaaaccaagtcaaacaaaaaatcaacactttgactccgctcaaactctacactgcaattcaaataaatctgacaaaatcacaattttatccacaaaacagagacaatagaatctatgaaccctaaatgcttcactgaaacaacaacaatcagattgaaacaaaccacaacgaagcaaattcaaaaaaccaaactttcgccggcgagaatcaatctcgaaggaacaacaacactcacaaggatcacaaacaaattttttctttagttgaaaacacaatcgaaccaagtcaaacaaaaatcaatactttcgacactggagcgcaattcaaataaatctaaacaaaatcataaacagaaaagagagagagagagagactatgaaccctaaatgcttcactgaaacaacaacactcagattaaaacagagcaaaacatagaaaaattcaaaaaacacaaataaaaatcaaaactttcgttaattcaaatcaaatctcaaaggaacaacaacactcaccgggatcacaaagtcggaaaaactcctgaacatctgcacacacaaaagggtaatctcaaaattcagtttttttccggtgacaaaactgagatagtaataagaagaaagaaaaaacaaattgttaccagtggttaaagccttaatcatgccagctctacgacccttaaaatccctaaacacctcttcaacagtgcgtggattgtacgcgccacctgcttccatctttcttacagaacaaacagcttcgaaggagacaagacaagagtgaaagagagagagagagagagacaagtatttgaccggcgctgagagaatttgggtttgcgagagaaagaaagatgtgaaagagaaaaagggcggacccaaaaacaattaagcggatttaataagatgaggaggagtccgcaaaatgaatctgatgaggaggagagcacgataagttttatctttcatcctcttagatcttgacgcgtatctcctgatttctgttgttgtatctatggatatgtttttaattggattggcttatttttcgggtaatagatgtttatcaagcttgaaattaagagttttgtgttaatgatacattaaattgtaatggttgtaagattgcagaaagttttattagatactctgttttttcgaaacaaatgttcggtaatctggtatctgcgaaataaatttgaccgtttttctgtttttcgcggtaaatgttcggtaatctggtaactcagaaataaatttgaccgttttctatattttcattcgcgctctttttgaacatggtaagggatacatactttattttagattagtgagaggtttcggtaagtgtttatcaaatattcagtttttcgctttaaatttcggtaatctgatatttaagaaataagtttgactttgttctacattttttggtttcgttttgtctttcgcgccaatttttggtattctggtatctgagaaataagtttgactgttaattttatttcttcactcgaggtctagtcttttttttaaaagagtaataatagtctggttttgattaatgagagcttttaaatagtcttactagttactagatacctttttcgcaccaaatttttggtgatctggtgtttgataaataagttcaatctcttctctttttcaaggtctttttgattttttaataagtactatgcattattaatattttggaaaaaagtttattcaaaatacttggttctttcgtgtcaatcatccaaatatatcgataacccatatacaatttgatagatcgaactatacactaggaataaaattgtagtttcatggatttcatgaatttatgaatcatatctaattccaatatagtaagattttgaagtagtgttatctataaaatcatgattcagtcctcaattttgatattttatgtggatagaaaatcttaacttgtaggtaatttggtgagagtgagactgataaaagagaataagaactatgttttactgaacaaagtacttaaagcaatgaatatatttttgttttctaaattgaattgaagagacacggagagagtagtaatgttgatagattcaaatgtcaaacacctcctctagaatccttaatctttgtatgaggtacacttcaagatcttcaagaattcttttgattttttttctaaatcaaatgcaacgttaaatttgactctagaaaatgggcttgaagtctccaagctaaactcattacatgtcacacagacacgcaagatagtgatctgatggctttatttgcccaaactggatacaaaatcccaataccatcaataagttctgtaataatgcaagcaagacgataagcgcattgaactatattgcattcaaagattgtgatatgcatcagatgtcattgaatatttctcaatttgatcttttgataaagatcccatgaaatcattgacggttgcataaaaattcttaatgttttcgctagttattattacattcacaattaacaaaattcaaaatttatataaatcggctcatcttccacttttccaattactcatatgtatatgatttttccacaatttgaattaaggtaacttctattatcgtcttgatataattctcgcttatcaaactttatatttggaaaataacatattcaattggacgagaaagatacatatgtgaaactttcactaatcttaaagaaaaaacattaaaatttgggattgcataaagttaagtctcactaaaatccaacttggcaaagttattgcacaaagataagtctaacaaaatccgacaaatggcaagattctaattagttttggtttgacatatattattattattattattttcattttgacatatgttatttaataaattaaatctaacacttgtgaagaaatttttattctaaaaaatcattaatttcttaatatcatataattttctaaaattggtaaaaaaaatctaaaattgactatttttctttgtttgagttttattgggtctgagtttttggaaatttaggattttgtttcactaaataataaacaattaaacatggtaagttagaaaactgtgtaacagttgtaaacacactgttttattgaaaaatctcaaaaacaaaattatcttcacactcttctcatttctctttcgtaatatatataagatataaattgactgcttctttgatttgtcactttgaactgctaatcattcaatttagagagtactttgttgataaatggtttttcagttcaacttggaggagaaataagaaggttacaagcttacagcccaactaagctatatagttcttgggcttagcccaataatacaatactgaatttagagagttttatgagggcttcgaaaagtattgagaatagaaattgttttcaatactcactaccaaatgcttgattgtgtctatatggagttatagtctagtaccaaagagaaatctataacaattggcagagctaaagatcggttattattctcataaattgcatctcatatcatacaatgttatgaattctcaataaatgcagagcaaaacaaaacatctcaaggtcaagatgtgatcaaatattaagctgaaagataaagagttaacattagcctcgtcaccacaatgcttttttaagttagctccataacttttgctgtcttcatgatgcaaagacccgttgacgagtggaaacatgagcttgagacttgacggatacatgagaaacaataggcttcaacaatgccttcacttcctccggtaaatcgagttgcttcctaacctcattcgctaactcaatcacatactcttcctcatgctctgttatcacaacatttcatctatcaaaaatcataccaaaaacagtggtttctttaatataaagtcgttaagaaagctctctcttataccaatgtcgaacattgctttctctagcttgaaaagatactctcggttgttcccacaaggtcccgaagccgtagcgatttgcctcgccatttcttccaatggagctggacctaagtagtatttgttcgacactttgtctggtgttgacgtgaagctacacaaagaaaccaaactgatttcaacattgaaatttcctaattagaatcattaagggatatttatgattaaaacttacacaataactccggtaacgattggcgtggaagtgtcattttcctgcattcaagaaatagaaatcaaataaataaataaaaatactaaaatttgggaaaaagacaacaacaataaaacagcaacaagtttcttacagtgtaaaactcaacaagtgtttttgagtcgtattcacactctcttcgttccaagtactgcagaagaaacatgagccatatcaacatatattaagatccaaacaaaataaacacacaaacacaaaactaaaccaataaaaatacagaatcttctttttacctccattgctagtttctctttctctggtcctccacgaacacaataagcagcaccccactgctcaatttaaacagaaattttcaacatcaatttcaaattgcatttttgccatagactaattaagtataaagctatttctaaagctaaatatggcaaaatggacagtgctattttgtaaataaatggtgcattttaatccaaaaatacaaaaaagatatagaaaataattataaccagaaattcgttaaaattcggcacgaaaattccaacacactagtgattattttgcaactaatttccacaatcttctatttactatacttatttaataaaattaattttttttgaacaccaaattctaataaaataattaaaagcaatgacttacgcaaatagctccggtggattgctccagcgtacaagtcctagcaggatgttcaggagtacctctatgatcaatacacgctacaaaaaagaataagaaaacataagcaaacaatttgattcaatctttcaacaacaacaaaaaaacaatgtgttgttattatacatacctagatcgaagacacgtttatagtccttgatataaccaatgagtttttcatcaaaatcaaaacctgggttccagatcaaagaaccatatccaaatacccacaaaaccatctttgatccttagcctcacacacaaacaacaatctttagagaaaatgagaagaagaaagaatgtgatatttttgaaagaagtgggagagaattgtattaatatatacagagtgaaaaaagattttgggtgtaaaaatagaatcccgagatgtgtgggagttaatgatttgaatctagacggctttttgaggtttatacattttttaccgtacatttcggcatttaaagcagatcctactctcttcctaactctaatctaacgcatcttttttctttctttcttgtttttagtttgtgatacattgaatcaagacacctttttgttattattattcttacctaatagagacagaaatggtccaacatagcataagtcttagcccaaacccacgttttttcattctggttaggatatttttttgggtaaaagtcaaattttgtctttaaatattggttggtggaaacaaaagggagatggagaggagtggacagagccacaagtgcacaactctcaaaatatctatcttttttgttgatttggtgtatatggatgtaatgttgacgatgattggctactcgaaagagatcgatgtgtaattggttgagttgggagagatgattatggagaagtgactcgttttgggagtcaaattgatgactaaattttactataagttggtgtaagctacacaagtggatgtccttagttgggtcgcatcttcttttatctacaagttgggctcttaaaacggctgaatttatttatggggagaatagttgggccttcttaagaaaatatagtttctacgaaagtacaaccaaaaaatgaagaaacaaaatgactctagtatcggttctgcagccatattatttatattagcttgaaagcacgttgagccgtgggttcattggtgttggaccactcattttggatttggtggcacgttttggttgtaacttgtaattactgtcactccctaaacaaatactaaagtcattatatactattattgttcaactccaaattgttaattataccaccgtcataatgtttcttttgttatttagacatttacgctctatatagtcagtatacgtagggcatgtgtagcaccgtatcgttgacgacgaccttcaacggcagaaatgtagaagccgacgaaagcaaaggaaacgatcgatggtcaaagaatggcaccaacgtcgttgatttcagagcaacatcactaagatatatatttccggtgactgaatttttgtcttcacggaaatataaaagttgttaccaaaatattgaaaattaattaagttagctgattcaattaattcttctattgttcgccgaaagtagtcttacagcgacactgtgacgatcagtctcacaaactctttaaattttcagagcatgtaataaatattgtcgttgagacagcgatgctagtatgctacagaagtcattaaaattgagagagctggctctacgaagagagattattgagagtgagagaggcgacgacgtggccgaatgtgattgggttttatttgtaacaaaaccaaaaaaataaagcactagtgctttgtttcctccgccaaaaaagaacccgacggtttcatctctctctctacaaaacaaaaatccggtggtatgatttgcaattagtcgacggcgatgatgtgtgtaatcgtggatctgagacgccggatttatttaattggcagacgccggatttgtgttgatgagataggttccattttttatctctcaataagagagactgttggaatctcatctttgttaacaatatgcaacagagattggaagagaaagatgtgagaagatggtgagataagaacaatcgtaactcgtaagcaaaagaagaagagaacaagaagaagtgtgttgtaggtggaagaagaacaaataagaaaaaaagagaccactctgttttgttttgttttatcttaattgcgagtgtgcttcgtaatcttgttaatatgctaacatacaattgtacttgagaatttagttcaactttgaaaatggttcagccatgaaaatcaatacaattccacttacattgattttgacctttactttaacaaaatatctataagatttgggaatttgctaaaacaacaaaatataaagcaaactgaacttcacaagtcgatttatcttattgtacatgtatgcctacaagtctcagagattttatgggcattcgatatcaagttcgtgatcaaaagatgcatttgcaattgaaaggtgatttggtagaacatataagggaaattttttgcaacaatcaacagaacaactgatcgttattccatttttttccacatctatttcaaaatatttcagaataatgtatgtttaatagtttatgctttgtaataattattaagttatataaaataaaatagttttattttaatattttttttagagaactcatgttagagaacctaccattggagtataaaaaactataaaaaaaacacaaagctctctacttcttcttttttaaaatttaatcattaaaaaggggagagagcccttgaagggactctctacattggaggtgctctaaagatcttactaaacacatatcactggttatcattaactgtctatttccatgtaacctacccattttttttgttttactaattgttcgactaatcattagtcacactagtagctactgtatacgtttctaattatatgtaatttaaaggtttttttacttcttttaatataagtgttgtttttcacgtttctatacaaaaattaaatttatttaatagattttaaccaattatattttacatcatatttttttattgattggattagttgtaattaatgatgtttttataggaaagaaataaattaaatgagatttgtatgttttcttaatttgtgtgtaaaaccttaaactacaaatatttagaaaaacaggaagtatatagtgtacagtaaaacttatataaattaatgttgggatcgagaaaaatattaatttagaaaaagctttaatttatcgataaattaatttatagagaaattttaccaattttgtgatttcttacaaaaatttaatctaaaaaatagttttttctatacaatcaataatcttttttaaaccaattactagtagaaaactatttttatagatgtttgaaaacaaattaaacttttttctacgtagtaaaaatattagaattaaactatacaaataattaatatcaattgaaaaaaaaataatagagtaatattttactaaatattttacataatatatattcataaatataaatataaatatatatatatacataatcataaatttatgaaattattaatttataatattgatgggaccagatatttacataggattttcaaaaaagttattatcttattcatttatcgatttgtatcaatttttacactagtctcaactcagaaccggaagaacttattaatttatagaagttattaatttatagaggttttacttcaatacacaaaaaaaaaattatttccaaaaaaaaaaaatacagtaacagtcaaaataattaaaaagatcacacaagaaaaataaaatattaatatttgttaattagaaggtattcatcacatatagtcatgtttcatatatagtcatgtttcataacagttaacgttttaacatttgaatgtcatcttctgaattcatttcgttataatagaaatcttaacaatttatgatatgtgaaatacgaaggtatagtctactaaaaaaaagaaatacgaaggtgggtctaactggtaggtgtttttagaagaaaagagtatattcttaattgttctgaattcatctgtgtattcaccagtctgaaaaaaatgagaagaattatttttcttctgaaagtcaaaaacagagtaaagtaggagatttaattcctcttcaaaaatagctaaagtatgtatagatttatttaagtctattgaatgaaagttgcaagccatattacaatttattgaatagatttaccaaaaagtatgtatagaatagtatataattacaaattaatatttacagagtagtgaatagtgattaacgttttaaataccctattttggttattattagataaaatttatataaattctaagcgactactattattattgtactctctatgtcccaacctatatataggatgttttaggttttttgtttcattttattagattttctcaagtctctatgaattaaatttaaaagcttataacaattgaattgtgcagtatttatttatgttggttaaacttttataaatgaaaaagcatttctttttttttgtacttttagccaaaaaaatcttataaaatggaatagaggaagtattatattgaaatgagtaggtataaattcattatttaggtctattaaatgaaagtttcaagtcatattacaatttcttgaatagatcaaggataaaataggtatataaatatatcgttacaaaaatatttttacggaacaacgattgactttttacatagattatttcgaatataattagatcgagctgatattgttacaaagtttataaatttatattgttacaaaattcagtggctttttggatgaaaaacatttataaatttatttcatttaacattggattgtgtagacattttcttcaaatatatacttaaggtcattctaattttctgttgtataacatttgaaaaaacgaaacaattgaattttccaccaaactttctactttgcttctcagatgtcttgaataagcgaaatatttagctgtgagtgttgtcatcgtgaacaggtgcggaaactggtgcaggagatgtcgacacaaataaatgctacaaaactggtttgcatggcgaaattattcctttttaaaacaatttatttgcttattctttctctattttttatcaggaaaatattctctctttatttttaagtctaaaaagcatattaatatttttctaggatgtaaatatttacacgttccaacaaaatttgtacaatactgataatcaaagaccttaaatcacccatagtgtcttcgactaatttgattgcatcctatagacatatttctacttttgtagtataaccttttaatatatgaacagtttattaatatcaaacatggttcgccgcaatacatgactatcatcttttttttctttcttaagctttattgtcataggtaaaattgctaccatactattatttttgaagtacattttaaaatgtaacttttattatggttaattattacaaaaattacattacttatatctatgcatccggtcaatttagcaattaattctctatcatttatatagccaaacagattttttaacattaattattaaattaaaaataattatataatgttccataattaataatattgatatttagatgattttgttgagatttaaaatataatttgccaatcatctttgtttgattttgttatcttattatttgaaatcatatgatacataaatctaaaaacatttttgcatatcttgtggttcaaattttaaaagatggacatatattactcaactaataaaaaaatgtgtgttcaactttccacatttgctgaactgtttagtagttatttggagttatgttataaataagatcaaaatgaatccaaatctgaatgagcatgaagcttaacatactttggttttttagttggaactatttaatttttcttgaggcataaattttaaatatcttaattaatatatttaaactaaatctatttttttaaatattatagatattaaaacgtagaaaaagtttaaaataacacgggacatgttataacgcttccataatgtaaattctcattttattattgtgttaacacgatcaatagacatatcaaatgaaactaatttaattaaaattacgaaacaaaaattactcacactaagttaccatcggttggttgtgcccattactcgttcttgaatccaaatggtcccaggaaataccatcacagtcattacggagatttacataccaagattatcatatgtatcccattcgttaatgttttgtgaagttctaaggaagaccagattaagtcgaagttcctggacatataaggttggtttttagaatttaaaccaattatatatttaatttttgtaaaaattaatagtaagaacttcttaagaacccatcaatgaggatggtgtaaaagcatcgtagactattaattttgtctcttaaccattatgatgaattgttttattgaaaaaacttatagctaaaagattttgttatggtttgaagctcttaaatattcttttatctcttacctaattagcaactcttctaaactattcacatattatttttattatattatacctaaaatttatagttagaaacttgcaatgaggatgatctaagcctcataacgacattggggctcttgtcccctgtccatcatcagtcaggaactaaattgatatgaaataaactggatcccccactaatttatttatgtggcacattaattggtaaacactacaacaatgttgtgttttgttaaatcacaaatccatttaaatttagaatcgcaggttaagagatttttttttgctaagaatataaatattattataaaaatgagacgtttagattttataagatgatttgccaattgcttaaacctattgattggtcttaactttaccaaaaatatatattaaaaaacatggaaacaaagacaaagcgaaattcagcacatcgacatatcatgcatgcattaatacaaacagattaactagaccattggtcgtccaaccaaaacaatacaattatgccactattgacaatttcatacatggataaagtgagatgtcatgaatgtggttgtacataactaaagatggaactgaagtactaaacacaaattgtaattaagagatactacgttacaatttttatggtgaatttgtgaagtttaaattatttgcaatattcgttttctgaacatgatgcagtttaaccaaagaaattgacattttaaaaagcttgaaaataaggcatgattgtttaaaactttaaatggtggtgtgtttaaaaatagtatttactcatatagctaaatgttaatttgttgaagaagaaatcataataatgatgaagaggtcccatacataacaataattagatttcactgtgcttgtatttataccatcaagatggtcaagaaatatatgaagagcccccatcattaaatggagacattatttattggctatgattaaaacagaagtaaatatataagtttgtggagtataaaaaataaacaaagtgtatagaagcattgactttgaccacattagaatctttattacgtaccccaacgcttctcaatgcaaaagaagcacatgcaaccatccacttagaaccaaacatatgcatatgtgtgattaatgttgttgagcttctactccacgtatacgatttaattgtacgtaacatatcagtatatcatttcaataacataacaaaatctatagaaacatgtatttcttgtaaacatgtttaaattactatctacgtaaattttgcgtgtgggacggagtggaacaaacacaaaattcagtttctaagagattaatctaggttgaaccaaaacaattcctgcctttttttgtaaaatgatcaaagttggccgtgatcattataccataattagtcaccatcgatttttttttaagatatgctcttttagtttcacctatttactttgatcattcgacttccatacacatacagtaatttgttttggtgtcaccctagagaattatattgctcggtgcttttcctgttttgtatatatgaaatttcatattataaactaaagatgacaatttcgtaggtgtaagtttgaaatttctaattataaaccatgaatgggatatttcgtacatatttcgatctctttataaatatttcataattccaatcaatcatatatgtaaaagtacatcatatatgttcacccaataaactagcaacattactttcaatgacttttagcttttcctaggttacatcatatctaaaaccatccttagaagttagaacaatgactaaaatatattttctggcatacaaacgtcaaccaaatttgtatcaactcgtaaccttttagcccgccaaataactttattagccgattttttttttagagagacattctccacacaaaacaaaacaaaaataatagttggatacaagatatttttcaattgagatattaaaacagagaggttcattcatttatcatcaacagagaacaccgacaataactatagagaccagagagagaaaagataaggtacgaagaagagaaccagtttcgcagaatagtacttgatgaaggtactcaataatccaattcttcaattatttctaaaatataaaccccaccgtcgttttcttgttcctctcaattatttcacaacgtctacatttcctaatttatttatagatctacttatcattatcaaacaaaattacaatatcgaaacaatgtttcgttggatactattttttacctaccatatatacaagactaaaataaacaacgtagtatgaactatgaactcgagattagtatgagttttgatattaaactcggaaacacttaaatttaagatgaatcaccaaactacaatgtcttattatgagttaagttaatcaaacataagtgtaaaaacaaccaataacatcgttaataaaatagaatgtttgaatcacactaaaacaaaaattaagacatgaaaaaaaacattgataaaatggaaccaaaagatataagctagatctcgagactactaaccaaattcttctgtaacattgagttcttgcaatgagcaatagctccttgaatagcactttgtaactcttccattgaagatgacacactgttgttgttgctactgctgctactgcaactaccttgatgaaccggaaaaccgccacgtgtcagtacaccggagtgattcggagatgacctcatcgacgatggacaactcgccgcgcatcgtccacgttttgtgtatttcattaggtttccggagaaagagattgataaaccaccaccggaggagacaacggttggagcggcggtgacggtggttacggtggtggtcccacggatgttgttaccggaatctttgagagatgatgatgactctgtttttatattggagctctgttttggagataatttttcgtataatggtttgacttttttcatgtatttccgtattacttctttagctgttgagctcattctcttcaccgacgacggagctgcggcggttgttgcggtggaagaggaggaggagtggtggtggagattggttttgggatctttcttgaaaacagaggagaatctagaaagtgagaaaccaccacttgaagatttgttctttggaggtttaaagaagaaatcttcatcgtcagttacagagctaggacgagaagagtcacaacaatcaagcggaggagggtgaaggagagggaaagaagctgtggaatcagtggaggagttagattcagtggagtcacgtgcggcggacgttgcgacggaggaggaagaggaagaagtgtagtctgaggaagaagtagaagaaccaagtgtacggactagagagagacgaggagagagctgaagaggaagaagctggcctttgtaaaagagttcatcggcgggacaaagcgaagaagaagcttttcgcggcgagattgagatgttaaattcgaattccgatgaagatgacgacggagatgagtgagattgcggtggtgagttacgtggacgtggtggttgacgtctcattatctctctctctggttcttttgtatgagtctctctatgcttttgtttgtgttatgtaataataatagaatgatgaaaatgtattttaattttattataaggtttttatatattttattttattatttttgatatttaagagggctactctgcacagtgccacgatgatcgccagattgaagctgtagtcacatgcaatgcaattaaatatggagcgtaggattagattagagagttgtttaatgacgttagttaattataattataagtttgtaggagtaagaagtgagcaaagctagtagtgacctgtgtgtggtccgatctctttatgttccggaaattatggtatccctagttttgttgcaggttctatttcattgacttggctgtaaattttgtttaaacaatactatgtgaattttaatcaagtttaacaaaagttggactaactagtttggtgtttagctagtctttatttatcggttgtctatttatttctttgctacggaaagagagagagagagttataaatacattagagacaagatggctaattagttgaaatagttgtttgaataacgagtatgattcattacacatggtcttgatagtgtttgagagacatgttgtgagtgaatagacaaactttttgcaaataaaaagtaatgcatgcatgagttttggaacatcaatattttgttttaggggcttttgatgctcaaatcaacattttacgatagaatctggttggagacaaaaaagttttaggaaaaatatggtcaagatgcgccatgttttaaagaatcgagcagcgtgtattgtaccatcttgtaagttattttcggatgagatcaacaaatttgtttttgttaaaatcagagcgaaaaaataataagtttacctaaagagaaatcatgagttaaattttaattcagaatcaaaatctctaaaagaagaaactgttctacaaaaaattatggttcgtaagtataatggatagacggtatgaaatttaacatctattagtggtggtctaaacattaacaatgaataatcttttggtacaatgtgcttttgtaatgaatcagaaaatcttatatatataaagtacaattttaaaagttagtaactcacaagattatgacacgtgttaattttagcgattttagattttgacatttgttagtttttttttctaattttttcctaaaataaaataaaataaactaaaaaaagaaacatatttacaaatattaatttatatgtctatatcttaaaaaataacttataattttcttaattaaaatgaaaaactaacaataagatgtagtgtatacaattaaattatatttattaaattaaactagatatttaaattgtattgtaaaatcgattttctaagattgaaatttggtttaaagaattactaaattaaatactgaaaaaatatgcgagttactatttaaacttcaaatatcatcaataagatggagtgtatatggactagatagttcagattactcatgtgtatagaaaaactaatcgcatattgaatgaattagcaaactctgcattttatttaccgcttagtctgcatttatttgatgtttgtctgatagttgcaagttcgacattgtttgagtatacacatgagatgtttttttttttttttttaatttttttttgttttttttttattttacatataagatgttgtttctacaaagtgtttgaatgtacttttatgttatgaataaatcatatgaggattttgttccatatacattataaaaaaaaaaatggagtgtataaaataacaagataatttattatgatgaaatatataattaaaatatattgtaaattgaatgtgtttgattgaaattattaaataccaaaagttactaaattaaattttaaaaaagtgtgtggatcaccgtttactatttaaaatttagatattattaatgaatatttgaataaatttatatcatacactcgcctatttaggcgggccttaattagtattgtataaaacaccagtaataactaatactaggtagtactagtattttatgtcattctagtatatttcgaatattaatgttttagtttaattatatatcagttatgtaatttttgttaggaaatggtgatataactataactatatacatttgtaataatatatgaaaccgttgtcgtcattgtcggaaaaatacagctgaaggtgtaggaatagaaatagtgattttatcacgtgacgctaacgccatgggtggcgatagctcgtcccatctttcgttcgtttgtttttgttcttcgatactaatagattctctctatcagtttcgtattattatatccttaatcaattcataactacgccgtttattttggatgggtcgaatcattttcttatttctaaatcaactacttgattaaacaaatcacagtcatggcggtcaattaataagctgcttaattgataattcatgttttatgttttgatatttgttatatattaatttattattaaaatttagtatttttttcatttgcggttttttttatttatagatattagctaataaatttgtaatgtgtaatgtggatattaatattctacatttatttgatatatttggtttaagtagaaaaaagagaaattgaagtgtatttttttctctatcagagatatacccgtgatataccgcgaattgatattttcattaaaaaattaaatattttattttaattaatattatttatatataaataacatattaagaggtatatcacagattcacaagcctatattttatcaaaaaatgaatttttgtttttaagatgatctatagatatatgatattgtttgttttatgtatgatacaactcacgacgatatttataactaaaacatttgaaattttaagttatatttattttgttaatattgttagttgtggttagtttttaaaattgtataattgtatttttattgttaattctaagatatcacccaaagtatataccatcccatattaatattaacccaaatccgtctcaccatacaactcacgacgatatttaaaattgtattttttatttatagatattagctaatgaatttgtaatgtgtaatgtggatattaatattctacatttatttgatatatttggtttaagtagaaaaaagagaaattgaagtgtatttttttctttatcagagatatacccgtgatacaccgcgaattgatattttcattaaaaaattaaatattttattttaattaatattatttatatataaataacatattaagaggtatatcacagattcacaagcctatattttattaaaaaatgaatttttgtttttaagatgatctatagatatatgatattgtttgttttatgtatgatacaactcacgacgatatttataactaaaacatttgaaattttaagttatatttattttgttaatattgttagttgtggttagtttttaaaattgtataattgtatttttattgttaattctaagatatcacccaaagtatataccatcccatattaatattaacccaaatccgtcccaccatataaccccgtctcgtgaaattaaacatcattttgtcattttcttataaaattcaaatatttctaatatttgaaacttcaaaaaaacttttaatatcgatctaaaatttatgattgtattttgataggatttcacccgtagtataccgtcccgaattaatagatgtttaaatattttaaatattataaatatttaaaaagtttttaaagtttagtattttaaacttttaaaaatgtataatatttaacttttaatagagtttaaatatttataatattttgaaaatttttaaaggttcaattctttaaattaaagaactggagtaaatcggataacacttttaattttggatgcctgataaatcaagcttccttctcttcttattcacaatcattttggtcttatttatattttgactctgaactattgcccaattttttaagcaatgtgtgaccttgtacacttatttttttcttcatcaattgagtaatatatgaccgtttttaaaattttgaattgcatatactgaagatttgttgctggattgacgactacgagaagttgttgagccgccattgaagagtctctgagaaagttgaagagagagagagttcgagagagagagagagtttgggaatcagtcttgtgtattttattttgtgtagatcaagtttatcataattgtgtttatgaaatcttgaaaaatatcgaatgaataatattatttaagaattacatcatatgcagaaaaaactaatatttttttttaactatatgtattttatatataaaatattttttttagatatattaacaaataaaagtgtaataaaattcatatatttattattaatgtagagattttaggaaattagcatttaattgaatgtagttcaatgaatataagatttaattaaggatataaatctagaataatatattctttagatagatttgtagggactaaaaactaaataaaggaaatagtatattcaagtgttttatgcgaaataacgatttgttagtttttagttataaattatttgtttgatattaaatttgtaacgattaatattgaaattagtaaataggtgagagatttttggccaaaaatcttaccaaaaatgtatatgtagatatgttatacaactggtattacataatgtaggtatttttttcatatttcgataagtacaaactaaactaatgtatgtgtatgttgtgtacatttttcctaaactattggtttttcatatggggatgctaacaccatgcaagctgattgccaatgttgatgactctagtattagtgtgagtagggatgttaaatacggtttctgatctagtccggtcctgtttatttaaagtccaacactaaatgagccataaccctttttaagtattattttttttaaaacaaggttgagccctatcctagccctttctaactattcaatcttttttccaagttaaagagtggattttccaacaaaaaatttctaagtttataacactattgtttaattatcaaatagagacacaagaacatcacaacatacaaaaaaacaaaaaaactcataaatatcatattacaaatccaaaataaacagagcgaattataaaacttctcatcatgtgttagaatctccaactcatgcgtgggcagcagcacgtgacatatatagacgttttttttatagctcgagttctttagtcgcgatttacaatttctatatttgccatctttgtagcatcattatattcttgtttttcagtgtctcctacaaattaatgatataagttagttcaagagaatgattcatataagttaataacttcattttacaatttaccttcaaaatctgcatatctacgaagccaattgcggatggaaattaatgtttgcatattttggagaaaaaaatgattcctaaaaagatttaacacccaacctccaacgctgaaagcagactctgatgctagtgtggtgattaggatgctaaacaaatcagatggcattgaagccaaatcaccatacctatgttgattctctttctaaaaacttaaaatttccatgtcagataaagttttcatctctactctcggttgatcatctaaataaatttccaaagttgacttagtaatttttgaaacaaatataaagttactttcaaagcaaaaaaaaacttgtaaatatacaaatacacacaagattagttaaacgagaacaagaaagttaaagatattcaaatatattattatacttacatcattcacatctgtttctattggcgatttattgaaaagctcgttttgagtaattagtatgagattcttgtcatcacatgtgtaagtgcattgctcacctctgtgcccgttaatgcagtttctgaattcttcctagattgttcagtaaggagaacatatggcaccgagagccaccatttttctgatcatatgtgcaatcaaaaacgtcactagagccattacgatggagaatgagctactggtgccgatattgaaagtaaattacaagattacgtatttcttctaaaagattttgagtccaagtcaacataatttggaacggtaacgttgatgcatacgatattatgatttaaagttgacatcaacatcttagaaaagtagcttttgaggtcatcaagtttctattcatagtatgagataagctcaaggaccattatggaaagcgatcttcggtataaaaaagttgtggacgaatgttgctgatagaaagatcacagggaaagaagcaataacaaacatgtacaaggagcttgatgtgtttgattccactcccaatgaaagagttttacaaaatggaaattgagaaatcaataaaagcatgaaggcgtaggagcactttaagcctaaggaagtccattccaaattgtattctttttttttctttctttttttttgttttttgttttgaggtatttttattagaataatagaggtgctatgttaatggcagttcatgtataatgattttccatgtaataatagtttattcccacgagtcttttttttttttgggtcaatagatgattaattacctccactcctacactatcataaatcaaaaactaatttcacaaaattcacattatgttaataaaatatgttcccgctgtcccatattgtaaacctttatagctaaaaacacagtttaaaaaaaacataaatgttttattattttacataaaatataatcatctaacatttatttaaaactttttaaccaatagatagtagaatggaaataatcataatatactaaacaaacataaattatgaaaaaatatttatgttttatttagtaaaaaaatctaataaaatgaaacaagattttttttaaaaaaatatatatttatgtagttgtgaagatttttttcctctcttttccgatgatatatagatttttgattagacgaaaaaaacaacaatttaaatttgttctatttacaaggcaaagtgtaaggcccgtgaaccggaaaattggttaaagtttgtttttaaatcattcggtttaattggttgggttaattagaaatcctagagtgtgcctataaaagaagcaaactcgaaattagggctttagttagctacttttcgttttataaaggaaaaaaagagagaaaaggagaaggagcagaatcgttagggtttgggagaaatcagtttcgtcatatcaaatcgtggtaaaaggtaaccaaatttggtagagttatttccaagtcctttatagttattctccagtttatagaattggatttggattaaaattgattgagttattcgcagtttcgtgagacacgttttctcagacgcgaattaggatcagcggagattgaaactgagatcgtggtctcgtctgttttccgatcggcacgagattttgtgggaagctttgtgacgtctgcagctaggatttcaccgcagcgattgaatagttaacggttagcttgtattttagggtttcgtctttgggactgcttgtttctggtttttcctgtccagtttgctccaaggttgcttttggttgtggacttgttgtaggacgtttctggactgtttcagacgcaaagagagtctctcctggatttaattgctattagaatcaatttgttaaggtgagtgcgtgaccatgagcttatctgagcgattgggttgtgtgatgatatgtaggtatggtgaatgtgttttgggtgaattgttcaatgactggtttgtttgtattgtattcgtgattatacctttttatttgcttgtgtgtatagctcgtagatgggaggatcgcctcactaaatatttatgataatacttacgcatctcattgtgttgttgatgcaggtaaaaataaagtgtgattgtggaatcatggcaaggaagagaggatgatctaggaactcgtttgttttatgtttggtgtttttggttattgaaacccggttaggattgtcagttattcttggttttgttgatcgaattatttatttattcataaaatagtatttctgacttgcggtttaattattatgttattggttggtttaattagatatttatgggaatatttaattatatatatatatatttttttttttaaaaaatgggtcgggttgtttcaatttggtatcagagcgattacggttctaggatgtgtagaaaaattaattgatgaattattttcctgatgattgatgtgggatgagctagggtgttagcatattgaggattgattatggagtgtttagtcaattgtgtgttgttggagtcctagcatcatcttctccgagccttaaatgagattccacggtaagttgtttgtgatatattcgtttgttttagtttcttagccatttgttcttgagtagcgcagatggttagaggagctggagttcgtggtcatggtaagggacaagtcctcgagggtaccggcgagagtgatggccacagtgccacagttgagcagagtgtgggttcacagcctgagtttgtggagcccggggttaggaacggttttggtgccgatatagctggtgcagccggagtaggggctggtggagctggtgtcggtaccggtgtgcatgtcgttgatgctgagggcccaggagtgatgggtgccgcagctggaggagcccagattccagaggttggtttggcgggcctgctgaggcagttgttagagcggttaccaggtgtggtactagtgcaggctccagtggcgccacgagtgacggaagtgcagcagagggctgcggttgctgaggaggttccatcttatttgaggatgatggagcagttgcagaggattggcaccaggtatttttctggtggtactagtcctgaggaggccgacaattggaggttgcgggttgagcggaacttcggttcgagcagatgcccggggagtatcgggtggatctagcagtgcattttctagagggagatgcacatttgtggtggcggagtgtgactgccaggaggaggcaggcggatatgtcttgggcagatttcgtggttgagtttaatgccaagtactttctgaaggaggcgctcgaccgtatggaggcgcgttttcttgagctgaaacagggtgagcggtcggttcgggagtatgaccgggagtttaaccgactcttggcgtatgcgggtcggggcatggaggatgaccaggcccagatgaggaagttcttgaggggacttcgaacggatttgagagtgcggtgtagagtgtcgcagtacgccacgaaggcggcactggtggagacggctgctgaggtagaggaggaccttcagaggcaggtggtgggagtgagtccagcggtacaaccgaagaagactcagcagcagatgacacctagcaagggcggcaagcctgcaacggagcagaagaggaagtgggatcatccttccagagctggacagggttgtcgtgcaggatgtttttcttgtgggagccttgaccacaaggtggcggattgcacgcagcgagctgagacgagggagtgttaccactgtagggaaaggggatatctccacgtcaaggttgctggagggcaggttctagcggttctcgggagagcaaagggtgtagatattcagattgcaggagagtcaatgccagcagatttgattatcagccttgtagagttgtatgatgttattctaggaatggattggttggatcattatagagtacatcttgactgccaccgtgggagagtttcttttgagcggccagagggaaggttggtttatcagggagtgagacctacctcagggagtctcgtcatctcagcattgcaggcagagaaaatgatcgagaagggctgcgaggcttacctgatgacgatatctatgccagagtctgtggggcaggtagcagtgagcgacattcgggttgttcaggagttcgaggatgtgtttcaatcgttgcaggagttaccaccatcacggtctgatcctttcacgattgagttggaaccagggacagcgtcgttgtctaaagcaccctacaggatggctccagcagagatggcagagctaaagaagcagctagaggattttttgggtaagagattcattcgtcctagtacttcaccttggagagcgccgatgttatttatgaagaagaaggacgggagtttccgcttatgtattgactaccgggggttgaaccaggtcactgtgaagaacaagtaccctttgccaaggatcgatgagttgttggatcagttgaggggtgctacttgtttctccaaaattgatttgacgtcggattatcaccagatcccgatagcggaggcagatgttcgcaagactgctttcaggacgagatatggacattttgagttcgtggtgatgcctttcgggttgactaatgcacctgcagcgttcatgaggttgatgaacagcgtgttccaggagtttttggatgagtttgtgatcatctttattgatgacattctggtgtattctaagagtcctgaggagcatgaggtacatctgaggagagtgaaggagaagctgcgggagcagaagttgttcgctaagttgagtaagtgcagtttctggcagagagaaatgggttttttgggtcacattgtttctgcagagggagtttcagtggatccagagaagattgaggctatcagagattggcctagaccgaccaatgccgttgagataaggagttttcttggtttggcagggtattacaggaggttcgtcaaggggtttgcgagtatggcacaaccgatgactaagctaacagggaaggatgttccttttgtgtggtcaccggagtgcgaggagggtttcgtgagcctgaaggagatgttgacgagtacaccagtgttagcattgccagagcatggagagccttacagtgtgtatactgatgcctcgggagttggtttggggtgtgttctaatgcagcgtgggaaggttattgcctatgcatcacggcagttgaggaagcatgagggcaactatcctactcacgatttggagatggctgcagtaatctttgccttgaaaatttggaggtcttatctttatggcgggaaagtacaggtgttcacggatcataagagtttgaagtatatcttcactcagccagagctgaacctgaggcagaggcgatggatggagttggtggctgattatgatctcgagatagcttaccatcctggtaaggctaatgtgattgtagacgcgttgagccgtaagcgcgtgggcgcggctccagggcagagtgttgaggccttggtgagtgagattggtgctttgcggttatgtgatgtggcacgagagccattgggattggaagttgtggatcgagcagatcttctgactagagttcggttggcttaggagaaggatgaggggttgatttcggcttctaaggtagagggctctgagtatcagtttgcagctaatgagactatccttgtgcatgaacgagtttgtgtgcctaagaatgaggagttgtgacgggagatcttgagtgaggctcatgcgagcatgttttccattcatccaggagcgactaagatgtaccgagacctcaagcggtactatcagtgggtcgggatgaagagggatgtagctaattgggttgcagagtgcgatgtttgccagttagttaaggctgagcatcaggtgccaggtggcgtgttgcagagtttacccattcctgagtggaagtgggattttatcacgatggattttgtggttgggttgcctgtgtcgcgaaccaaagatgctatttgggtgatcgtggaccgtttgactaagtcagcacattttctggccatcagaaaaaaccgatggagcggcggtgttggctaataaatatgtgaacgagattgtgaagttgcatggagtacctgtgagtattgtgtcagacagggattccaagtttacttctggattttggagagccttttaggcagagatgggtactaaggtgcagatgagcacggcttatcatccacagagagatgggcaatctgagaggactattcagacgcttgaggatatgttgcggatgtgtgtcttggattggggaggtcgttgggcggatcactttagtctggtagagtttgcttataacaatagctatcagatgagtattgggatgactccttttgagacgttgtacgggaggccatgcaggacaccgttatgctggacccaagtgggggagaggagcatatatggtgcagattatgttcaagagaccttagagaggatccgggttcttaagctgaacatgaaggaagctcaggatcgaaagcggagttatgctgacaagaggaggagagagcttgagtttgaggttggggacagagtgtatcttaagatggccatgttgcgaggtccgaacagatctatctcagagactaagttgagtcctaggtacatgggtccgttcaggattgttgagagggtgggaccagtggcatacaggttagagttgcttgatgttatgcgtgcgtttcacaaggtctttcatttgtcgatgctgaggaagtgtcttcacaaggatgatgaggtgttggctaagattccagaggatcttcagcccaacatgactttggagacgagaccagtgagggttctcgagaggaggatcaaggaacttcggcggaagaagattcctttgatcaaagtcctgtgggactgcgatggtgtgacagaggagacttgggagccagaggcgaggatgaaggcaaggttcaagacgtggttcgagaagcaggttgctgcatgagtttgcctttccttggtttccagtttcagtgttgttgagtttttgagcttttgagttgttgttcttatttctcttttatttgtattttcgtttggagttgtaacgatcataacagttgatgattaataagatgagtattttttcttggatttgacttgagttgtcttatttaagattgtgttgtgcggtttccaaaaatgaaaagtttcctagaaaggacttgtctatttttggaaagtttgagtaaacaacctaagagatccgtgtgtttacgagatggccgggagttggtcataaggatattctcgagggatatgatggatggtgagacatagaggtgtcttacgcgaatccatgagagagtctggagatatgctcggaagcgtttaatattgttgctcgagggacatgaaggtcccaacgactcgtgaggagcggggtatgctcctgaggtaccggtaactcgagggacatggtgtatttagagaacgaggggtacggtggcttcgggtgacgatccgagagcacgctttagggtgacgacccgagagcgagttttgtggtattattttcgccaagtgtcgtaactcgatgactttgtggctgagagtgagccgacacaactcagggtttgactttgagtggggaagataatatgtgtgatacccgagataccgtaggccgaggcctgagagtgacggtttatgctcgaagattgcagtctgagagtggagagtgagttgtgagcaacaatgactagtaaatcgtgagtatattgactggatagagagacctagagggggtctggttgaagggagtgcagactgtagtgatggttgcacggagttcctcggagtggaagggtgaagctagattcgaggacgaatctatgttagtgggggagaattgtaacgcccgtgaactggaaaatcggttagggtttgtttttaaatcatccggtttaattggttatgttaattggaaaccctagagtgtgcctataaaagaaggaaactcgaaattagggctttagttagccacttttcgttttataaaggagaaaaagagagttatttccaagtcctttatagttattctccagtttacagaattggatttggattaaaattggttgagttattcgcagtttcgtgagacacgttttctcagacgcgaattaggaccagcggagattgaaactgagatcgtggtctcgtcttttttccgatcggcacgagattttgtgggcatctttgtgacgtctgcagataggattttaccggagcgattgaatagttaacggttagcttatattttagggtttcgtttttgagactgcttgtttctggtttttcctgtccagtttgcttcaaggttgcttttggttgtggacttgttgtaggacgtttctgaactgtttcagacgcaaggagagtctctcctgggtttaattggtattagaatcaatttgttaaggtgagtgcgtgaccatgaatttatctgagcgattgagttgtgtgatgatatataggtgtggtgaatatgttttgggtgaattgttcaatgactggtttgtttgtattgtattcgtgattatatttttttatttgcttttgtgtatagctcgtagatgggagaatcgcctcactaagtatttatgataatacttaagcatcttattgtgttgttgatgcagtaaaaataaagtgtgattgtggaatcatggcaaggaagagaggatgatgtaggaactcgtttgttttatgttttgtgtttttggttattggaacccggttaggattgtctgttatttttggttttgttgatcgaattatttatttatttataaaatagtatttctgatttgcggtttaattattatgttattggttgatttaattaaatatttaattatatatatatatatatatttttttttttaaatgggtctggttgtttcacaaagatatctgagtcatatttggggaatgctgacattaatactttcgataacaaaaagaaaatacactcattaaacagaacaaacctcagaaacagaatttaattaaaaacccacaaaatgaatctaagatagtttgctttacaattcaaaaacccgtctctgtgattcaaaatccctaaatccagagatcgaactctcgatcatgttatcgaatcatctccagaacgggatcgaatccgataacctactctggtctcgtgtccctgaatccgatgatacttccaccgacgatattactctactcaactctcaccgtgacggtgacggaggtgtcaatagtctcgattacgaagtcatcgagaattacgcttatagagaagaacaagctcatcgaggaaagctttatgttggttactacgttgctgtcaaatggttcttctctttactcatcgggatcggtacttgttgttcttcttcttcttcgattattgttggttgcttacttcttcgtagattttccagaatccgatcttgtttttgatttcttcgtaggaactggattagctgctgtgttcatcaatctctctgttgagaatttcgctggatggaaatttgctcttacttttgctattattcagaagtcgtattttgctgggtttattgtttatcttctcatcaatttagtcttagtgttttcttctgcgtatattattactcaatttgctcctgctgctgctggttctggcattcctgagattaagggttatctcaatggtaacatcaagtttccttacttcacagttttatgttttgttttggttgaaattttgtaatccacagtcttctttggattgtgcaggaattgatattcccggcaccttgctctttagaactctcattggaaaggtgagttaaaacttttgaggaattgatggtgtttaggaagttccgttttcatttctgttttgaagacagtgttttatagtttgttatctcatagatatttggaagcattggttctgttgggggtggcttagccttggggaaagaaggtcctcttgtgcatacaggtgcctgcattgcatcgttgcttggtcaggtgagcatctgagttcccttttattctctcctccatcattcctgaggaaactaatatgtatggtttcgttttgatatagggtggatctacgaaatatcatttgaattctagatggccgcaactttttaagagtgatagagatcggcgtgatcttgtaagttccttgatgcttcttgtgaagagagctatctgatttgtttttgtttaagattaggcccaatcctcttgagagaccttatttctttgcctttgcgatgccttgaaaggtcacttgtggatgtgcagctggagttgctgctgcctttagagccccagttggtggagtgttatttgcattagaggaggtcacatcatggtaggttccccgttcctttcctcatgtccagtggctgaaattattctgctctgagaaataaccattttgaggaactttttttaccctcgtctattatttccttagcaactggtgtcacttgacagcaatgtagttatctttaggatgtcctagctagcgtgagtttgggatgctatgctgtctgtccatttaattgaatttgcatgtgctgttgaaggtggagaagtcaacttatgtggcgtgtctttttcacttccgctattgtggctgttgttgtgcgtactgccatgggatggtgcaagagtggaatatgtggacattttggtggaggtggtttcattatatgggatgtatcagagtaaggttctagtttcagtactcacttatatcatgcaaggttaatagtgctagaattgacctggaacttttctttctctcatttagtggtcaagatgactactacttcaaagagctactgccaatggctgtaataggagttatcggagggctacttggtatattttttcttttcctacacttttggttccatttatcttcatctgtctgtttcatttctcatggcattttcctccaggggcattatttaaccaacttacactctatatgacatcttggcgtcggaactctttgcacaagaaaggaaatcgagtgaaggtaatctttgatggacgattacaagaaattcttcatttatattatgtttatcttcttgaagaactattgtctcgttggtggagttaaataactgctataaaatctgaattttcagataattgaagcatgcatcatctcttgtataacttcagctatctcatttgggctgccactcctaagaaaatgcagtccatgccctgaatcagttcctgactctggtattgagtgtccacgacctccaggaatgtatggaaattatgtaaatgtaagacactgttatagagaatctgaatctttgagatctgttgcatattctttaccatgccgatctattatgatgaaattttagccaatttaacgtacatagactttgaaggtttatacctagaaaactttcagactttcctaacaaaactgtcttttaacattgccgcattcatgttgctttgtgtgccaatcatcgcagttcttctgcaagacggataacgaatacaatgatctcgctacaattttcttcaatactcaggtatcttcttctagaataatttcaaaaattttcattttctacttcgctttgttttcaagcctgactgtttcaattgaattgttctgttttttttttattttgacgacaggatgatgctataaggaatttgttcagcgcaaaaacaatgcgagagttcagtgctcagagtctactaacttttctggtatgaaattcttctattttgtttgttcatagtattggtatttatttcttggtaggtttgagtttgattgaatgatgtccatgctagcaatagaataaggaccatactaatatgacttttacattgttctatctataggaatatcttttgacttgtttattcctttaataattaatataatcgtcatttttctttgttttaaatgatgtataggctatgttttacacattagctgtagtgacctttggcactgctgttcccgccggccagtttgttcctggaataatgataggatcaacttatgggcgccttgtaggcatgtttgtggtcaggttttataagaagctcaacattgaggagggaacgtgagtctctttgtgtattgctttgttgatcataccacttcttcttttttttcaaagtttttggttgaacttttggcctttgatacaaaaagtctttgaactttagttatgctttgctgggagctgcttcatttctcggaggctcgatgcggatgactgtatctttatgtgttatcatggttgaaatcacaaataacctgaaacttctgcctcttataatgttggtacttctcatctcaaaggtacgagttacctaccaatatcatattatcttgattcttgaagaaatacgcttgttttaatttgttctgttcttaggccgtcggtgatgctttcaatgagggattatatgaagtacaagcacgcctgaagggcattccgttacttgaatcgagacctaagtatcacatgcgtcaaatgatagcaaaggaagcgtgtcaaagtcagaaggttgatatcatttctgcctcattaaaccactagatggagcttgtgacacgtgcttcttatattatgctatattataacttgttttctttgactttgaaggtaatctctttacctcgagttatcagggtcgcagatgttgcttcaattttgggcagcaataaacataatggatttcctgtaagcattgctttctttgacacagggttgactcgtgattacttagtcctctgtgctgatgttttcatattttgacattctaccaggtaatcgaccacacgagaagtggtgaaacacttgtcatagggttagtccttcggaggtacgtgattgtacatttcaaaaagaattattttaaacgaaatatagcattctgaattttgttcaccgtccagtcacttgcttgttctccttcaatcaaaagtcgatttccaacatagtcctttgccttgtgatccaagtgccaggaatatcaggtaaattaatgttccacattcttctttttttcactctcttttgaaagagtcatattttctgatagataaattgattctgcattctccaggcacagttttagcgagtttgctaaacctgtttcatcgaaagggttatgcatagaagatatacatttaacttcagatgatttagagatgtacatagatcttgctccatttttgaatccgtctccatacgttgttcccgaagacatgtccttgacaaaggtgggcagaagcttcgattatgttttatctgagacaccaatatccatcatcatttgttgagaatttgatttgtttcgattaggtatacaatcttttccggcaacttgggttgcgacatctattcgttgttccccgtccttcccgtgtgataggcttgatcaccagaaaggatttactgattgaggtaagtagatatacacacatcgatctgttgacgaaacccgacatattagtaacagtgatgttgctggtccatttatacaggaaaatggggaatcatcagcagtggaactccaacagtcaactagtgtaaggtctctagcttgcttctaatcttgtgtctaaaaccttgggagtctctcgagtttggtgttatgatcctctaagcaaaaccctcctcctataagactcattcaaaattttgagttctaagtgtctttgctctttgtcttaacctttattattgcccattgttttgcctgcagaggtcggtacagtgagacagcaacgcggatggacgctgcacgaccgcttctagacgatcttttaggttaataaaacagaccaaacatatacaagcagttgaagctggtagctaagatctttagtcgggccaattcttcgtccatacaaggatacaagcttgttccgcatgttgccacccaaatccggtatggaggatatatgatcgtctcttgagatgggattgtgttgttcgctaaccgatctcattctccgttcacagagagtagaaagattatatatgtagagggcttttgattgttgtaattgtgcaatctttgattattttcttggtcactgtaaaataatccagcttttgatatatttacttgattaacttaaaaaccatattgtaaacaagaaagagaaaaccagaatttatcggtcataccgccatggaaaaataaatcatattttaaaaagttgaaaatttggaaatagatgagataattttattattactagatgaatacccacgttacgcgtgagtttgtttcaaaaattgttaaaaaaaaattatgttgatttttcttgttgctaatttttgcttacttttttctttgttattgtgtatttaatcaaattaatcttaggtagttacagtttttatgattagattctttttttacttgaaatatcgatttatacatttttatatataaatatataattatttatatttctaagattctaatatttttttcaccatcatgaatacatacatcaacaagataggatatttttatacaattagatgtagttatgttatttgtgtgatgtgaaactcgcgtaacttgattataaatataatttcttgttttgtgtactctcttgatctaatacttcaattacatcgtgataaactcattattatatactagataaacataaattgaacaagatctcaagaatttttatatgaaaataagaaaaggaaagcaaaaactaaaatgtcatttaattcaacacttttatatattttactattgcatatagctatatatgagaaaagtcgtgtcttaaattcttttgtatgcctaacatctcaaaggctcatcacttgaaaaaatttgcatgtcaatattaccaacttatcggacacaaaaataaaaagagagaacgttatatattgagtcagatatgaacaacaaaacataataatgagaagttcacaaaaaaaaataatgagaaagactcaaagtaaaattactaaattaataagagtttaggtagcaaacaactaaattacaaaaataataaaatggtgaatattgataaaatctttttagtaaaataagaagaatataaagaaagtagtgctttttattaacataattttgtattgtttttttaaattttgaataaatcacttaagagtagaattgatggaggatttaatgctataaagaacttttatttttttcatttaatttggctaatttttaatttaaataatctaaaataacacatgtcattttttttgtgatgatgtgccagtcatatgcaaaaaattgaccaactttcgtatatatgatttagctctttgttttttttaatgttaatcatatacactaaattttttaataaaacttttggttttcgaaataatttttttggtttaaatcataacttttaaaaactttggtttttgagagaactaaaattacgaagcttttttctttttttctattgctacaacttctctaaacttttgtaatgaaagaggtaaacataataattgaatattctcctaatctttagaaaatcaaattgagaaactaaatttgcatctttgttcaacatcacagtagtcatgactcatgagtcatgatgactcatcatactagagtctagcaaatatattcaatattcatatgaaattatactataattaactttgaccatacaagattttatcatttatattatgcaacaaaaaaggaaaatatctgttttattccaaaaagagaaggaaaatatctttgatggaaataaaaaggaaatggggataggttttgttcttgttatatgttttggatataaccaaatccagacgtaataaagccatccatcgatgttaataacaatatataaaaaaacttacatgtaacagctacgaattaaaaaccactaagtgaataactgacattacgacagcaaaatattgaatgtaagaaccccaaaagaggatcaaaaacaatattactgatccaaaatctattgaccaaccaatcataatttcataacaaaatattccatatttagacaacctctttatcttctttttggtttctctatctttctgatctgtataaatatatgaacctatcattgtctcatttttgtgtaaagatttgtgtctgcttcttctctcgctcttctttacaagacagagaaacacagacacaaacaaagatttcttagagagcatagacgttaaaaaatggctgtggttatatcttctaatggtaattccaagtctttcgacgcgaagatgactgtttatgtcttcatctgtgtcattatcgcggctgtaggcggtttgatcttcggttacgacatcggaatctcgggttcgattctcttctctaacgttattttgtatctttttcgcattacttatggattaagaaacagaatctagccctttctttctgatcaagaaatgttaaaaagtacatatacttaaccaaaatttcattatgaaaaataggtggagtaacggcgatggacgatttcttgaaggaatttttcccatctgtgtacgaaaggaagaagcatgcgcatgagaacaactattgcaagtatgacaaccagttcttgcagctcttcacttcctctctatacctagcggctctagtggctagcttctttgcttcggctacatgctctaagctcggacgcagacccacaatgcaactcgcttccatcttcttcttgatcggtgttggccttgccgcgggagctgttaacatatacatgttgatcattggtagaatcttgcttggattcggtgttggctttggtaatcaggtataatgttatatgatctttttttatttcaagtttagtttgtgtttaggctgagatgctacaagatatgaattttcactgaatttttggtctggtttagtttatatgcattttagtttgtatgagatcttgaattttctggtgttcttcaatgactaaacattgtagaatgtgtctgattttcttgtaggcggtaccgcttttcttatcagagattgctcccgcgaggcttcgtggaggtctcaacattgttttccaacttatggttacaattggaatcctaattgctaacatagtcaactacttcacctcctcaattcatccttacggatggagaattgccctcggtggcgcgggaattccggctctcatcctcctctttggatcgcttctcatctgcgaaacacccactagtctcatcgaacggaacaaaaccaaggaaggaaaagaaacactcaagaagatcagaggcgttgaagatgttgatgaggagtatgaatcaatagtccatgcttgcgatatcgcaaggcaggtcaaggacccttacacgaaactgatgaaacccgcgagcaggccgcctttcgtgattggaatgttgctacagtttttccaacagttcactggaatcaacgcgattatgttctacgctccggttttgttccagactgtagggtttggaaatgacgcagctctgctttccgcggttgtcacgggaacgatcaacgttctcagcacgtttgtcgggattttccttgtcgacaaaactggccgaagatttctattgctccaatcttccgttcacatgctcatatgccaggtaacattagttaagttaacttttcttgtgtcacaagcgatcctcctaaactaacaattttctcaaacagttggtcattggaatcatcctagccaaggacctagacgtgacgggtacgctagcacggccacaagccctagtagtggtgatcttcgtgtgtgtttacgtgatgggtttcgcttggtcatggggccctctaggatggctaatccctagtgagaccttccccttggagactcgaacggaagggttcgcattggccgtgtcttgcaacatgttcttcacgttcgtgatcgctcaggccttcctatcgatgctttgcgcgatgaagtcagggatattcttcttcttcagtggttggatcgttgtgatgggacttttcgctttgttcttcgtgccggaaacgaaaggagtctccattgatgacatgagagatagtgtgtggaagctacattggtactggaagaggtttatgctcgaggaagatgagcatgacgttgagaagagaactgattgagcttgttgatcgatcacattctttctctaactttccttagttttttttttgtcatatggggaacaacatacagtaataagagaccaacttgttattcttgtattataatatgctttcttcaggtttggtatcttacataaaaaaagaaaactccagggtcatacaatttttatgtgttttaagtcacttgatacaagataaatattgttcataataaaataaagttgttgttttacagtgggtaaaagtgtcacattattatcaacgattgatccatgtacaatactttctatgttccttaatatttgatttaaaaaaaaaaaacacatgttaagaaaacatattaaaaaatgattctaaatattttgttttttgtgatttatatttgttataattttaaaccaataatatttaactatttattttgaaatttgatattcatcaataataactaattaatattgcttaggaaacctaaaaaatcaatctgttaaaaacatttttttttctttcaaaaaaatcaaataataagaaacagaaggagtaattaacaaattatcacccgaaaatattcggtgctccatttgtttctgattttagttgtggatttcgaattgaaaattttattttattttattatacaacatttgccattttatttccacagaaaaatctgaatactgagagtgagaggtacatggtcatgaactcatgatcacatggttttggtagcacatggaactgcatttcagttctacatgtagttgtaaacatcagaataactacatgtatggctatatgcatgtaaaaccgcagttgtccgtattcacaaacgtaccaatttttaaccgctaaaatagtcgttcaaaatgctttaaaaccgcaatcgcaggcatccataaattctcgcagtcgtgatcgcacgtcagctccgtttaaacatgtcaagccttgagtcgatcattacaataatatctcgtgtaccacgttatgcttaaaaaaattaatcatatcttaaacacttgccttgccacccactacttctagatctcccacaaatccacagaaataatatatatggtacttagaaaaatcataaaaatatcaaataccaaattgaagtctctggcatgagtcggtcactacaataataactaaactgaaatacattttatggctaattgatgcagaacctgaaattaaaaaaaattaaagatacaacaaaccatacctttttgtctttttttttttttaattattttaaagataactcatttattttgaatgtatgtacgcagttttcggttccgtattgtgtattcatagtctaccataaaatttaacatctacctttcccaatggacccaaacgcttcgaattgaacatgggcgttgctttctcttgtgagttgtatctaatataaaatttggataattatgatttcgtcggtgattttgatatactatatctctcgtgtacaacgttttgcttaaaaatttgttcatatcttgaacacttgtgacttgccacccactacttcgagatctcctacaaatccgtagaaatatcgtttcacaatagacttgcatgttacttggaaaaaggattaaaatattaataaccaaatcgaaatctgatactttacacattcgaagtcaaacaaaataataaaaatgaatgtgtaacaaatatatttttttccccacgaagaatccacttttagtattaactaaactcgatcagtaagtaatccgtctatataaatgtggaggcttcccaaaacaaaacaaaacaaaaaagatctcaaaatatggatagtcacaaatggagtctaggtttcacattacttgctttcctcttcatcacttcctcttccgctgagctcatcattaaacaggtttctattttaagcactttttcgatcttttggcttgttaccaaaacatggtttttaaaaattaaaaacaaaatccaggtcacacagggcagaggaatagagtacaacaactcttacagtctcacgtcgaatcttggtacacttattttttttttcttggttaaaacaaaaaaccaattattgattttcttgtatttttgttgttgtaattgatatataggagtgacgacaagagagttgagagacgagcgaccatcaagtaagatagtgacaatcacaagcttctctgtgattaaggacagaggagaaccctatgaatcatctatttttgaggctgccggttacaaatggttaagataatttacactctattcaatttctctctttttttttttttaataactttaattctatcttttgagctaattttgatggaaaacaaaatcaggagattagttttgtacgtgaagggtaatccgaaaggcggtataaataatcatatttcactttacgcgaggatagaagagacagaaactcttccaagagggtgggaagtgaatgttgatctcaaactctttgtccacaatcggaagttaaagaaatatttgtctgttacaggtactttaaaatgtgaaaggagttttactagatctattatctatttataagatatattggccaatgctacttttccttagcaattgtaaatacatgaaccgagttgattgtgttttggatttggattatagatggaacagtgaagcgatacaacgatgcaaaaaaagagtggggattcacacaattgatttctcttccaacattctacaacgcgaacgaagggtaccttgtgcaggacacagcttcttttggtgctgagatcttcatcgttaacccgacagaaaaacaagagaaagtcacattcatatcaaaccctccagacaatgttttcacttggaagatacttcgtttctctaccttggaagataaattctattactctgatgattttcttgttggagaccgatactggttagtgctcttggctagactaaagtctaaattaagctcaaggcttgcaactgttatgtgaatcccgtagtggccaagtataataacgggatttgtttttaatgtatattcaggagactaggatttaacccgaaaggatctggtggaggaagaccacatgcacttccaatcttcctatatgctcaaggccataaggcaaacgcagttgttacaaacacttggggagcggttaatctgcggttaaagaatcaacgaagctccaaccacaaacaattatattgtaagaaaactaaaaaaaaaaggcttaattaactctaggagtgaaaatcatcaatgaatagtaaggatataaattgttttttttttttttctatctttgcagctgcagcttggtacccgattcgaagcgattatggtgtgggagtgaacaatataatattgatgtcagagctaaaagatgcatcaaaagggtatatggtgaatgatgccattatctttgaagctgaaatggttaaggtctctgtgacaaacatagtctccgtttaaatatcactacttctttttcaacaacaaccttacgaataaagtggactttgatgagtttaatttgttatacgacaacgttgttgatgcttgtgatgtaatcgttgtttctgctctccgagttttcgttttactttttttttcatgttttgctatcaatgaaataaaggtataaaactctcttggttttaaagtattttaaagatccatgttagggaaagctggaaggttaaattacaaaaataaactcaaccattggaaaacattttttatagccaaattcaaacagaagtgcaggatcaatagacaaaatgagtttaaagcacgtaaatgacgacatggttatgtttggtgtatatatgtggaagaatggatataattagttatttcagctagaaaatcacagaaagaaccctgatttaagagctctagtggttgatgaaatgtttttgagatattaatagaaagttgctagagtataaccaatgtagtttggtgtagtcacctcctcagattaaggcataaagactttcgcagagtgatgttttaacagggtctagagaagaacatatattcaaaagggaaaggacaacttcaaatccaaagtggaaacactaaaccctctagttcataccaaggtccaaggacggaaatatcttagaagcaatgggtcatgtgcccccggtaaaaaagagagcatattagttgtttgttttaatttattgttatggacaattttacatcctcctatctccgagtaacatgtgaaatcgtcattgaaacagtaaaagtaaagtgaagtaaatccctatcgggaattcaccgagaattcgaagaaaggacaaataaaacatagaagctaattatgaagaaagaaagatcaactcagagaacattgatttggtgatggatgatgataagtgattatatatatatatatatatatatatatatataattttaaaggaaaatggtaggatatttttcttctaattacttatgccaagtctttagattacttttcaattgaaaatgataaaaaaaattcatggggctattacaggatgatgcactttttggggcagaaatttgaaataaggcataatccaaatgggcttatgagattgggcactttcaacaacctggaaagactaaattacccttgaaagaggcatctttgttttcgcgtgagatgttttgttgaggaacggcgtgagagaagctttgtgaagacaatgacattggtagacataagtgtaaaagagagcatcaaatgtgaataaactgtaaatcttgttacagtatggaggttttgagaatttcaaatataaaccctaagaattggaaaacagggaaccccaggagaaagtgacttagacgacatgtgttctatggaggtaagcattttcaaaaatatatacactaaggattgtaattagggaacccaagcaattagggaatagagaacaaacctaagaggagaggagaggaccggagccaagatgaatcttgttacaatgaatcatgagaaattatcattttctcttgttcgctgtatcaattgcagaggcagagcagacggtgttaagcgcgagaaaagcagcgaatcagacggcgttaaacggcgcaactttggcgagaaaagcatcggcggaagaaaataattgtacctgatcagattagttggagagaaatctccaaatatagaaacgagtgagtgaatggtcgggtatatgggcaacgacactagtcaggtaggtggctctaaaatggggaaaaatttagaagatgcttcaacagtagaggaagaaaagaaataaactagaaatcaaataatttagcggaagctttgaggggtgaagttgtaaaagattagaatgtataagtacctaatttggtgagtaatttgagatgttcctaaattcacaaaggcatagagttttttgtgccaatctcataattgatccaacttttcatatgaaacatttacaaagaacatggtaggattattttctaaaaaattcctacccgaataacggaaaattttgaattgctttcaatctcgtaccatatttcttactaacatttatgttgcaaaaaggtaggatatttcctaacctttttcaaaattttcttacaaatttcctattagttcaggtttcgtcaaaaaatcataggttaaaattaggatattttcttgtagtatatatcttattatataaagtatgattttcaaagttactaactcagaagattatgccacttgttgatttgatcgatcttagattgtgacacgtgttagaagaaaatttcttgaaataatcttaaaacaataaaattataattataaggaaataaaaaaaaatggatatgtaaataagatcattataaaaacctataattataaggaaactaaacaatttgaaattttaaataagatacatttataaaacctaagttagtaactcatacgattgtcctatgtgtcaatttatcgatcttagattttgagacatgtaaaacattttttattaattttaaaacaatataataaaatataacaaatttttgaaacaggaacttgtttaaatatatattattattagataactctaaaatatagatgtcagcaaaatacataaaatgttgagatgcatagataaatttataatagaaagaatcaatagtatcaacgatgttagaattaagtacaatcatgtttgagtaagacctttagtacaagttaataatgttcaaagtttaagtcacatagtagtagtaattttgtaaacaaaagataataacttacatgatttaaggataaatctagatagattggataaattgatataagcgttaaaatattaaatattgaaaaaatttgtgtggtttactatttaaaatttaaatataaaacaataatatggagtgagtgtaattagtattttagcttttattttaagatggagtctatagactaaaaatccagtttattttaataaaataaataggttaatttcattgtaaaataatatgtataaaaatgaaatataatttaaaaatatttagataaaatgaataagtatgaattactaaaagaattcaaaaattattaaaaattctatttatttgtcaaatccgcctatttaggagagttttatctagtatatatatacatgtttcctgtaaacttttaaaggaaaatgtttttcgccaaagaagggtattatcaaagtttatcattaagaagggtattatcaaagtttgattatctggatagtgatattgtcttgtgcctggataaaagacaatctacctttcccaaattgtcttgtgtttggactttggataaaagtttggttatcggtgacagtgatattaccattgacactaaatcgatcattgtagtaatatatcgtgtacaatgttttgcttaaaaatataatcatgttctgcaacccaccggtgttcaaaggaaaaaaaatagttttatgccacccattactcccaaaaatccatcgaaatattgttaaataatagactcattctaagtcgaaacaaaaataatatcgtttcccccacctttttaatatattgtaatatctcgtgtacaacgttttgcctaataatataatcatatttcgaaaacttgccacccactacctcgaggtctctcccacaaatctataaaaatattgtttaataatagaaatgggaacttgcaaaaagcattaaaataacaataacatccaaagtcaaacaaaaacaagaaaaaatgatttgtgtaaaaacatatacatatacatatacatatacatatctctcgcttttctgttcatcacttcagctgagtttctcattcaacatgtaacttttttttgaaatatgttgcaaaaacaaattccaacatatttataaaactagtaacattattatttataatttgcaaaataggtcatgaatcccttttttaatcttttttttttttcatttcccctcatgtttaattattaaactacttaatagtataatatttttcaaattttctatttatatacaaaagcctatgtttttttttctataatttgatatgtagtgtctaataaattcaaaaacatttttattcatacatctcattaattgttaagatgtatacaaattgatacatttttattcgtacaacttatttagtatacattagctatgaatatatgaataaaatatgtatattatgtacatttgtatactaaatgtgttgtatgactcttagtatacaaaacaacacaaaaaactttatcaaaaaaaaaaaaaaagctcccagacccgactcccgaggaaacctaagcttcttcttgctatggccttcgtggccgccggcgaggaccctcccttgccagaaccccctgacccgcctgatcctccctccatcttcgcccaaaccttcatacccgatccaccttctacttcttctctctttccaccttcatcgagtctagatctagatctatgttctaccgtttcttcctatggtgttactcctttcgtttttttgcgattctttactgctgtgtgcagtcccttctatcagatctgtacccgttccgtgtctttgcggttctttactgctctatgcagtccatggaaactagcctattcccagatcttgggatatcctctcgtttcaagtggatatgtttcacaggccataacctttgatgtccacgctgcccctcctacctcaactcagagagcctctcctactcgttccatggcccagacacgacaacggtttgttacttctgtaagatggtgtatgtctttgtttctggttttacccctcattcaaaatttcgtagtggtgcgatttaatgctgcagtatgcagtctctttgaactcaatctggccttttgtgctgtttgttttgtttctctttcttggtggcagtttgaaaagaaactaattaatacacctcgcctgatgaatctggttttatcgggtatttggtaccctagtagcttcttatcggagctagttatcttcccaaagttccctcctcagtggagtggtttggatgtccaagagtcgtcggtattgcaaggatcttcctcccgattgatgttcttctctgcatttgatgcagttcttgtaacctcttgtgttacgttggatacagtcttccaagaatctagccagatcgttcttattgttcgttttgccttatgttattcttatgacttctgttgcatatctatctatcctttaaccattgttatatggtctgttttggcttctgttgttgtgttttatgtagttttcttcatgttggttgtaattcctctttctgaggctcctaaaatttagtgaaaacaactattggtttgaaaaaaaaaaaaaaaaaagaatcttagtatacaaaacaaagagtaaaattgtctattttgcaaattgtaaatagtagtgttactagttacataattatgtttccaaaagtaactatatttccaacaaacccttttttaatgtatttttttgatagatatattagtagattttttttaacaatggaaaacgaacaaggttataagggcagatgagcagagtacaactgttcttaaagtctcatggcaaatcttggcacacttgtgttatctgaaatagccagtctttagattttcttgtactttttattttgttgattggagtttgaagagtgttgagagaggagcgacgaggacaataacaaatttctcagtgattaaaggtagcagagaaccctatacaattatgggttccgcattatcctttcgtaacctagattttttttttatatatagttaaactcctagcctaaaactaaaacacagttgatgactaattggtggagaaccattaaaaaaaaaaaaaaaagacagagtagactaacgaaaccacacctttacatttttctatttatctcaccttcctaaataaaaaatatttattttaaacaaaaacacattttctgtacagacgtgggtttcgtaatgtccataagtccatccatagtctaccatataatttaacatctacttctctccagtggacgcaaaagcttcgaattgaatgtgggcgttgcttctctcgtgtctaatataaaatttggataatcatgaattcttcgatgatagtgatataccgttgacactgagtagttcattgcaataagtaagatcttgtttttgctaaaaagattcaatcatattttgaacacttgccacccaccacttccaaaacttccacaaattcatagatatagtaatacacaggttacttgacaaaaggaataaaagtacaatatgatgctttacacattctcagtcaaacaaaaacgataaaatgaatgtgtaagataatattgtttaaaaaagaaaaaaagaacaaaaaaaagataatattgttttcccgacgactaatccactttcagtattttataaaataactgaactcaagttgctcgatcaaacaagtacccttaaatgtctctctgtctatataaatgtacactcttcccaaacaaaaccatatctcaaaatatgaataatcaaaaatggagtataggtttcatatctctcgcttttctcttcatcacttcctcttcagctgagttcatcattcaacaggtatttttgatcttaaagctctttttcaatggattggctttttactaaaagtaggttttaacaatgaaactacaatatataggtcacaaagggcagaggaatagagtacaacagttcttacagtctcgaggagaatcttggtacacttgtgtagttgtgttgtctgaaatcgtctctctttggaatttcttggttaaaaacagaaaccaatttctttattttcttggaacattttttgtgttgataggagtgacaagagagttgagagaagagcgaccatcgagtaagatagtgacaataacaagcttctcagtgattaaaggcagaggagaaccctatgaatcctctgtttttgaggctgctggttacaaatggtaaagatcttacactttatcaactttttttataaaataattaattctattttttttgataacgtaattgggaaaatataatcaggagattggttttgtacgtgaatggtaataaaaacgacggtggaaatgatcatatttccctttacgcaaggatcgaagagacaaactctcttccattaggttgggaagtgaatgttgatctcaaactctttgtccataatgggaagctacacaaatatttgactgttacaggtactttaaaatgtgtagatttcaataataattctagccactgctatttttacttggcatttgtagatttcaaacattagtttcattattacatgaaccaagttgattgtgatttagagttttctttttttttgcataattgtggattgtagatggcttagtgaagcgatataacaatgcgaaaaaagaatggggtttcggacaattgattcctcgatcaacattctacaacgcgaacgaaggttaccttgaccaggacactggttcttttggtgctgagatctttattgttaaaccggctcaacaacaagagaaagttacattcatatcaaaccctccaaacaatgttttcacttggaagatacttcgtttctctaccttggaagataaattctattactccgatgattttctcgttgaagaccgatactggttagtaattttaataaccaaattaatctcaaaatttgcaactgttatgtgaattatgtagtctactaacatttttggttaatgtataattaggagactaggatttaacccgaaaggggatggaggaggaagaccacatgcacttccaatcttcctatttgctcaaggccataaggcaaatgcagttgctacaaacacttggggagcggttaatctgcggttaaagaatcaacgaagtactaaccatagacaaatatattgtaagaaaaataaccaaaaaaaaaagtttatctctaggagagaaaatcatcattgaatgaaactaacagctgatgtgaattggtattttgtttgtggtttatttgcagctgcagcttggtacccgattggaagcggttatggtgtgggagtgaacaatatcatactgttagctgatttaaacgatgcatcaaaaggatatttggtgaatgatgccattatctttgaagctgaaatggttaaggtctctataaccaacatcgtctccgcttaaatatctgcacttctttgtctacgatcaatcaaccttatgaataaaaagatgtttaatttgatgagtttgtaataagaaaacgttaatgtttgtgaattgtgaagttattatttctgttcttctgagtttttttatttcaatgaaaataaaactcttaccggtttaaattgtttgaaatatgttggggagtatggagtgttagttatatgaataaattcgacttatttggagtcagaaagaaactaataatttaatttacataatttcatttttgtaaccgaattcaaacagaagccaaaagaagataagaattgaacaaaaatttaaaagatactaaatatgtgaaaatcgaaatcgtatgatgctgactagtgatgaagatggccaagatcggtcatgttgaatgcggaatggccaaaaaaacacacaatttgcgactcccatataagttgcaaaacggtttatttaggactacttgaagactactaatacaatggtttcaaaatagtcgctaatgtacgaccattttctgacccctaatttttttcatatagaagcgactaatttgggatagaaaattgatgtcgtatatttacaactgaaaagcaacgaagtttacttagtgacatttttatgacgatatttgctaatcctaaatttgagacgaatttgggactaattcaagagtccgagttacgtgacccgtgatgtagcatttctatcaattaattatcgaaccacaatttgcaattaatcaactcaccaagaatacacataattgcttaatctaagctaataaggtgactttgagtgttcctaatcttagtaacaatgcattatcaagcaaaaaatgcaaaacaagataaaagaaagcaagaaacaaaagactaacaagtttcgaaagtaaacaaagcgggaaattaacaaattacttagttatcactaaagacgaattctcgggttaaggtaatcgattagaaatgataaatagatggattctagagcaacaaacaacttctaacaagcaatgatccttaggccatagaacactaaacaagactaatacatttccatgatattaatccttttactaatcaatcaatcatcaacaatttccaaaggcaatcaaatgatcaataagcataaataacaagtctatctagccactaataaccctaatcaacaatttccaaaggtaaggtatgaaaagcacttaaagattttggttcgggaatttcatcgaacaccttccgggcatgaaattcctagtgtctaaatcaacatgatcaaagttgatctagccttaaaagcaatcaataagtaagaatcttaagtaatctagccctaaaatccataacccaacatctaaaccatcctaatctaccctaaccaaagaactctaggagactactcactcatgatcatgatcatacaaaggaattggtttgatctttgtaaagccataatcattagagaatagatgagaaatttaaaagaaatacttgatatagaaacttaagaactcaacattcatacaaaaacctaagataaagaaccttcaagagaagttttgatccctaaacaaaagctcttttttctctaaaactaggttaagagtatttctagtaacaggaaataaaccggatcaacctagaacaaaccgggttttgacccggttaaggaaggcaatcgaccaagcaatagatcacttggtagattcaatatcgtccacaacattaatccttgaccagtagaccacgcaatcgaccactttggtagattcatattcctccgtagctctggtccggaccaatcgaccacccaatcgaccagtttggtagattcgtattcctccgtagctctggtcctgaccaatcgaccacgcaatcgaccagtttggtagattgtcctactagcttctcctctttggccactttgcattcttgtagctcatttgtttgctccatttgctccattttacttccaaaactttaaactccactcatgtacctaagaaaaccaaatgcaaatgcaaatgcaatactatatgccaaaatatgaatgcaaagcaacaaaaactaagagaaaaagaggttttaaaacacccaaaaacactagatatcaactcccccaaacttatttcttgctagtcctcaagcaagaactaagagatagaaaagaaagaggtttgaaggtggggattcatagccacaaaatatcaaacgaaggattcaactcaaagtccttaaagatagttcaaatttgcttgaatcaatcatcatactctttcgtacttctccatactcttcttagtgcatagctcaatttcaaatctccaactattagcaaagactcacaatcaagttgaaacatctctttaacattcatttaagtgtttggcgcggtctcgcaaatggaagataaatcattctcaatcggtcttggtgaaggcttttggaggtggtttcaaaagatttacattttggtgggtttctctaaaaaaaatagtaatgctagacaatcatgaaatccatctaagaccaagaacaatttatgcatacaaagtctagctcttgttgttctacccgtcttagatgtaaactcctatttctacccttcttgcaaactcttttcttcttcttttcaaccccaatcaatagacactttggtctttttgaaccacaatcctcaagatcaatcctttcttgctagtcacctagggaagacttcttcttttgacactttgttcttttctatttcttttctaagtttatctttgttcccaaatacttatagctttgcaagtttcttttctttggggaactagcttgatattaaactttctctttacacttagagatttagagctttcttatttataacttattccctagagactcctataaaaccattgatcacacatttcttttcattcattcttttttcttttcttttttccaaacccaatcccaagtattcaatctaaccacttaaatctttcattcccaacctagtagctagtccaaagatgttccaaaagctagctaaaaacaagagctaaaaccttgtcgttctcaatactttgaagatttcaaaatctatagcattttcatacaagaggcctcactcacaaatagtacataggcttgaaagaaaggttttaaggttaagggtagggaaaaccattttaaaggtgagaatggccattcgggttaacaaaagattggctaaacgaataagataacccgaatgagtctgttagactaccatgagaatacatttaggatccataagcgagaaatcaatatcaaattaagtccaaattcatagagatatttcaaaagtcatgtaagcttcacacaagtagaaattgctttcgagaaacgcaaaagtctaagcatgggttttccattttttccaagatgatcaagcaacgattaactgtgatcaagggctttaagctcaatcctaagcttgaatttctacaaggtaattaaatcattatcccctatgcaaatgcaaatgtacactagatgctactagactcaatcctaaaagagaaaattaatatgcaaacctacatgattttttttggatttttcaaaattttcagattttttttttatttttctcaaaacatagttattgacaatgcaagactcaaagaaagaaaatcaaaacataacacaacattagatggttagtctctcccccaaacttatttcacaccgtctcggtgtaaagataattccggaaaaaagactaacgaaaaacaaagagaaaatgaaagaaaatagtatatacaaaggatagataggaccataccttggccctagttgtgaaccttagggagtgaagtgataggaggagttgtgaaactccttgtagagcccttgaatgcaagtgtgaggacctctttcatcaattcttcaacactttttgaacctttttctttgaactccggtgtgagaatcgctttaaccgatgaaaaagggttggatcgacccttgcacttgactctatactctaaaattccatcattatacctcaaaagtgttagagtcatagaagaggtaggatttggtgaattgtcaagggtgggagggtgggttcttttcatcatcctcttgttcttctcaagaaccatcttagctttacccaactccttctttttagtactttcttcttgcgcatcaaacaaaaagtgtagacattcaccatccaagattttctcatcaaccgtgaaatcctctctattcttcgcattcacaactttgatctcaagttgatccttcaaacttttaggctctttctttgttttcacttcttcattagtgattgttccacaaaactttgtagagaaaggcttgattggatatgagacattaccattcacgtggagaagagtaactctcttgtttgggaagtcgatgttggctcccacggtgttgagaaatggagttcctagaatgagaggaaccttgtgggtgtctttcatctccactatcatgaaatccgttgggactatgcaatcaccaactttgagtggatagtcttcaatcaaaccaagaggagttgttgaagaagcatctccaaacatgatggaggaggtgtggtggttcatatctttaacccctagactctttaccatctcaagtgacatcacattcacgcttgcacccgaatcacataaggcatcatcaagttgtaaatcaccaagtgagcaaggtatggtgaatttacccggatcttcaagcttgataatagattttggttccgtttgtggtgtgattggtgaatcaaaggctctcatgatctcttccactttctctcgattttctagaatggcttgaatgaacttaaagtgaagaggaatttgagacaagttttccacacaaggcaaaggcgctccaactctactcatgttggctttaaaacttgagaaaactttctttttagctttggtaagaactcgcccgggaaacggaagtagaggctcataaggaagaggctcaactcttgatgcctctttcttttcaacactcttggttatcatatcattcccattcgtactcttcttggccttctcatcactagcaaccattaagttctcaacattagaaccatatagaagtttagagatctcttctattgccttttcattctcatcaattctaccatcctctcttgattgtgtatagctcatattttcaaccatatcaaaatcgtttatgaagatagcattgcaaaactccttatgattagtttcagatttaccctttaaagttcccattggatgcttggaagtggatgaggatgggctataaacatggacattcaaacgctctattttggcattgagctcaccataaatgtcatcaaccttggtgtgcattcctttcatttgtgtggcaagatcgattgctcctcttccttgcccttctagaatttgtctaagaagagcgtttgtatccgcttgaggtggaggattcgatgaactcccttggtgttgattgtggtggtaggcttgaggttttggttggaagttcctttggggttgaggttgatagttgggttgttgtgtgaaaccgggaggctttaagggtgggtagctttgatcttgtgggttctccacattattgctcctatatgaaaggttgggatgattcctatagttgaggttgaatttgttgtagccttgtccaatagcatagttgacctcctcttgtcgctctacacaaccttccatgtgttcttgatacccttggtagacatcactctcggatacaaaatggatcggtttttgattagcaagaatcatcttatctatcttttcattcaaagctttgatctctttgcggtgtagattactcatctcattactttctcttggagtgcggtcataatcttcaccataattaccatcactttgagctagattctctaccaaagacaaaccatcatcaatatcttggcccaagaagtttgcattgcttgccgtgtccaacaacatgcgaaatttagggagaactcctctatacaaggtacttagtatagactctttagagaaaccatgatgaggacattgcattttgtatcctttgaacctttcccaagcttcacaaaaacttttattactcctttgagtgaagctagatatctcatttctcaaccttgccgttcttgttgtggagaaaaactttaagaggaatgctcttttgcattggtccaagaggtgatggagccttgaggtagattcttctcccaaatacgagctcggtctccaagagaaaatgggaagagtctaagtttgaatgcatcttccgagatcccattgattttcaccgtgctacacaacatatcaaattggtctagatgatccaaagggtcctccattgataaacaatgaaacttagagctttgaaccatgttgatgaggcttgatttaatctcaaagttgttgttctcaaccggaggagcttgaataccgtttctatttccgcggatgtttggctcatcaaaggctccaattggttgatgagctcttggttgatgttgtggcatatgaccacccccattagcttggccatttccattatggcccccaacttcgggttcattcatgacgcctaaccgagcaaggtgttcaagtcgttctctttttcttcttgctctagcgttttctctttcaaaccggcgaatgtcgttaatctcttctactaagtttgctcggccgtaacttcgtaggttcatacacctttaagacaagagcaaagatcaagtataaaggattagtaactaaagtaaaaggcttagtctcaagcaaatatgaaatcctaatggctaataactattgcaaaccggcaacggcgccaaattgatgtagcatttctatcaattaattatcgaaccacaatttgcaattaatcaactcaccaagaatacacacaattgcttaatctaagctaataaggtgactttgagtgttcctaatcttagtaacaatgcattatcaagcaaacaatgcaaaacaagataaaagaaagcaagaaacaaaagactaacaagtttcgaaagtaaacaaagcgggaaattaacaaattacttagtgataactaaagacgaattctcaggttaaggtaatcgattagaaatgataaagagatggattatggagcaacaaacaacttctaacaagcaatgatccttaggccatggaacactaaacaagactaatacatttccatgatattaatccttttactaatcaatcaatcatcaacaatttccaaaggcaatcaaatgatcaataagcataaataacaagtctatctagccactaatcaccctaatcaacaatttccaaaggtaaagtatgaaaagcacttaaagattttggttcgggaatttcatcgaacatcttccgggcatcaaatcaacatgatcaaggttgatctagccttaaaagcaaccaataagtaagaatcttaagtaatctagccctaaaatccataacccaacatctaaaccatcctaatctaccctaaccaaagaactctaggagactactcactcatgatcatgatcatacaaaggaattggtttgatctttgtaaagccataatcattagagaatagatgagaaatttaaaagaaatacttgatatagaaacttaagaactcaacattcatacaaaaacctaagataaagaaccttcaagagaagttttgatccctaaacaaaagctctttttctctaaaactaggttaagagtatttctagtaatgagaaaataaaccggatcaacccggaacaaaccgggttttgaccctgttaaggaaggcaatcgaccaagcaatagatcacttggtagattcaatatcgtccgcaacattaatccttgaccagtagaccacgcaatcgaccactttggtagattcatattcttccgtagctctggtccggaccaatcgaccacccaatcgaccagtttggtagattcgtattcctccgtagctctgctcctgaccaatcgaccagtttggtagattgtcctactagcttctcctctttggccactttgcattcttgtagctcatttgtttgctccatttgctccattttacttccaaaactttaaactccactcatgtacctaagaaaaccaaatgcaaatgcaatactatatgccaaaatatgaatgcaaagcaacaaaaactaagagaaaaagaggttttaaaacacccaaaaacactagatatcaacccgttacagactaggatgatagtggaaaaagtgttttgtgtgttgaaaaaataatattggtccccatatagtcgtacataatgtttttttttagtgggagtagtctcttcaattgagttttagagttctaaattggtttgatgatttgattattattaaaaattaactatttttaggaattcacgaactgaattgagcaatatatttttagccaatgaaatttaatattagaacacatattgttagtttaacaaatttgtttgataatgcgaatttgactaatattacaaatgaaagtttagtaattaagtagtcaattttaatgactaatttcttgaaagaggagtaatctaatattgtgttcatgttcgaaagcggtgtttggttgttgaattttttatttcatagtttcgttaatcatcaatctttgaattattttgtggtttaatgtgttttatcatataattttaatcgtttagtttctttcataattttaattttaagcataaaaactaacaaacatttaatttgtccgtttaggtaaaaacgactctcgcaaatctttagaatatcattgatttatgtgatctactctgtatgtactattttacagttaagtctataagataataattactcgagcaatcaaccggaattaggtcgcatcaaatgtaacaacaccagatactacctaagacgttttgcttaacatttaaatcacattttgaatattacgctgctcacgtctaatctgatagttgacacattccaagtcaaataaaagttataataatgaatgtgcataaatattcataatttttccaccgtgaatccactttcagtattatatagtagtaactaaactcgtttaatagataactcgtgtctctattaaacaggtctttctattattcatttttttttttcttaatcacattttcaatcgattagctttttactaaaagtagtttttaacaatgtgccaaaagacgctgtcgtaccctaaaataaaattgaatgaaaataagaaagaagctgaaacagattaactgttatcaaccaattaatctgtcactcactttagaatttctttattgtttcttattcagtttttaacattgtctctaaattaaggaattttaattgtttgtttttttcaaaaaacaaaattaaaaaaaattgaaatgttaaaaagaaaaaaatatctcaagaaaaacttttgaatacttttgtaatagttttttcttaagataaaaaagatatatatttctctaggtcccagagggcagaggaactcaaaacgaatcttggtatatatttttttttgtcgtacgaatcttggtatatttattgtatgaaatcattttttttaatattttcttggttaaatattgaaactcatttcttgtttctcctggaaaattccgttgataggactgacaagagtcctgagagaagagcgaccatcgagtaagatagtgacaataaccagcttctccttgattaagggcaaatatgtaaagggtatagagatcaacacaacacagagaattgcttataagtatattcttattgataacaaactgtttacaaatgttatgtcggagattacttgatctattctacccaagagatcaaaaccgagtaagaatatctaagcctaattctcttatctgtttcttatcactgtcacgtgaagactaagagaattacacactcaccttcaagcttttgcaatgctctgaagatttcaatcgtatcgaaatattctagagtgcacgaagcgcctcacactaaaccctagagtacttatacttactctccataatcttaaacctacgatctccgaaaatctcgttttaaggaatcttttttgttttcttcaagcttattccttcctaaatcttcgagatgatatcttccatatcttcttgatatttcttgtctttgacaccacgccaagtcagcttccatctttggctctccacatcattcgccttagcttaccacgtttgctctcgcatccatgtccgcaaatcaagcgtctgatgaaactcgatgcagcttcctgaaatttatcaatgctctgatcgccatcagctgattgattgactctgcatcttcaatatgaaccctatgaatcctctgcttttgacgctgctggttacaaatggtaaagatcttacactcttacacttttttcaaaaactttttcataatttttgagtttattttaattggaaacaaaaattaggatatttatgctatttgtgaatggtaatcaaaacgaccgaatcttttccaagaggttgggaagtcaatgttgatctcaaactcatttataacccgaaccagtctatttatataaatgtattggctaatgtattcacttgaaaaatacttcgtttctccaccttggaagataagttttgatactctgacgaatttctcgttggagaccgatactggttggcacttcctcatcaaattatatcaaaacctgttgctcaaaatgtttcctaaaggaggaaaacatatttctgttaataacagtttttagttaatctataatcaggagattaggatttaacccgaaagggtatcaaggaggaagaccacgtgcactttcaatctttctttatgttcaagccttcaaggctataaggcaaacacagttgttacaaacacttgggagtggttaatttgcgtttaaagaaacaacgaagctccaaccaaatactatatagtaaaaaaaccaaggaacaatataaagtaaaatgttaatctccaagagacaaaataactagtttggtttgttccttttttttaggcgaagcttggtgtgcgattggaaacggtactggtatggatagggaacactatcatattgttagaagatttaaaaaattcatcaaaaggatatttggtgaatgatgccattatctttgaagctgaacttgttaaggtctttgtgaccaacattgtttctgcttagagatctctaattctttgtcagcaatcaaacaaccttatgaataaagtttgtaataagaagaagttgataaagtttgtgttgtaatctatattttgttggttttgttttctgtttattatagattacatagattatgctttaactagtttaactgtttatgctttaagggcccaaaatctattagtttctcttcatctagggtgaacatcttaggaaaaagtgttgaactgtggtagtaacatcctgagcgtcttttggaccaagtctatttaaccgatttaaaactagaaacacagctgacaaaaataaaaagtaaatttaagtagattttgacttaaaatttgtcatttaatggacactaaaaaaaacaaaaatcatatatgtgaaagttgaccaactctcttcatatgggtgacacatcatcacacaagaaaatgacatgtgtcttttaacattgattaaattaaaaatcagtaaaattaattgagagaaaatcaaagtctcatattgtgttaaatcctccattaatttatttcttaaatgatttttttcaaaataaaaaataaaattataaaattatttatttaaatatatcaattactacttttattttacttttattattttctattttgtaaaaatttaatggtcaatggtcatcactctataatgactaaatatttatttgtgttattttaccttgattttttattattattacattctcgttcatatcttatcatatgaaattttgtcttttcatttttgtatctttaggtaagttcgtaacattgacattcaacattttcaagtaatagacttttgagacgttagacatactacgaaattaaaaacaaatcaatttgtcttatatggctatatgcaatagcataaaatctaaaaagtgttactaaaataactctttaatttttgcttccttttttttttcatacgaaaactcttgaaatcaaaatatcttatattcttgttgtatgttcatgataatgaacaaattttataatcttggatataaaaataatcagattatacatgaaaatatatagaaattgatatttagagtcaaaaatgaatctaaaatgtaagtacataagatgagtctaattttactaagtataaaataacaaacaaaaaataaacataaattagcgacaaacataattaacatatttttatctaaacaattttcaaaacaaacccacgcgtaccgtgagaattcatctagtatatagataaaattatatagaccaatctactcaattgatactatcaaaatctcacaaatatattacttgaatatatatttttaatttttattaaatttcaaataatagacaaaaaaaaactcaaagccaatcacatatagacacatgtgaaagttatctctctaaaaaattcttaaaaattcaaaaccaaaaccaactatcatctctcccaattatcatctttttaatatatcaaaaatatctttgaaaactttcctttacccatgttttaaacctttctcatctatatatatacatttttacaaataaatcctcaagttgaaacttatttacaagaaataccatttggcattaattattattaataaattaatattcctaactactagcattttcttatctgatatatatctccatcaattcttaatacgtcaaaaaaaatcttaggacactattaatattatactttattaaaagataaataatgtagttatttaaagtttattaaaaaaaattagaatatttcacagaaaaaacgttatagtatatttataatatgtaaatctataaaaattaaataaccattgaaagaaaacttttaaattaatttaaattataaatcttttaataaaagtattattaaaacaaaaattaaaaataatatttaattttatgaaatgggattagatggtaggacggatttagaatatcataatatatgaactttataacaattaaataaccatttgaaagaaaacttttaaattgtgttgaattatatatcttttaaattaaaatattatttaaacaaaaataacaaaaataatgtttaatttcactaaacggagttagatgatataaggggtttgggtcgatagtattatgagatggtataccacaagtgaaatacattagatatgtttaatttcactaaacaggattagatggtaggacagatttggatcaatagtaatacgagacggtatacgacggatgaaatcctagatatatcattaaaaataaaattatattatctaaatactaaaacaaacaaacaatattaacaaaacaaatataattagaacttaaatatttagttataatttagattttaacttattgttcctatatttttaaacagtaaaaattaaacatagtaattatacactaaaaaatatatagatataagagttgtacgtttagaaaatacaaaacattaaatcatatttatttttaatctacaaaacaaattaatttttatttttaaaaaatataattatgcggtacaccgcgggttaaaatctagtatatattcaaaagccttcaaattgaacacgagctttgttcttgtatctagggctggaaaaatagtctgactcgaagatccaaactaaacccggctcaaaatattcgatattaattcgatttcgtatattaaaactatctgaatgggatctagaaacttgaaattctgagtgtccaatataattctgattcgaatttacccaaaaaaatcctaacatgttcaatctttagtattttaaattgttttgatagttttattaccgatatttttggttaattatgatacttttaaacaaattttaaatatttttaccggatttttcgagtaatcggataaatagtttcaattatttaggtagttttaaccaaactcaaaacatgattataaatctaaaatattaaaatctttaaaatatctaaaataactaaaatatctgaactatttagttatattttatcaatccactactgcgataatatctcgtgtacttcgagaactctcactaatccacagaaatattgttttatataacagtagtcattagtcaatagctagacatgcatggtttggtacacgtacttggaaaaagcataaaataaacaattataaccaaatcgaaatctgatatacattcaattttaaacaaaaaaaaaaatggaaatctgatactgtaaaattgaatatgtgtgtattattattggttccacgacgagtctactttcagtattttattaccaaagcaaaccaaaacggatctcaaaaaatggatactgaaaaatggagtcaaggtattaagtgatcctttgtccaaaaaaaaaaaaaaaaaaaaggtattaagtgatccacttttgttcttagtggttctgtccctgccttttgctcttgtatctagagctgaaataaaattcggacctgaacatcctaaccgaattcagattaatttttttgattagaattctaatccgaattttaaaagtattcgaacggattttagaaccggaacttcgaatatccaaaaagcccggatttaaaacagattccgaatatatactcgaaaaaatctgaatattcctaagatattaactctttttacctggttttatggatactattgattaattaaaatacttttaatagtataacttttaaccgggattttcgagtaattcgaattattttacatagtttaaataattatacgtagttttaaccgaatcttaactataattataaatctatatcaattattttttaatcaaaataattaaaataccaatcaatataactaaaacacttaaaataaacaattttaaaaaacaatttttattatatctatcaaattatattaaaaaattcaagcaaataatttttttagattatccaaacttcgaatacaaaaatctgaatagaaccagaatttgatctgatatattttgagttatggtagaaatcttaatcagaaaactaaaaaatccttacaatacctaaacgctcagacctataaattttgatttatctacatttcggtgttggtgatatactgacaccgagtcgttaacagcaataatattttgtgtactttgagatcgctcacaaatccacagaaatattgttttataatagacgtacttggaagatgcataaaatagacaatacaaccaaatcaaatttgatactttacacattcaaagtcaaacaaaaacagtgaaattgaatgtgtacatgtattattattgcttccacgaggagtccacgttcggtattttatatttgttactaaactcgatcaataagtaatcaaaagtgtctctgtttatataaatggaaagcgttaccaaaacaaaacaaaaccagatctcaaaaaatggacactcaaaaatggagtataggtttcatatctctcgcttttctcttcatcacttcctcttccgctgagctcctcattaaacaggtttctttttaagcactttttctatcgatatgtttttatttttactacaaaactagtttgtaaaaatgaataaaactaatagttttgctaatattaggccacagaaggcagaggaatagaatacaacagttctcacagttcacgaatggtacgtacacttattttctttctttagattttattggttaaaacttaaaactgtgataaccattttcttgaactctttttattgataggagtgacaagagtgtggagggatgaccgaccatcggataagattctttcgataaccagcttctcaataattaggacgagacctgaaccctatgaatcctctgtttttgaggctgttggttacaaatggtaaagatcttagtatatcttacactctatcccattttttttttgttaattatatcttttgagctaattatgatgcaaataaataaatcaggagattggttttgtacgtgaatggtaatgaaaaggacggtggaaaagatcatgtttcactttacgcgaagatcgtagagacagaatctcttccagtaggatgggaagtgaatgttgatctcaaactctttgtctacaatggaaagctaaacaaatatttgattgttacaggtactttaaactgtgaatggatttttattagatccatatatatattctagcggaaaacggtctatttctccacgataagtatgacatcataacagatagagcccaggctttaacctcgtgctagatatgatgtcatattctagctctatatgttatgatgtcatattctagccattgctattttaagaaagtagacttcaaatactagtctcattagtaaatgaaccgatagttgattgtgatttgccttttttttttttgcataattgtggattgtagatggtacagtgaaacgatacaacaatgcgacaaaagagttgggttacggacaacttattcctcaatcaacattctacgacgggaacgatgggtaccgtgagcaggacactggtacatttggtgctgagatctacatcgttaaaccagcccaacaaaaagagaaagtcacattcatatcaaaccctccagacaatgttttcacttggaagatacttcatttctctaccttggaagataaagtctatcagtctaacgagtttcttgttggagaccgatactggttagtcattttcgtaaccggatattttagaccaaagtccaaattaatcttaaaagcttgttactgttatgtgactttcacagtattattgtataatcaggaaattaggattaaacccgaaaggaggcttagtcccaatcttcctatatgctcaaggctttaaggcaaacgcagttgttacaaccacttatgcagcgactaatctgcggttaaagaatcaacgaagcagcaaccacgtaacaacatatagtaagaaaactaacctaagaataaaagtttatctccaggagaaaaaaacaacaatgaatgaaactaggaatagctaaagtaaatttgtttatgctgctctgttttttctttgcagctgcatattggtacctgattccaagcggattaggtttgggagtgaacactataccgttatcagatgtaaaagatgcatcgaaaggatatgtggtgaatgattccattatcattgaagttgaaatgcttacggtctcggtgacgaacattgtatccgcttaaagatctctacttctttaccatagttcaaacaaccttatgaagaaagagatgtttgtaataagacaacgttaatgtttgtgatgtagtcgttacttcggtttttccgagttttctcttttctgttttgttatcaatgaaaataaaactctccgggttttaaattttataaaaaatgttgaggacgtgaagtgttaaaaatcgacttatctggagtcagaaataaacttataatttactttacataatttgttttgtagccaaattcaaacataacccaaaagaaaaaagtattgaatgtttttttttgtagccacattctatttatgcgaccgttgcccgttggagtaagggtcatgccctgatctacaattttcaatgtacaacgttttgaacgctttaatttgaccactataattcattactctcattaagttaaccatatttatctcgaaagttcatcaaccaatatatgtttcattccacttctaacatttcttatttctaccacttttaccacctctattttaagcatttcgcattagtaccggttgatattatatatgtatcaagtttaacaagattctaactcaaaaataagtggcaacaaacaagtgaggaaatgcatatttactatatatttgtgttgaattacctttacttttaagattggttatatacccatttgtgtttattagattttaaaatcaattaccaaataagttattatgagttcatttgaaaagttatgagctgccaactcaagactatgtgaatggattgtcatataagtatgttatgggcttgattggtataactaattaattatagtagagttgtagcaattacgagcaaagcaagtaagttgatgaagttgtaatctgttatatattaggttgatgatatatatataaataagttgttgctgaaattgaccaagttttgatcaggtggtcatgaacgatggtgaatgaagatgaatgatggtcaatgagagataattgagtgatgatagctcaaacctctggatattggaatgcaaggtttatccgtctacgtacgtggatatgaacattgattttgactactcggtcatgatccacagttatcgattggtagattcggccttccgcgatgatcggtatgtctatggtcattaattagaggtaagggtggtgtgatgtgagtccttacttcatagcttcatatgattggattgttaagcttaacaatccaatcatatttaatattttgaacattatgctacccacatcgaatctgatacttgacacattccaagtcaaatacaaaaataataataagtgaatgtgcatatatatatattctaccatgaatccactttcagtattatatagtagtaacttaacttgttcaataagtaactttgtctatatatatgtaaaagtcttaccaatgtctagctcatctaagaaaatggatgatcagaaatggagtctggttttcatatgtcttgctttactcttcaccacttcctcttcagctgagtttctcattcaacaggtacagttttgtttgtttttttccctttttcgaaacacttttttgattgattggcttattactaaaagtagctttttacaaaatccaggtcacagggggcagaggagcagagtacaacagttcttacagtctcaaggagaattttggtacacttgttgttatgaaatcttctttctttagatttcttggtttacaaaaaaaaaaaaaaaaaaaaaaaactgaaacccacttcttggaactttttgtgttgacaggagggacaagagtgttgagagatgagcgaccatcgagtaagattctgacaataacaaacttctctgtgattaagggcagagtagaaccctatgaatcctctgtttttgaggctgctggttacaaatggtaaagatcttacactctttccactttttattcaattttttatatatttttcttgagttttttttttttttgatgaaaaataaataaatcaggagattggttttgtacgtgaatggtaatccaaacgacagtggaaatgatcatatttcactttacgtgaggatcgaagagacagaatatcttccaagagggtgggaagtgaatgttgatctcaaactctttatccacaatgggaagctaaacaaatatttggctatttcaggtacttaaaatggatttttactagagccattttatttttgccaagactaatttttgcaatttctgtaaatattaggatctcatatcgaaagttgattgtgattaggagttttttttttttttgcataattgtggattgtagatggaacattgaagttatacaacgatgcgaaaagagagtggggattcggacaacttattcctcacgtaacattctacaacacgtatgggtacattgagcaggacattggttcttttggtgctgagatcttcatcgttaaaccggctcaacaacaagagaaagtcacattcatatcaaaccctccaaccaatgttttcacttggaagatacttcatttctctatcttggaagacaagttctattactctgacgattttctcgttgaagaccgatactggttagtaattttggtaaccggatctctttgaccgaagtccaaattaatctcaaagtttgcaactgctatgtgaattccacggtgaccaagtataataacggtttttggttgatgataatcaggagactaggatttaaccctaaaggagatggaggaggaagaccatatgcacttccaatctttctatttgctcaaggccataaggcaaacgcagttgctacaaacacttggggagcggctaatctgcggctaaagaatcaacgaagcaccaaccacagacaaatatatagtaagataactaacaaaaaaaaaaatttatctcgaggggagaaaatcatcaataaatgaaagtagcagctgatgtaaattggtttatgtttgtttttttctttgcagctgcagcttggtacccgattggaagcggttatggtgtgggagtgaacaatatcatattgttagcagatttaaacgatgcatcgcaaggatatttggtgaataatgccattatctttgaagctgcaatggttaaggtttcagtgaccaacatcgtctcttcttaaatatcttcacttctttgtcaacgatcaaacaaccttatgaataaaaagatgtttaatttgatgagtttgtaataagacaatgttaatgtttgtgatgttgtcgtttctcttttctgttttgttatcaatgaaaatgaaactctccaggtatattttttttgaaaaatgtttggggaaatcgactaaccaaaagataaaaataatcaaaaatctagattgaacttaggaaaaagtacagtaaaatcctgtgcgttattggacattttttaaacctcaaccatatggaaattaggttgaatggttattgattaaaggattttgtcaattaatactgtattcctctaagtccacaacatacaatctaatggtttccgtttatacatcttagtctcttagagcaaatccagtgattagtttctaaataaagtttctatgtattttttattaataaatttggatagttttaaaatttagagattttttaaagtttttgaaaattttatggtccattggtggaatccttaagtgagtttctaaaacaaaaaaaaattatggtccatttgatgaatcgatttggggaacaaaatctagttcgatcatcatccggttggttgaaacactcgtttaggtggatgatttttcatgatttcatgaacaaatcactagatcttcagcgtcgattccaatcgtctttggtgtctccgtaggcgaagaagaagaagagagagaagaagaaaaaaaataaacgcgtgtggggtttgttttttggttttgtcattcagtttacccaataaaataaggccacgtatgagtttctattgggtcgcgaaaaccccaattttaggaacgatcctaaatggattcagctgtttttctattatctgggcccatttttacatagaaacccataggcctgggcataatacccggaaccgaatacccgaaccgaaaaacccaaaaaataatcgaaccgaacccgaacccgattttagaattacccgaatgggtcctagatctcctacccaaaaaaacccgaacccaacccgaaccgaatctaatacccgtgggtacccgaatacaaatgtaaacctaaaaatatttgttatatatatatatttgtaatacctcaaacacccaaaattaaaattataaatccgaatataatatattttttagtaattcatatacatttggatatatttgggataaaaataaccaatgttatagttttcttttaaataatttaagtattttggttatatttggataaaagaataaccaaaatatttacgggtaatcgggtatttctgatagatttgggtagatatgagtaaaacatccgaacccgacccgaacccgaaaatattttgggtatttttggttactttttacatttttactaaaataaccgaactgaaaccgaaccgaaattttaaaatacccgaatgattctcaatctcctacccgaatagatccgatacccgaaaaaagaaccaaacccgaaaatattttgggtatttttggttactttttacatttttactaaaataaccgaactgaaaccgaaccgaaattttaaaatacccgaatgattctcaatctcctacccgaatagatccgatacccgaaaaaagaaccaaacccgaacgggtacccaaatgcctacgcctagaacccatctaagaaatctactaaaaacttttactggacttgttcttaggggctgaatccacaataaactaggaatgcacaaaattttctaagttaaacaaataaaggatgagttttaaactaacaagatttgtgaaataaaaacaagaaaacctaaaatgctaatggaaaatatgaacaaaggcaattgaccaatttaaataagtgtctaaggtacgcaattacccaacataatacaagaacaaaatgaatgataaaaggagcaatctagaaaagtcaacaaaagagccaacaaaggttattgacttgagtgatcaaatgcgaatctaagatgctaatacaatcaatcccttgctaatcatttggctttagatcactaatctagactaatccatttctttggtactaatctttcaactaaccatcaacaatcaaatgatcaatgagcattatatccaagcctaactaaccagctacaatcctaatcattaatttgcattggataggaatttgaatgctaattaaacactcgctaagttcttttggaaattgatctaatgccttccggacgtgaaacttcctattatctagattaccttaatcaagactaatttaagctatttagctctaagaacatctaaagagtatgatctattaagattatgccctaagcatcttaaattcatcaacaactctatctaatccaaaagccatgaaaatccaggagttgtaactaatccatgaagattcatgttagaagaagagtaaaaaagatagatataagagatggaatttagagaaatacttatataaatgcaagaatcacaagaatttagagttgataacaaatataaattaagaaaagtaggcttagatagctctcatttcactctaattaagtttagagtattatagaaaaggaaaataaactggtcgacccaaaacaaatcggatcaaacccagattgtttcttggatcttgactgtttaagtgactcgtagtagtgaaaaaacatcgatatggatgcatattatggatgaaggctagattttgacatatagtgcaatccgtagcggggtaaagaattgatatgcttggctattacggacgcagaaaactttgtcctccaatttccttgatcaattcttaattcttttatggtccaaaactcatctttaggctctacttttcatactttcactctaaacatctaacaataataaatttgatgcaaatgcaatcttaaaaaatttaaaatgctatgaatattcaaaaataaagacaaaacaagttttaaaatcatcaaaaagacaagatatcagtcatatagcaaatcactaagctattggtcaagcatctttaccacatctctgcatattttatatattacgtactaatcgccatttagtgtcttcgtaagacccaatgtacacccttaattaattatatagcaaacaaaaatacaactcacaggcaacccaaactgtataataacaattcttcaataccacttctttaactttgtctttttaacaactaatcaaattttaattacttatttataaaattacaaaacttaaaactaaattatgtgagtcaattaattcagatatgctaattttcttctccatcataaatttgcctagaatataagataaaatttactatatataatatagaaattgcataaaataattagaaatgaattaattcattagataattggtacttttgttgaaactaaattctataaaaactactatttaaactctatatttagtctctcttacaaactctatatttagtcattatgttaaaatattatattacatatacaatatatatagactttatttctttgtttggttgaatcacctaatacaactattaactacaatttatggtctaaatcaatattttcatttacgaatagttatcaaattttgctataaataagtaagtaacacagatgcaacgaccattgaaacacatcaataacaaaagaaaacaaatcctctcaaagaagaagtagtgatgcatatcacaaaaccacacgccgccatgttttccagtcccggaatgggccatgtcctcccggtgatcgagctagctaagcgtctctccgctaaccacggcttccacgtcaccgtcttcgtccttgaaactgacgcagcctccgttcagtccaagctccttaactcaaccggtgttgacatcgtcaaccttccatcgcccgacatttctggcttggtagaccccaacgcccatgtggtgaccaagatcggagtcattatgcgtgaagctgttccaaccctccgatccaagatcgttgccatgcatcaaaacccaacggctctgatcattgacttgtttggcacagatgcgttatgtcttgcagcggagttaaacatgttgacttatgtctttatcgcttccaacgcgcgttatctcggagtttcgatatattatccaactttggacgaagttatcaaagaagagcacacagtgcaacgaaaaccgctcactataccggggtgtgaaccggttagatttgaagatattatggatgcatatctggttccggacgaaccggtgtaccacgatttggttcgtcactgtctggcctacccaaaagcggatggaatcttggtgaatacatgggaagagatggagcccaaatcattaaagtcccttcaagacccgaaacttttgggccgggtcgctcgtgtaccggtttatccggttggtccgttatgcagaccgatacaatcatccacgaccgatcacccggtttttgattggttaaacaaacaaccaaacgagtcggttctctacatttccttcgggagtggtggttctctaacggctcaacagttaaccgaattggcgtgggggctcgaggagagccagcaacggtttatatgggtggttcgaccgcccgttgacggctcgtcttgcagtgattatttctcggctaaaggcggtgtaaccaaagacaacacgccagagtatctaccagaagggttcgtgactcgtacttgcgatagaggtttcatgatcccatcatgggcaccgcaagctgaaatcctagcccatcaggccgttggtgggtttttaacacattgtggttggagctcgacgttggaaagcgtcctttgcggcgttccaatgatagcgtggccgcttttcgccgagcagaatatgaacgcggcgttgcttagcgatgaactgggaatctctgttagagtggatgatccaaaggaggcgatttctaggtcgaagattgaggcgatggtgaggaaggttatggctgaggacgaaggtgaagagatgagaaggaaagtgaagaagttgagagacacggcggagatgtcacttagtattcacggtggtggttcggcgcatgagtcgctttgcagagtcacgaaggagtgtcaacggtttttggaatgtgtcggggacttgggacgtggtgcttagtaatggttactgttttctagctctttagtggttgaatttacttgtcgtttcttaatgtgtatttttcattgtaatagaataatcgatgttttgtaatatattaatgtatttgatatttctcaactaatttccattgtaatattgaataatcggtgtgttgtagagagacaaattattctcctggttatattaaataataagaataaaacgacgtttagatgattcattacttttaatataatcttcacaatttaacactcaagtcgacaacgatattatcatcagactaatcatatgtttaagtcacatctacctgaacctgaccttctagatgaaatcataaaccagtaataaaattaccaaaaaaaacggtgctttgtcactaattgctttttattgaagcacaaaaccatgaagaaacagaaaaaagtacatcgtctcgatgtgacatttcctctacctcgctgatttttctgttacactgaaagcatattttaggaatcaaatcaattaaatagataatttaatacgatgacaggttccaaacatttcataaataaaaaggaacatataccaaattcacttgaattattatgcactgtccacgatatatatagacaaatttaggagttttatatcagatgccaattgcataatttgcagcatatatattttttaactaaattaaagatttaatccgtattgaaacgatatcgtatccctttaaagatcctttcttatttattatagatccaacaactttatgaataaaaaaatacgtgttttatgagtgtttaatgtttgtgatatatcgttatttatgttcttctgcatttatgatccaacaactttatgaataaaactttgcatttttattatttattatttttgaaaaatgttaggaaattagagtgttaaatttctatggactaagtcgacattgttagagacatgttaggaaattagagtgttaattttcttatggattaagtcagcatagttagaaacatagagtcagaaataaacatataatttcatttacaaaatttcggctacaaaatttcagttttgtagcagacttgacatgttgtaataaaaaagagtcatatttttcacaataatgtttttctaataatgcttcacgtctctttatcacaatttttatttttataaattttgatatgttgttaaaaaaatatttttggaaagttgtctttatttatttttattttttgtttgatatttatttttttaaagattttataaatatttttcccagcgattttgcggatgatcagaagcgtaatatatgaaaattagaatgaataacaaatttatttgatatatatttttgaaatcttcttcaatgtaggtagagtttttaatgttatgtgaatataatctacaaaagattaattaaataaataatgatatatatatatatatacaacgtatatatatatttaagttgttgaaattgaccaagcgttgatcatgtggtcatgaatgatggttaatgaagataaatgatggtttatgagagatggtcaatgagagataatcggaaggtactccctatcttggaatacaatgttaattagtttagtatgtggatatgatcattaatttgactaaacgatcatgatccaaaattatcaattggtacgttcatgttatagaggcaaggatggtgtggtgtgagtcctcccatcatccttaatcaactagctactcaacgaactgcttaatagcatcccttgagcttctttcgaagcttcgcgtcgttagttgatgcgggacaagaggcacaatatagtccttcagattgtcgactttacgtgtattgtaaccacacctgataccaccctttacataatgtaagaggtttgacttaaacattttaacaatattttgaacattatgctgctcacgtctaatctgatacttgacacattccaagtcgaccaaaagtaataataatgaatgtgtagaaatatacatatttttccaccatatggatccactttcagtattatatagtagtaacgaaactcattaaataagtaactctgtttctatatatatgtaatgcatttcccaaaaaattgaaaaaccatatgagaaaatggattatcagaaatggagtctaggtttcatatctcttgtttttctcttgatcacttcatcttcggctgagctcctcattaaacaggtccttttctttttctgttcttttatatatatatatctaaatcacatttcaattgattgacgttttactaaaagtagctttctaagaactaagaagagattaagaaaaaatgttcgccaaaagacttttccaaaccctctaaaaaagaatctcgaaactcgaatgaattactcttataaaccaattaatttttcacttaatgttgaattgtcttcatcgtctcctattcagattctaatagaatacttaactttcctaattttaggaattttacttgtgtttgatttttgttaaaaaaaagattctacaccgcactctaagataagagtgaaatttatagcctcgccactagaaaaaacaaaattagagatgttaaaaaaggaaaacaaatatcccaagaaaaacttctgaactagtatatagatgtcatttttctaatagttttctttacatagctaaaagtgttatctctgatctataaatatagctaaatattaaggaaccgattggtaacgaccgtaagttttggctttagaaattttgattttaaaaatctgagttgtagaaaatttggctgtaaagactttggccgtataaactttggctattaaaatttgattggtaaaacaaagttatataagctgtgactgttattttttttttattatatataataaactaagaaataaatttatgtaacaatgtaattttattaatgatttttaaaaatatatattattcattttttttttaaaaccaaactgcattatgaagttggattaactaaaactcaaattgttaatttataaaatatttattttaaagaaatgacaaatgtttagaaataaaataagaaaaaaaatattctaacgagatacatttatttatattttttgtttcatgccgagacttaatatccaaatacattactaaaaagtgggataaatttaataaatcattataatatatcttgtactacatgttcaaactaaacggttttctgaaaactgttttgaatgtataagtttgacttatcaaaatatcaataaatttattaatgatgaagcatataataaaataattaaatgacatctaattcttctacaccaatttattagtggtgatgatgaaaaaaaaaaaaagatataaaattgatataattaatttatcaaacacgttttgtgaaaaaaatatattaacttgtagagagtttttaattatgttaaagaaaagtttaaaaaaaaaacctaagcaaaaaaaaagaaggctttaattaataaatccaattatgtttggtattaatatgttccaacttgtacagctcctttcaatcaaaatttgtttttcacctatgaaaaaaataatccaggtcacagagggcagaggaatagagtacaacaattcttatagtctcaagacgaatcttggtatacttattgtatgaaatcattttcttttagattttcttagttaaaaactgaaactcatttcgttgataggactgacaagggtattgagagaagagcgaccatcgagtaagatagtgacaataacaagcttctccgtgattaagggcagatctgaagcctttgaatcctctacttttgaggctgctggttacaaatggtaaattaaacatcatagtctctttcacttaactcgaaaactttttcataagcttgagtttattttgattggaaacaaaaaatcaggagatttatgttgttcgtgaatggtaatcaaaacgaccccgatggtggacatgaaaatatggcactttacgtggggatcaaagagaccgaatcttttccaagaggctgggaagtcaatgttgatctcaaactctttgtccacaatgagaagctacacaagtacttgactgtttcaggtagtttacaatgtttatataatttttataactaggaccattctatttttatacatccaccgaaacatctacttgttggagatttgaaatataaacatatttgatagtgatttggataattgtggattgcagatggaacagtgaagcggtacgaagctgcgaaaacatattggggattcggaaacttgatccctcgtacaacattgcttgacccaaacgaaggttacatcttgcatgataccttatcttttggtgctgagatatccatcgttaatccagccgaaaaacaagagaaaatcacattcatatcaaaccctccggacaatgtcttcacttggaagatacttcgtttctccaccttggaaaataagttctattactctgacgaatttctcgttggagaccgatactggttagtagtttctaatcaaattatatcaaaacaattgctcaaaaatgtcgtaaaagaggaaaacatatttttggtaataacagttttgagtgaatatgtaatcaggagattaggatttaacccgaaagggtatcaaggagaaagaccacgtgcactttcaatctttctatatgctcaaggctataaggcaaacgcagttattacaaacacttggggatcggttaatctgcagttaaagaatcaacgaagctccaaccacattcaactatatagtaagaaaactatcaaagaataaaagtaaaatgttaatatccagaagacatattaagtgaaaaaaatataatttggtttgttcctttttctctctctttttcaggtgaagcttggtgtgcgattcgaagcggttatggtattgaagggaacagtatcatattgttagaagatttacaaaattcatcaaaaggatatttggtgaatgatgcaattatctttgaagctgaacttgttaaggtctctgtgaccaatattgtttccgcttagagatctctaattctttgtcagcgattaaacaaccttatgaataaagagacaaagcttgtaattttttcaaccagatctattaaaccgtttaaacctcaaccatatggatcgttggcagggtggtccaacaaaaatgatggcacaaatcaaaattttatccgtattatctcataactctggttaaagatgaccaaaagaatataacggaatggtttaacaatactctcattaagtactaattggttttagtgcacatttttattgttgaaccatctctacattttttaatcattggaaaaagaactatatggaaaatataagtatacataacaaaaacttatatgcagtaattccaatatacatatatgtaatcctagttaagaagcaaaatttgtaaaggccaaagagactaggagagtcaccacggccacgatttgagccgtcaccatactcgggagagaagcagcaaggctaggagaagggccagggactccggctgcaggaatagtagtcgagggaggagaagaggaggaggaagttggtggatcagagagtggcgtggaggaggcagggagaaggacgtgaaggtcgagcttctgaccggcgaggcaatggccaggaacgccgcaaaagaagaaatggtggccgtggttggtgagtgtgattgagtcgttgccggtggtgaaagtagagattggctttgaggtgttgcaacttctatacattgggtgcgtcactctcattacgttgtggaattgtgggttgtattcgaacactatcaaaatcaaattagtttacgttttactcatgttttcataaaggtaacaacaattttaaacatgtgcataccatgagaaaaaaatagagagcatatataaaccaaagaaaaatcataacatattttggcccaaaaactcaatcatagtttttatttcaaaatttatcaatcatgattcataagttaagaacctctctaaactaattaatataatcactttagcagatgtgacacttgatttcgtattaatcctataaatttaatttgtgacttaaaagtctcaatgattagggcgtgagtggtactctttactttacacctaaagcttacgcacttaagaattatgaatgctagagggggtccactttccgacaaaattaagtattacagtcaagatcttctcattttaatttagcttgtattgtacaatgatgtaagaaaattcaggaactcacagacagtatcaccaatgtggaaagttttggtagaagcccatagcttgtagtctacgttggctatggttgtccatcctgctgagtcgccgactttgtacacggccgcttcactcagtcgtagcatcaccacgatacacgctaaagccgccactataatggctgccatcggtcaacaaactttctctgacacacgcttcttcttcttctttggtaaagagccccacaaggttttctcctttagtttctctctttcttattatgtgtgtgtatatatacaaggaggtatgtgaatgtgagtggtggtgcgtatgtattaggaggtcacttgatctttattggttagttggctaatttggagaaaggagtgtctaaaaagcaaaatactgacaaagattgtttactttacttgtttaccttttattagtgttggatttaatgtctaagactgacttggaaaattggaagaatgtataaaaaaataaaaatgtcgatataattgagaaagaataatggaggaaagaaattaaatgatgatttttttccttaaaactttataaaatgttaaataaatcttgacatgatattttttaaaagacatgaatgacttagaaatctcacatgaagtttagtttgggatataataatccaatttataaaaaaatactatggttaattcattttgaaaactcataaattagtcggtttttaaacaaaaggagaaaaaagtgattcttgttatatgttgtcaagtgttcacatggtttaaagtttggaaggcttgtaaggaaagaatggtgcgagttagttggtctgctaattttgaatcatcttttaattttagtacttcgcagttactcttcctcctacatcttggtaccatgatttctttaatctaagtaatatatttgtgataaatacctttttttgggtaaacttttataacaacattttatgcaatttgatcactgctggttttagtagagagtagactgtataacttcaaaactagtctatatttttaagcaatttgagaccaacaaaaataattatacagtccattataggcccataacaaacctatatttggcccattaacataggctaccatcatttttaagagaaaatcgacaatgcaaatttagagtttgacatatacatgtcacacttgtagaaaattggaactcagggatgacattaagaaccacaacaaagcaaaaaaaaaaacttcacttattcacaaacgcagttcaaacttaaagtaacgaaatttagtacactgtatagaattgaaaactgtatttcccttctctactttggtgtgtttaccacctcttgttcactctcttctgcttctactttggttagggactcttaaaccactttaaagccgtgttgaaggatcaaagccattagatttaccattactcttctcaccattcacgaactcgtgatcattatgatcatccatgaacctagcccagaaccaatgcttcttccaaactctctcagtcatctcctcgataggaatattcttagtctccggaagtaggaacatcacaaagacagacataatcaaaacccatgcagaaaagaagatgaatatcccaaacttgaaatggcaaagcatagagaggaaagcttgagcgataatgaacgtgaagagcaagttaacgcagaccgttacactttgtcccgcggaacgtgtctctagagggaatgtctcactagggattaaccacccgagcggtccccaagaccaggcgaaagcagcgacgtatgtgcagatcattaccacgactagaattgcgaaacctttggagagatttgtagaagtgtctgttactttgacgccaaggataatggcgattacgacttgagagaagaacatttggacaccagcttctaggagaagaactcggcgaccgactttgtcaacggagtagattgagactaaagttgagaggacgttgactgctccggtcaccactgctgagtaaagtgaagcgtcactaccaaaccctaatgtgctgaacagaacaggcgcgtagaacataatcgcgttgattccagtacattgctggaaaatctgcaaattgcacaccaaaaaaaaaaagattagctttaaactttgaaactgaactctatggaatcaaaatttatggaaacttgacaaacaatttagggttattgctcctaaaatgaacacaatggaatcaaaattatggaaacttgacaaacaatttagggttattgctcctaaaatgaacacaatggaattaaaattatggaaacttgacaaacaattagggttattgctcctaaaatgaccacaatggaatcaaattttagggtttctagatcctaaacgaaaaacaaaatcacttcagtcaaactctccaaatcggagataaacttttccgattaccaattacgagagaacagagaagtggtagtactaacctgtaaagcgacggcgatgacgagctgaggacggtttctacgttgaagaaggtttctaaaagggtgtttaacttctttagcaagtcgactagcttcaaggagatcagcgaactctggttcaacattatcggtccctcgaatacgacgaagaacagctttaccttcatcgagacgacctctttcgactaaactgtttggtgtctctgtcaccaataaagctccgaccgttagaagaagcgcgggaattcccgccaaacctaacgataacctccatccccaacctcctttaatcctgcgaacatttcaaaatttatttagtgggccagtttttaactccgttatgggcctacacgtaagcccattaattacaggtgacagatcatcataacgcattaaaagtcaatgccggagaaaattttgtttgcgactatataagacgtaggcatgtggatagaatttgccgaaagcacggaagaaaattatgtttgcgacttatatgataaagttttttctttgttgttttgttcaaatctattcataaagttaaatgcttttttttttggtaattggatatgaatgatttttgaaaaaggtgaaaataaatttaaataaacacggaagacagccaaaaagtttgacaaaaacgatcagaaaattatgaatactttttaggtagtacatgtaactaaatctttttttttcttacaataaatttaaggttgtgtgaagtgaaagagacaattcatgtggatattttttcaagtgtcatgttaaagcaaattttctaaaattatgaccaccatatattaatttggattttattttgtcaaaaaaatctcaaaccctaagtttattttccacacattttttcagattatcaaataaaatatagaagaaaagtattagggaagagatatttacttggcggtcccatagttgacaagattggcgaagaggataccaatagtgacgttaagctgaaagagaatattaagaccaccacggatcctagtaggtgcaatctccgacaagaacaacggaacggcttgattagcgaacccaactccacaaccaagcaatatcctgcctgcaataagcatggctaggtcttgagcccccgcgttgagagccacacctatgatgaagaaaacgccggctatgagcatagttagcctccttccgagcgttcttgtcgtgtatgaagcaaagaacgttgcggttagaccggctaagtataaagatgatgtgaaaagttgtagtccttggttgtcgtatttgcagtagttgctgtctttgtcggcgccagctactactttccgataaaccacgggaaaaaacttttcgagaaagtccggcatcgatgtcactccgcctgcgtatagccatttcaatgatggaaaattatttttgttgttactatttttaccgttaaaccctataggatattatactcataaatttattaatttattcatgttgatgtagcccatgttcaaattcaacatcgagcatgtgtgttgtaagaaaataacaaaaagaagaactaaaacctatatgacactacttttgtcaatatactaactaaaacaaggacggtctagatctttagctgccaaacttttgtaagctaagattttttttgattattttcttactttaaccaatattaattaacatcgagctagttactgaaatttcattttgattaccaaagaagttaggtattaggtgaaatagttctaccaaagaagttattggcggtagttgaaaacatgagcaagtcctatttaaaatcgttttttgagaaaacttgcactaacaaaaacttatgtatctttaaaataaaaacttcttctacgttttgtataatataagataaaaggattgtattatacatatagaaaaataactaagggatgttaatattcttaccggagacaccgacgtcgtaaccaaacatgaggccgccggtagcagccatgatgcaagatatgatgactattggagttatctttgcctcaaactctactccgttcgccgaagtcgcaaatcctcctccggtcatcctgaatatctcttagaagctaaagtttaaaagttattttctctcaaggagttaaacagaaacacttaagttaaagagaccattgggggtgtttacttcattatatagagaagttgaggtagtgaagcaaaaatagatgttatctgcagccaatgagattcttgcacgtctctttttatgttcacatgctactgagtcatcaagtcattggtcaacaaacgttttcttctaaactctttctgctttatgtggcgtctccttaagtccttatagttgaatatacaatttgcccatcatcatataagtcttctctttcttgttatagtattatcctcgaatattatatttatttttatgttaaattataagattctcctttcttattagagagattgttacattttctcatatcgctgtcaatgactcaatgtgttgtgaaaatcttgcaaccgaagcaaaatatctcgaaatgtattataccttttagaatatgaacgatttgggccgtgtgttcatacaaaatagccaacgtcatgttacttgtgaattttatcttactaattctgtcctttgtattgtctaaatttattgatgttatgtataagtgttacgttatatgccatatctagtcccatatacttttaacaccgtaagcaatattcaacattttatttcagaatcatattgagatgaaacaattattgtgagtactagaccgacaccaatcgaacccaccaacctccctaattaagaatatggatccaaatctttaaaatcgttataatatataaccatatttgctcaccactcgattcaattattgtttactctcgttctaatacgattatggaacaaaatatctacaactagtcgaagccaattttttaaatttatatgtgttgttttgtcatatggttttctcagttggtgtcacgttatttgtgtatatctaccaaatagtcacttttgtatagttcatgggtccatatctttaaaagacaataaccatatatgtttttggttctgataagactaataaccaaatatgctcactgctactcagttattgtttacgcgttgaaaagttgcaatgcaacaacaacaacaagtaaatatctacctttaatataattgactttccaatatatttaggtttttgatttttgatgtatgatttttcattcttttgtggttttggtaattgaagtttttcctatacactgatatatcaatattaaagtaggacaacacatgcaaattaaaaattgaatattaattgttgaaatattgtaccacggatataatgtgtttagacttgtaagtaaactatatccacttgacatacatgtaaaattaattacgtaacaaaatattcctgcttggaccaaaaaagtgtgtattttacttttcaaacatcattatcctgttaagagttggagtcgactaatacgattcagattccacaaatatcaatgagagaaacgtaataaaacgtgacgataattaataggaaaagagaaaaaaaatacgtcaagtcgttaacaagaaaaaggcttgttttattattattctgttttcaacgagagcaataacaataataaaatatataaacaataaatatctataaagttattgttattatcctgttaacaaaaactaaaataaaaatatagctctgtaagtacgttgctccaagaaacgaaactacatcccattatttcagcattccagtattattttcgtagattttatatatatatatatatatatgttggtaaaatactaaagatttttgcttctaattgtggtgaaaattttaaatagtacggcgattttcataattttttactttctttttattgtactcattcggctgatttgatcagtttcggtagaaataaaccgaagtattataaagtaaacttttcccgattcaggtatcgcctacagtttttactatcacaggtttgggttacaacgatttccataattttctgaactgagcaagccataagtgaatattagctgataaatataaaatggggaaaaaaccctaaaaacaccccatatatttttaatttgcccgtttaatacctcggttatttaatttgcccgaacaatacctaggtttatttcttttcgctttaaaatctttcgtttagtttttgtttggaaaaaccagcttctcgggttaacgactgttaacttcgttaacggagtgtctaaccgaggttaatacttaaccccacgtgtttatttcgatctaatcaaagacactgttacccttttggcattctcccccaaatcgatttcgattccaaaccctaaaattctctctttgatttcgaaaccctaaaattctctctttgatttcgaaaccccaaatcgatttcgatgtgtgtcgtcgtttaactggttgcgttgtggtcggtaattgatttcaacgagtctgctaagtcacgatgaggtatgtaatcgaatcgattcttagggttagaattgggggaaatcgatttctttgttcgtcgggatcgatttctgggttgtcgggattgagaatgggaagatttctggatcgattactggatttgtcgggttagatttctgagtttagagtaacagtttctatgtttgtcgggttcgatttctaggttaagggttttgtcgggtttgatttctgggtttttagagttctaggtttgtgtcatttgaacttaatccccttattctttgttgtttttgcagtggtttcgattgtttgaagctgcatataaagtatggaggagatgtctcaattcgcgatgagtcgtttgcctacattggaggatttgagaagagggatatgctcattgatccagatctgatgacgtggtctatcttcgccgatttcccagcagagaatggagtatctgctcccgtgaaaaaagtttggtacaagcttgcacacgaaagctttgaatcagtaagagctataggcgaggatagagatagtgggattaggcagctgtgcagtgaagcgttgattggtggagaagtagacgtttatattgagcaaggtgtgtctgaaccaacaccgtttcctatgtctcagcatggtgaagaggctgttgttgaagagatggaagagtctgatgcagaggttgaaggagataaaactggggaagaagacagaggtaaagatgatgatgttgatcctgtagcagaatgtgagggagatgatcctcggtttagggccttttatgaagagataaatgaagaggataataaccaccaagatgcaggggaagcagctggtcagggaattcctgaagctgatgaaggacatgtaacgggtcaagaggctggagttgatgaaggacatgtaacgggtcaagaggctggtcaagaggctggtcaagaggctggtcaagagggtattgatgaagaagagtttgaggatcaatgcatggatacagagcgacctgatgctgcgttggatacagatgaggagtgggatgctttagaccgtgaagaaagagaaattgcaagagctaaattcaccaaagataagccaccttatctatggcttaagcagcagtttaataatggtgaagagtttaaggatcagcttttgaggtatgtcttgaagactaactatgatgtgaagttatgcaaatggggtcagaaacagctgatggctatatgcagccatgaaaactgtcaatggaagatttattgttttgtggataagagggtagggaaatggacagtgaaaacttatgtggatgcacataagcatgcgatcagtggaaaagcgaggatgctgaaacaaggtgtgattgccagattattcagagatgaagcaagaaggaggccaaccttgacttaggttgacattaaggatgagataatgatgaggtatacgatttcagtgtctaagtggatatgcaggaaagcaagaaggatggcgtttgacatggttattgaaacacagagacagcaatttgcgaagttgtgggattatgaaggtgagcttcagaggtctaacaagcacacacacacagagattgtgacaattcctagagctgatggtaagcaacaatttgacaagttctatatctgttttgagaagcttagaactacatggaagagttgttgtcggccgattataggattagatggtgcttttctgaaatgggaattgaagggtgagattcttgcagcagttggtagggatgcagacaataggatttatcctattgcttgggcaatagtaagagtagaagataatgaagcttgggcttggtttgttgaaaaactgaaggaggatttggatttgggcgttagagctggtttcactgtgatatctgataagcaaaaagggttaatcaatgcagtggctgatttactacctcaagcagagcataggcattgtgctagacacgtttatgctaattggaagaaggtgtatggagattactgccatgaaagctacttttgggctattgcttacagtgcaacagaaggggactactcatacaacatggatgcgctgagatcatatgatccagatgcatgtgatgatttgctgaagacggatccaaccacgtggtgcagagccttcttcagtacacactctagctgtgaggatgtaagcaataatctctctgagagtttcaacagaacgattagggaagcaaggaagctcccagtggtaaatatgcttgaggaagtcaggagaatctctatgaagcgtatttctaagttgtgtgacaagacagccaagtgtgaaacaaggtttccacccaaaataatgcagattcttgaaggcaaccgcaagtcatctaagtattgtcaagttctcaaaagtggagagaacaaatttgagatattagagggtagtggctactactcagtcgatctcttgactagaacatgtggttgtaggcagtgggagctgacaggcattccttgtcctcatgcaatatatgttatcacagagcacaaccgcgacccggaagagtaagactttaatctctttctcttctcttttaccaatctatgttattatgtgattgtgttttctgaattggagtttgcttgccatttagctatgtggataggctcttagaaacacaggtctggaaagctacatacaaggacaacatagaacctatgaatggagaaagattatggaagagaagaggcaagggacgaattgaagtccctgataagagagggaagcgagggagacctaagaagtttgcaaggattaaggagcctggagaatcatcaactaatccaacaaagcttacaagagaaggtaaaactgtgacatgtagcaattgtaagcaaattggtcacaataagggatcctgcaaaaatccaactgtgcaattagctcctccacgcaaaaggggtagaccaagaaagtgtgttgtaagtattcttaaccattacctatcttactatcatttgcaatattatagcattaataattctgggttttgtataggataatgatgatccatggagcatccacaatgcaccaagaagatggagggcagctcaaagccagtccacaccacctgttgctcaaagccaatccactccacctgttgctcagagtcaacccacacagaatccgcagcattcaagtgctccagctgctaatccaagtggtagaggccgagctcgtggacatcctcctggagttaaaaatggtcaaggcaagggtaaaggcaagggacgtggtaaagtcactgatgaatctccgagacctcctgtgttttttatgtccccttggactgataaggtcttcgatgtttggagacctgagaggaaataggatagatttaagttctcttttgtgttcttattgactttgtaggatgttatttatgtaggatgatgtgtatgattggtaggatcccgattttttttgggtgggatctagaccttactctgatttttcggctcttttgactcaatgaaagtaggatattaccattgatttaagagttttacaacaacaacacagcaaacaacaaagaacttctaaaacaactagcattagaacatccataaaacaatgcaaagaacttcctagcatccataactccctattacaaagcctacttctttcccattcccagacacattgcaatgacaacagtgaaacatccccaagacaacacaatcaactgcctaagcactttttccctctcattcgcacccataacttcaaattcaagctgcttcttctcctcctcaagctgcttcttctcctcctcaagctgcttcttctccttctcaagcttcttcttctcctcttcaagcttattcttctcttccttgtgcttcttcatatcctcgttagtagcagaccctgacccactcggtaactattctttcattgacctcaaagactctttcagttgacgaatctcatctcgagcctccaataaactctctttttgccaaccaaatggcttctcctcatctgcccaattgatgaagccatgagtcccacatctgaaaaattttctacccggattttcatttgtccatgactttgtaactgtcgttgccctaccacaattgcaaagaggactcagctacggctaattgaattcgcatcagaccctgaactttggctcatcatttttggaaataagaagagttcttgtaaagaagagctaatagaactagggtttataataacaaatcgatttgggggttttcgttaagggtaacagtgtctttatattgggcgaataaaacacgtggggttaagtattaacctcagttagacacaccgttaacgaagttaacagtcgttaacccgagaagctgatttttccaaacaaaaactaaacgaaagattttaaagcgaaaagaaataaacctaggtattgttcggacaaattaaataaccgaagtattaaacgggcaaattaaaaatatatgaggtttttttagagttttttcccatataaaatgtataagaaaacgatagtatatgattaaaatagtattatctactgctaataaaagaaacaatttgaggcttctcaagtcatcctcatcatcattccaaaaatcattttagagatgccacatcatattttcttttaaatactctctctaaatgcaatgtcaccaaattattaaaaaaaaatttagaaaacaaaaaataaataatgttttaataaatattactagaaaaaataagtgttgatttttttacttcaaaaacaaaagcaaattaaatgcttaaaataaaatattatttttttcttggatttcaattaaaatggtttaaactaacaaaactaaataaaagaaacttaatatttttataatttatttctgagatcacaaagtccaatttttcaatgacagtttttataaaatttaggtaatataaattattagttgacaaaaaagaaggtaatgtaattcattattttaattaaaaaatcaaaaaatcaaatttacgttaattacaaataactaattttgaaaatattaacgaatctttatacataataagaactattaactttttttatttaataaatgattagtatatatgcagaattgaacaatatgctaccaatctaataatacaaaattagcttttacaaataaattttacaaattatccacccattgagtttaatacgtttactatacataattccaactaatgaactaaacccaacaaaagaaaatccaataattattcaaaacaaaacctcaaagaaatgaaaaaataaaaaagtcttgtgaaaacaaacccatttattttgagttaagaaaaactatttatattacaatcatctttaataaaataaaataaaaataaaaggtgattcagtttcattttaaataacacaaatagatagtatataaaaatataagtaattcaaactaattttctatttagatatagcaaatttaaaaaaaaatatatgaactaaaaacaatacaaaaaacagaaataaaattttaaaataaatttgggcgtagcccgtatttcctctagtttactgtaaaattagatcaagatcaacataactaaactttcaattttcatttaactagcgaagtttaaaggttttcagtaacaaaaccaacccgtataaataaattcggaccgagtcaacctgaataataacccaaaactctaaataacagatccgtacgtctgaaatgcaattaatggtgttcaaacaaaaacacaatttgacactaaccggtcaactaaagatccagttgaagtacatacttgatgatattcaaacaaaaacgacacaaactaaaaaagtctctagtgccagaaatttcaaaaagacaataacaactagcactctaaaaaccaacaaagtgactacgaaaattcaaaaaagctaatattccaaaacaaacaaaaaaaaaccaccctcgaaaatcttatctcaccaagtcaaactgcagaattaaaagatatgtcaagggaagataatagccaaaagagtgcaaccattaaacaagtgaaaacagagattgagttatgctgagaccaaagtgtttctcccttcgcttagtcgggaagaatttgttcgttgtctgcatctccttctgtctcaatggtaggctttgaaggtccagatccaggagcttgcttcttcttgattccactcactatatcatcgatccttagaagcatacacgctgcttctatagccgtcttgaaagtttgcgccttcacattgtacgaatcccatatctggaaaattgttaaaagcttttagtcaactctctgagtcacattggtttcatgttgtgagaatcaaccaaggttatgtgatttaatccttaccttgctctctttcatatcagctattgcaccagtgttcccgtcaataccagtccatgcgttttcaccatttgcatgctgcaccaaaaccgacaattgaagcattgagaaaagagttggtatatacttaaacaacgggcaagagatggcagttggggttcattagtacaggacagtaccttcccttgcaatgcagtcatagtacggatcacgttaaccccacagttttgagccagggtacgtggaatagcctcgaaagcaatggcagctgcttcataaggccactgtttaaataagattcagaccaacaaaagaacatttatcagcgaccgtgggaacagcatactcgttttagaggctcgatatagatttgacacaaaatcacacaactttaggcaaggaaacaaaatgtaataaaagcaaaaccgaccttttctatgccttcaattgttgcactcttctgttttaatgtggcagaaacggttagctctgtggctcctccaccaggaactagctttgggtttttgataatgtttcttgcaacagacatggcatcctgtagggacaatgtttcaggcatataaggttatgaatgattaagaaatacagatttgtaaataacaccaacgaacctgtaaatttctttccacttcattgatgaaatctttacttggtccccttaagagtacagtacaggctttgggttctttgcaatcaacaatgaaagaaaagaaatcatctccaattttcttgacctcaaacaagccagccccagtaccgatatcagactcctgcagttcgtcgggcctgttcacaattactgctccacaagccttggcgattctgttgttgtcagtttttctcaaccttcggattgcacttaccccagctttactgaaatagtgacaggccaagtcactaagacccttctctgtgataaccaaatcaggcttgaactttagtatttgaacgcaaatgttctcgatatattcctcttccaacttcaacaacacttcccagtcctcttctctaaccaactcagcattggtttgattttcacctttcttgtactcaagaggacagtcaagaagaataatccgtgggttgacaatctttcttttcattttaccaggagcaacaacatctttgttaaacataactcctttaagaacctcagagtcctcgaactgaccaccaggaactttctcaaccttgatgtactttttaatgtctacctccctcaaaccttgtccaagatcaacaccaacagtagtagtggcatcaatagccaaatcctaaaacagtacataaagtcatataaaatcatgtgagtaccaacgacaatcaaacttgtagaacttcatactacaagtatttcaacaatcgaaaaccaccaaaagaattgaagaaagcagtcatcaaattcaagttatttcatggttactcatcttacatttaaaaagtcacttcaagatgtatgctgtatctatacctacttgtctagacatatccaatatatattaaggagcaataaaacctggactggtaatgcataagtaagaagctactgtaattacggtacttaccgcaataagatctccaaattggctagtgaactttgtccctatgcagctcttgactaatcctagcacttgtgaacctgcaactcacacattcttccatcagtacaaacgtgaaagaaaaactaacttcagaaaccaaagtagctgaaggtcaactccaaatgaacaaatacaaggtagaaatggacttacggtcattgatatcaattgacatagcaattttgtcaagaacagcaatagaatcttcgagagccttgatgtaagctgcagagaagaatgcattcgttaagatgaaaacgacatgtgtaacatgacaacaataagcaattcatagtgccagcatacctcggcatatgactgtgggatggtaattcttctcaagaaacgcttctgcaacgtgaagcatttcaccagctgttggcaaaaagcaaacaaaaagaggacttcaagaacccatgattataaacagagatcatgatgttgaactgaatactgcagcacccataatatccttaagtaatttgtttgtgctttagttaaaaatacattaaaactggtccaaaccaagccattgacaaactatttgttagcaaaaaagaatgttcgtacctagaacaataacagacgttgtcccatcaccaacttcttcatcttgcgtacggctcaactcaatcattgactgcaatcaccagagtcaaaaatggataagtaaaacaattttaacaagaacaatagatagagaaaggtcagaagtaaaaccttagctgcaggatgagcgacatctagctcacgaagaatagcattcccatcattagtaacaacaatccctgtaaagatccaagaaacaaagaggggtaagatatgatgataacacacagattaagaaaaattaaaggtagacagaaaaaaaaaaaaaacaagacaaacagaacccaaatattgatttagggtttatataaaactaacaccgaaactgaagaacaatagcttcaacaaagaacgagtacataagaaaaacatttccaaagctaaaaacactaaacctaattccctcactacagagatctactacccacatacagagatatgaaaagcctaaaaaaaagaggaagtgtttagaaaaagacctccaccagcatcaagaagcatcttcaacatagaacgaggacccaatgttgtacgaatgatatcagcaacagcctgtaccacaaaaacaacgatgatctgaaaccagaggagagaagcaacaagcatcacagagaaaaagagccatagaaaaggattaatttaccttggaagcttggatattaccatgatgaaccttacttccagattcacgcttcaacgaatcgcctaaaccattttcacaaaaggagttaatctcgttaccaaaaaactaatatcgatttagaggaaatgagatctggaggaagatggagatactcactcagaacgagtaccggtgcgtgcatatttgcgatctgaggttttcacagtgaagaagaagcttagagagacacggcgagtgattttcaaagagcggcaagtggaagatcctactgccttctccgatttctttcatcctctctcgtgcttttcattttaggttgagaagcccatccctaaggcccattaactaatatttcacacattgggcctttttgtaagatcaaaacaaagtaatagtatttttatatccggaagattaggtaaagatgcgtgagaacgggagaattgttaacctaatttgttaagagggaaaaaatacaaaaaatacttcatttatttttaatttgtccgtttaatacatgcgttatttaatttacctgtttaatatttaagttaatttttatgtttattgaaaaccttttttttttttttaattttagcaaaatcagacatccgagttaacgggcgttaacagtggtaacgaaatcgctaactgtagttaaaacttaaccatataatgtttactatttatatacaatttgttttctaataattatgaacatattattttagtcgagtggttatgagagagattaccatcatcatcgattcaaaatcgattatcatctccaaaattttttttgattttttttcttttttttttaacaaaaaggcaaaatcgaagtcagccatctctttcacttcaacaggctttgcacttgtgtgttgcttcacttctttctccaaaggatattgcaccaaaatcaatcaccaaccaaaagtcccaaatgttagaccaattaatacaacatagatttgtgataatcgatcttatttgttatcaacagatgcaattaatggtaacataatctttctataagctatcaacgttactaacaatgaaaaacaaagtctggatttttcaacgcaaaatatcagcaaaaactgggaatatgcaatctttgctgacttattcatatcaatcgatctagaaattgaaaaccttaatatgaattgaagagatgaaggaatctaatttagctcgttctcaaaatcgaattgaagcagatctaacaaacgtggtgctaaacaaaagaaagtctcagaatcaaattcaaaatcgtaactcggattactgagattttgccttttgttaaaaaaaaaaatcaaaaaatttgttggagatgagaatcgatctcgaactgatgaggatgataatctctctcaaaaccactgggactaagataatatgatcataactattagaaaacaaattgtatataaatagtaaacattatatggttaagttttaactgcggttagcgattccgttaccattgttaacgcccgttaactcgcatgtctgattttgccaaaatttaaaaaaatgaaggtttttaatgaacataaaaattaacttaggtattaaacggccaaattaaataacgcaggtatgaacaaattaaaaataaatggagttttttttggtttttttcctctgttaatagtataatctccctcgacctaatccatctcccgtcagaaagttgttccaaactcttcagtgttatcatcttttccttttaagattatttttgtcaagtctacttcttataacaagagtaagtgctttccctcctgttttaggtttttgtaatttggttcgctaatttatttgatttctcatttgtgtttgtttcgtttccctgaatttttcttcctttgatttttcagattacagactttgagactcttagtttttactaagacacagtgtgatcaaagaaataggcccatctttgttttatagaattctttgtaatcaggttgtgttgaaccttgttatgtaggctatagtttttgctttgaaagccatgtatgactctgaactattactcaattttttaaagtaatgtgggattttttctacttattttttttcttcatcgattgagtagtatatgtgtgtttttaaaattttgaattacctcatatgcagaaaaaactaatatatttttaactatatgtattatatatatcaaataaaaataaattagatataagaacaaataaaaatgaaagaaaaatcatatatttattattaatgtagatatatagattttaggaaattagcaattaattgaatgtaatttaataaatataaaaattaattaaagatttaaatttaaaataaaatatttttagataaattttgtagggactaaaaaagaaataaagaaaatagttaattcaagtatttaatgcaaattaacgatttgtaaatttttaagaatataacattttggttgagatagaatttataaaaactcatatgttattagtaaatattagagagatttttgatcaaaaagtgcatcaaaaatatatatataaatacttttattttaatttcaaaagaaaaacattacctaatacgtatcttattcctaggacatttatgattgatctatctttacgtattttttacgaaaagaatggtttaagattgaagaagagttaaatatttttatttattctttcaaaaatattaaataatcaataaaaatcatatttagaagatattttatggacatgtgattttggcaatttccccataggaaaaagcgaaactctctataattgattgttactggctttgatactttgaagactgaacacaaacaaaaaaatctcttatcacaccacctccaatggagagcattggcagccattgttgcagctctcctttcaccttcatcactagaaactcatcatcatcacttcctagactcgttaacatcactcacagagttaatctcagccaccaatctcaccgactcagaaactccaattctcgtctcacttgcactgctacttcttcttccaccatgtaaatgactccttcatcttcttaaatttggtctcttttgatcatgttattgaaattgtatgagtaagtttataaaaatcgaattttgatttgaccctagtgaggaacaacggaagaagaaagatgggtcaggaacgaaagtgaggttgaatgtgaggttagatcatcaagttaattttggtgaccatgtggctatgtttggatcagctaaagagattggttcatggaaaaagaaatcgcctttgaattggagtgagaatggatgggtttgtgagttggaacttgacggtggtcaggttttggagtataagtttgtcattgttaagaatgatggttcactttcatgggaatctggtgataatcgtgtccttaaggttccaaattctgggaatttttctgttgtttgtcattgggatgctactagagaaacccttgatttgcctcaggaggttggtaatgatgatgatgttggtgatggtgggcatgagagggataatcatgatgttggtgatgatagagtagtgggaagtgaaaatggtgcgcagcttcagaagagtacattgggtgggcaatggcaaggtaaagatgcgtcctttatgcgttctaatgatcatggtaacagagaagttggtagaaattgggatactagtggtcttgaaggcacagctcttaagatggttgagggtgatcgcaactctaagaactggtggagaaaggtatcacttttggactgttattttagtttcctcttacttgttttcctttgaagctggggaataatgaaacattacctcaattttgaaatgtgtttatgtgttcaagcttgaaatggtacgcgaggttatagttgggagtgttgagagggaggaacgattgaaggcgctcatatactctgcaatttatttgaaggtttctcttgtctttctatagcctaacctaagttatcttttctcatatatctgggattcaccttgcttactctttttgtttgtttgtctggcttcttatgcagtggataaacacaggtcagattccttgttttgaagatggagggcatcaccgtccaaacaggcatgccgagatttccagacttatattccgtgagttggagcacatttgcagtaagaaagatgctactccagaggtgacacattttttcgctttcaagatctcgactttcaagtctctcttctcaaatatttgtagttggtgtgttcatagtatcatcttctttaagttggatatgattttatttcgtaggaagtgcttgttgctcggaaaatccatccgtgtttaccttctttcaaagcagagtttactgcagctgtccctctaactcggattagggacatagcccatcgcaatgatattcctcatgatctcaaggtaataactcttttctcctgttttgtcattagatcagtttttttaatggtatccatataacatatctatgttccagcaagaaatcaagcatacgatacaaaataagcttcaccggaatgctggtccagaagatctaattgcaacagaagcaatgcttcaacgaattaccgagaccccaggaaaatatagtggagactttgtggagcagtttaaaatattccataatgagcttaaagatttctttaatgctggaaggtatttctgaaaccacctatcatttcgtctgattaacttgctaaatgatggtcccatggactgtagaattcaatagctcttgtatcttgttgcagtctcactgaacagcttgattctatgaaaatttctatggatgatagaggtctttctgcgctcaatttgttttttgaatgtaaaaaggtaagctctcacttttcttttacatgtgattcagtgcttttctgttggaagtatgcaatatttattgggttttcttgcatgatcttctgaagtggtatttccctagacacagcaatgctagggtagccaccgtaaagatgcagattaaattaataacaacccatccttggttgcattctctattccaataaaaggaaagaaaatcaaaaccaaagggggatgtactcttagaaacgccacaaaaggagaaatgttgatatgtgtccatataatcacatcatttgataaattgtgcatgttatacacaatcaatgagaattttgttattgtagtctcttcataagactgactgcgaaattcatatttccagcgccttgacacatcaggagaatcaagcaatgttttggagttgattaaaaccatgcattctctagcttctttaagagaaacaattataaaggaacttaatagcggcttgcgaaatgatgctcctgatactgccattgcaatgcgccagaaggtgagctattttaaacaatccagcattatcatgtaccaatttatttactaatatagtttcctcgtttcattagtggcgcctttgtgagatcggcctcgaggactacttttttgttctactaagcaggtgtgcataagattttgattgcttttaagagctaaatttcttttggaagttattaaaactcctgctacctttctccgtctcgtcttatgtctcgtcaatgatttgtgtagattcctcaatgctcttgaaactatgggaggagctgatcaactggcaaaagatgtgggatcaagaaacgttgcctcatggaatgatccactagatgctttggtgttgggtgttcaccaagtaggtctatctggttggaagcaagaagaatgtttagccattggaaatgaactccttgcttggcgagaaagggacctacttgaaaaagaaggttaattccttctctcacttatgtcaactcgttctgtttaactctgacgtgtatggcttgtttgtggttgtaaagaatttgcatgctattattataagctatatgctctttattgtttttccatgaaggggaagaggatggaaaaacaatttgggccatgaggctgaaagcaactcttgatcgagcacgcagattaacagcagaatattctgatttgcttcttcaaatatttcctcctaatgtggaggtacacattattccatgccttacattatgaagttagtgatgcaacctctattgtagttcaaattcgtttgcccacattcttttctttcaccagaaaaaggacatatcggaccaaattatcactcttctgctaatctaataaacacgttctttattattacagattttaggaaaagctctaggaattccagagaatagtgtcaagacctatacagaagcagagattcgtgctgggtaagttaggcctttacttcctagtacttagcttaaaccatacaagcaatctgattgaatcatttgggaatatttgctgattcttttcttgattattttactcatcatcctctttctgtaattttctctaaccatacttaaggttctgtcttacagaattattttccagatctcaaagctctgcactgttcttctaaaagctgtaagaaattcacttggttctgagggctgggatgtcgttgtacctggatcgacgtctgggacattagttcaggtgcgtgtagaagggaaatgaatacatagctgagattttgaatttactacaccgacatatttcgtttattagaaggaattgtcatttcaaaggcaggtgttaactaaaaagtatatggtttcggtgctacagaaatgtacagtttaaaagacgatatgtgttaactgttacaacttttactgatagtagcaaatcactaataatacaggctggagatggaacaattactgtctttgtgttctagattggctgttactgcaccattacttggttgaaaattttcgacttatgcctcaggctttgtaactttgatgagaattcgcatttgtagatcatttttctggctcttgtgactgtaggttgagagcattgttccgggatcattgccagcaacttctggtggtcctattattctcttggtcaataaagctgatggcgatgaagaggttttgacctacattcaacctcaccatgattcataacatcatactaaagattaccttataacttgctttggcaggtaagtgctgctaatgggaacatagctggagtcatgcttctgcaggagctgcctcacttgtctcaccttggcgttagagcgcggcaggcactaaccttattcccactttttttactccctaaagttttactagagaagtgcattgttgaaaaatcttcatttcgcatacatttttacaggagaaaattgtctttgtgacatgtgatgatgatgacaaggttgctgatatacgacgacttgtgggaaaatttgtgaggtgatttgtccaatgttgtcattttattgattttttccaatctcccgtttaaccagaaaactcatttctctccttaaaggttggaagcatctccaagtcatgtgaatctgatactttcaactgagggtaggagtcgcacttccaaatccagtgcgaccaaaaaaacggataagaacagcttatctaagaaaaaaacagataagaagagcttatctatcgatgatgaagaatcaaagcctggttcctcatcttccaatagcctcctttactcttccaaggtaatcttttgatatctctgtgattccgtacaattgacatttagactgcttgctgatatataactttgatccctaggatatccctagtggaggaatcatagcacttgctgatgcagatgtaccaacttctggttcaaaatctgctgcatgtggtcttcttgcatctttagcagaagcctctagtaaaggtaaatgtgaggggacaaaattgactggtaccaaatcttatgtctttctaaattactgtctggtttctgatgaatatgcagtgcacagcgaacacggagttccggcatcatttaaggttccaactggagttgtcataccttttggatcgatggaattagctttaaagcaaaataattcggaagaaaagtttgcgtctttgctagaaaaactagaaaccgccagacctgagggtggtgagctagacgacatatgtgaccagatccatgaagtgatgaaaacgttgcaagtgcctaaagaaacaatcaacagcataagcaaagcgtttctcaaagatgctcgtctcattgttcgttcaagtgctaacgtcgaggacttagccggaatgtcagctgcaggactctatgaatcaatccctaacgtgagtccctcggatcctttggtgttttcagattcggtttgccaagtttgggcttctctctacacaagaagagctgttctaagccgtagagctgctggtgtctctcaaagagaagcttcaatggctgttctcgttcaagaaatgctttcgccggacttatcattcgttctgcacacagtgagtccagctgatccggacagtaaccttgtggaagccgagatcgctcctggtttaggtgagactttagcttcaggaacaagaggaacaccatggagactcgcttcgggtaagctcgacgggattgtacaaaccttagctttcgcaaacttcagcgaagagcttcttgtgtcaggaacaggtcctgctgatggaaaatacgttcggttgaccgtggactatagcaaaaaacgtttaactgttgactcggtgtttagacagcagctcggtcagagactcggttcggttggtttcttcttggaaagaaactttggctgtgctcaagacgttgaaggttgtttggttggtgaagatgtttacattgttcagtcaaggccacaacctctgtagaatcttttatctataaagcgaataatacaaaaaatgctagaaataaaatctgcatttgcctcgttaccatatgtgaagttatgttaaaatgtttaatgatggtatattatatgtaataatttttagtaaagtttatggaattttacttttattaaatgtacttaaaatataaaattactaatcaaatatattaaatttcttagattcgaagtctttattttgatctttgtgtgttatgtggttgagtcttgtttgagtgaagtttctgcctggccatttgtttgtctgcatttgtgatgagacagactcaatgctacttgccataggctcttggctcaatttctttggttggttcttctgtttcattaagatctgctatgtttggagtatgtggttccctaattttccatcaatagcggtatctttttcagtttgagtatatcgaattc

SEQ ID NO: 748 - DNA, 111767 bp, Arabidopsis thaliana
gaattcaaatgcaggattcacaaataatacacaacttcgtgttgacatgcttaaccaacaacacatccaaggaagtactttaaaccgtatgcgttcttgttttttcgtcattcaagttctctaatatttaagcatttatagaaaatctgatgttggaagtttgaattgtctaaaacaggtgattttgttagtgggagaccaggaacaggttggtttgatcttccgccatcgctaaaaccgcctcctgagcaaggctatcctcagcttcccttcatagactggggatagatataaattctctgaataatgctcagtttcaacattgatgattctacttgaaaggaaaagactaatctttgtctcgttgtgctctgccattaccaagcttttagccacaagcttgtctcttttcagactcgaggttggaagaatgtcaaccaaattgtcgtcttgttactcaatttgtcgtcaactttagagacattgttcggagtttggacatggcaaatttgcaatttaacatactgtgcgatattctgataaaattctttaaatttcgttggctcgtccctattcattgcgtgatgataggatatcgctaattcgctatccgcttcctggccatgtgctaaacaagacttcccaagccaaactatcaaaatatttgacaaagttggagcaattcctaaggctgtagattaattacaaagttggaacaattttttccctagaaaatacattattgagaaacagagtataagttggctaaaagaaaaatcagattgttcagaatcaaatatttaaattattaacttcattttcatttcttcaactccataaaatagaactaattttaaactctttattgttgagagaaatatcttcgaatctcctaagagtaatttagtcgagcatgttggtttgagtttataaaagataggttatgatttattagttaatatttcaaatttatatattggtttttaggtttataatggagggttttagtttattttttattttaattatgaacaaagtaaatagtttgagtttataaagaagagtttgattagcgtattataattacttatatgtcggtttaggtttaagattttataattaaagattatatttctgttagggttttagggtttcagggttataattaaaggttatatcttatatttcagttaggattttataattaaagggatagttaaggttttagatcttgtaattaaatgttatatttctgtttagatttataaaaaagattaggatttagattttacgattaaacgagattataagtcaatttgagtttataaaagaatgcttagggtttggattttacaactaaattcaattaaatgtggttaaataattgtttacgtttttataaaagagtgattatggattagattctataattaaaagaatttaattcttgggagatttgcaaaactacccttttgcaacaatacccttatatgtggttcttttttaaaaataccttttcccttgaacagaatgaccaaattaccctcatctaatagtaacatgtaattggaaactgaaattttcccgccatattttttttttcccgccaaaaaaaacaataccgccaaacttttttcccgcaaaaaaataaattccctccaaaaaaaaatttctcgcgaaatttgttttccgtaatattttttttatcagccaaaaattaaaaatccttgtaaattttttttgcgggaaatagatttacaagagatttttaaaagattttaaaagatttacaagggattttaaaaggatttaaaaaaatttacaaaggattttaaaagatttacaaaggattttaaaaggttttaaaaagatttacaacagtttttaaagggtcttcttgtaaattctttaaaaatcttttaaaaacatttgtacatttttcaaaaccctttaaaaatctcttgtaaatattttaaaactcttttaaaatcccttgtaactcttttaaaacactttttaaccctttaaaaagcttatgtaaatcttttaaagctctttaaaatccattgtatatattttaaaacccttttaaaatttcttgtaaatctcttaaaactcttttaaaattccataaaatatttttaaaccctttaaaaatctttaaaaaacctttgtaaatcttttaaagtcctttaaaatcctttgtaagtatttcaaaacccttttaaaatcccttgtaaatcttttaaaacccttttaaaatcccttgtaaatcttttaaaacccttttaaaatcctttgtaaatctatttcccgccaaaaatgtttttttttgcggcaaaaatatttttgaaaaaaacattttggcgggaatttttttttgaaaattttggcgggaaatttattatagacaattttaagcgaaaatattaatatttcattttgttaacgtaaaacaatttccaaatagggataaaatggtaattaaaaatttagagagggtagaaatgaaaattgttttaaaaaagggtagagttgaaaagggtcatcataaaaaaggcattaaaaaggatttattattatggggagacctacaaaactaccatttttttactaactttttgcaacaatactcttttctgttctccatttttaaaaataccatttcccttgaacagagtgaacaaattaccctcatctaataagaacatgtaattgaaaattaaaatcttttcccgccaaaaagaaaatttctgccaaactttcttttccgccaaaaaaatgttcccgccaaaatattttctcgtaacaaattttttctcagccaaaaaaatgcttgtaaaaatccttgtacattttttaaaaactctttaaaaaaaccttgtaaaattttttaaaagctttgatagttgttaaaaactcttgtaaatcatattaaaacattttaaaatctttataaagtctttaaaacatatgtaaataattttaatcccctttttaaacctttgtaaatcattttataactttttacaatagttttacaagatttaccagagttttttaagagttttaagaagatttacaaggattttaaaacctttgtaaatccttttaaaactcttataaagtcattacaaacattttttaactcttagaaaaaattgtaagtatttacaacatccagaactctttttgaaccatttttaaactcttgtgattctttacaaaatgttttaaaatattttacaagagtttttaaaggattttaaaactcttgtaaatcttttaaaaactattgtaaatcctttaaattccttgtaaaccatttaaaaatcttttaaaaactcttgtaaaccctttaataatttttgaaccattttaaactcttgtgaacctttacaaaaagttttaaaaagatttacatgagtttctaaagggtattcttgtaaatcctttaaaatcttttaaaaacccttgtacatctttaaaacctttttaaaccctttaaaaatctcttgtaaatcttttcaaaacccttttaaaattccttttaaatcttttaatacactttaaaaccctttaaaaatctttaaaaatttaatacactttaaatacattttaaatctatttcccgacaatttttttttttgcgggaaacatgtttttgaaaaaatattttggcaggaaaaatttggcaggaaatttattttgaaatattttatgcgaagaaatattaatatttcattttgttaacctaaaacaatttccaaatagtggtaaaatggtcattaaaaatctaaaaagggtataaatgaaaatgacaaatagaaaatggtagaactgaaaagaggtagtgtggaaaggacattctcagcacttattcaaaatttagttgtatgattcacagtacatctttaaattactttagataacaaactttctgaaatttacgttagataacaaactttatgaaattactaagagtaatttctagcttaccacaattctatatacattgacaatatattactgtattttaaaagtacaatcacttaaaactattacaaaacttcacattataagaacaaagtaagctagaaattactctgagtaaaaagaaacaatgagagtaagataaattaattcttagtaaaagcaaaacttataaatataaaatattatattacatgccccctgtttttatatggatatattttttttctttttttttgtcatcggatattatttaggatcagacgagccaaactttggataagaaaaaaatatttttatatagataataatgaattacctggtcaattaattaataagagatttcctggatgttatttagaattaatgagtccactaaattgataagaatcgtagtgactagaatcaccttctttgctatataaacagtctttgagccaacaaattaaacaaccacacaaaacaaaaaacaaattcatggggatgaagaaggtaaagctatctttgatagctaatgaaatatcaagggaaacatccttcatgaagaggaaaaatgggataatgaagaaactctacgagttgtcaactctatgtggtgtccaagcttgtactctcatctacagtccattcattccggttccagagtttctggagatgtcgccgacagcccgaacaaggaagatgatgaatcaagaaacgtatctaatggagaggattaccaaagcaaaagagcaactacagaacctggttggtgcgaaccaagagttacaggttagacgatttatgtttgattgtgttgaaggcaaaatgtcgcagtatcgttatgatgcaaaagaccttcaagatttgttatcttgtataaatctatatctcgatcagcttaacggaaggatcgagatccttaaagaacacggtgactcgttgccttccgtctctccttttcctactagaattggtgttgaagaaactggtgatgagtcgtcttccgactctcctattcttgctacaactggggttgtagatactcctaatgctacaaatcctcgtgttcttgtggccgatacgactcattttcttgatgcgaatgcaactgcggtaactgctccctttggattttctaatcatattcaatataagaatatgaatatgagtcaagatctgcatcgaccgtttcaacaccttgttcctactaacttttgtgatttttttcaaaatcagaatatgaatcaggttcaataccaggctcctcctaatgatatgtttaatcagattcaacgagagttctacaacattaatttgaatcagaaatcaaatcagtatatgaatcaacaacaaccattcatgaatccgatggtggaacaacatatgagtcatgttggagggcgtgagagcattcctttcatggacggaaactactacaactacaatcaactaccagtcgttgatcatggttccacaagttacatgccttccaccaccggtgtttatgatccttacttcaacaataatctctaatcaaaagagggagattttctaatctaagtgttcagttgtttgtatttgtgttttcttcatttcaaaagacaaaaactaattttgtttattaataattgttgtaatggttaaagtgtctctctttaacttaattatgtattttagttattaaggaatgttttgcccaaaaaaagattattaagtaatgtatttgctcaccgttgtgtgagaaactttaactggaattttatttcgaaaatttaaggtgtgactagtacaatatttagaagaaaatattcaattaaattctgttaggacccatacatatagaataattgtttttcccaacaatttgaagtaggaaatcttatttttttggaaaaaaatatttaataacaaaaaataaaagagaactactcttattcaatgttaaaaaaatcgttacgcggtagttaggcgttcggtagaggccttgggcctatatcgattaatcagtgcctaggtcgattttttttaataacattttcccattcttttgggctccaaaaaattaggtagaaaattttttcttccaaattttggatcagttagaccctcagtcattataaaaaaaatagtgctagtagtttttagtatttcaattataataataatatataactatatagataatactagagatctctgtaaatcacctaaatacagttttaggaaaaatagaacttttgataagtaaaaaaattgcaaaatatttatccacacaccatcacagctttgattatagtatatatgtgtatgtgataatagaagaacagaattttcagtttggttgtttgatagagacgcgagttaaggagagaagggctcagagtttgggctgtaacttgttcaaagattggtcagtgttgacaaattatgagcatagtacaagaggtcgtatttgggtagtatggaagaagaatgtgagactgcgtccgttttttaagagtgggcaactcataacatgttcggtgaaattaaagaagaatttttctgctcgtttgtttatgcttcaaactttatggaggaacgtaaggaactatggaatgacttgagagatcactctgactctcctattatccgtagtaaaccatggataatttttggtgattttaatgagattcttgacatggaagagcactccaactcgagagaaaatccggtgacgacaacaggaatgcgagactttcaaatggctgtgaatcactgctctatcactgatttagcatatcatggtccgctttttacttggtcaaacaagcgagaaaatgatctaatagcaaagaagctagacagagtcttggtgaatgatgtttggcttcagtcttttccgcgttcttatagtgtgttcgaggctggaggatgctccgaccacttgcgatgcagaatcaatttaaatgttggtgctggagcggtggtaaaagggaaaagacctttcaaattcgtaaatgtcattactgaaatggagcatttcataccgacggtggaaagttactggaatgaaacagaggcaatctttatgtcaacttcttctctattccgtttttctaagaagctaaaaggattaaagcctctgctcagaaacttgggaaaggagcgtctaggaaatttggttaaacagacaaaggaagctttcgaaaccctatgtcaaaagcaagcaatgaaaatggccaatccctcaccaagctctatgcaggaagaaaatgaagcttatgctaaatgggatcatattgcagttttagaggagaagtttttaaagcagagatctaagctacattggttggatattggagatagaaataataaagctttccatagagctgtggtagcaagagaggcgcagaactcaatcagagagattatttgtcatgatgggtctgtggcatcacaagaggaaaaaataaaaacagaggctgagcatcatttcagagagtttttgcagttaatcccgaatgattttgagggcattgcagtggaagagcttcaagatttgcttccgtatcgatgttcagattcagacaaagaaatgctcaccaatcatgtttcggctgaggagatacataaggttgttttctcaatgccaaatgataaatcaccggggccggatggctatacagcggaattctataagggagcgtggaacataattggtgctgagtttattttggcaattcaatctttttttgcgaagggcttcttaccaaagggcatcaactccacgattcttgctctcattcctaagaagaaagaggcgaaagagatgaaagattatagacccatttcttgttgcaatgtcctctacaaggttatctccaagataattgcaaacagactcaaattggtacttcccaaattcattgtggggaaccaatctgcgtttgtgaaggatcggcttcttattgaaaatgttctgctcgctacggagatagtaaaggactaccataaggattcagtttcaagccggtgcgctctaaagatcgatatatcaaaagcttttgattctgtgcaatggaaatttcttattaatgttcttgaagccatgaactttccaccggaatttactcattggattacgctttgtataacaacggcctctttctcggttcaagtcaacggtgaactagcgggggtttttagcagcgcaagggaactaaggcagggttgttctctatctccatatctttttgtgataagcatggatgttctatcaaaaatgttggataaagctgtgggcgcaaggcaatttggttatcacccgaagtgtagagctattggtttaactcatctgagttttgctgacgatttgatgatcctctcggatggaaaggttcgatctattgacggaattgtaaaggttctctatgaatttgccaagtggtcagggttaaagataagcatggaaaagtccacaatgtatttagccggagttcaagcatcggtctatcaagaaatagtccaaaaattctcttttgatgtgggaaagctcccagttcgttatttgggtctaccgcttgtcagtaagcgcctcactgcctctgattgcctccccttgattgaacaattaagaaagaaaattgaagcttggacatcacggtttctctcctttgctggaagattaaaccttattagctcaaccctttggagtatatgtaacttctggatggcggcttttagactaccccgagcttgcataagggaaattgacaagttgtgttcggctttcctctggtccggtacagagctcagctccaacaaagctaaagtctcatgggaagctatttgtaagccaaaaaaggagggtatgctggggctacgctctctaaaagaagcaaatgaggtatgttgtcttaaactgatttggcgaatcgtgtcacatagcaactccttatgggtcaaatggactgaaacaactctacttaaaaggcaatctttctggtcattgaaaaccagttcagttgtggggtcatggatttggaagaaattgttaaaatgtcgagatatggctaaaacgtgttgtaaggtggacgtaggcgacgggaaatggagagcgatttctatttgattcagtgttgcagttcggtgttggcgtctacgacgggttgaccaagcttcagccactgactagtttcgagtaattccgagctccataactcctctttctccaactagatccactatcctgcccattatcgaccagtcatcataccaaaaagatgttgtgtttacaccaactttttctacaaaggatacatggaacaatatcagaactacagctcctgaggtagcttggcacaaaggagtatggtttgcccatgaaactccaaaacactctttctgtgtttggctagcaatctggaacaaactctcaacagggcaacgtatgcaacattggaatctccaatcttcagtgggatgtgttctctgcaacaacaatttggaaacacgagaccatcttttctttagctgcgcctacacttctggaatctgggaagcattagccaagaacttgttacaacgtagttatacaacggattggcaaactattatcagctacgtttcaggccaatgccatgacagggtctcttgttttttggctcgaagtgttctacaagcatcagtatatacaatttggagagaaagaaatggaagaaggcatggggaaaccccaaacccagcagctcgactgattcagtggattgataaacacattcggaacatgttatctgttattcaccaaaagggagataagagatacgacaagggacttcaaatgtggttcgcctatcgatcttaatattttatagctccaaaagtttcaactgtatttattttcttaaaaaaccgttgcacaagttgtaaaacagttatttttgcttttgaatataatttaacattttattcaaaaaaaaagataatattcagcataaaatctaactgggttttttttttaatgtcaaaacaaatatatacctagtcttttatatagcctgctgctgcatattgtgaagatttagttttaagggttttcattacatgtttgttggcttgtacaaatattaattttctggtgttaatttaaattatgttgaaaaatcgagggtgataatctgctaattttttgtttgtattttctaataaaaattattattgaaattaattagttttagttgcaaacagtgctttgatttatgtactcacaaaaaaaatcggtgagtggggtaatcgatgctacacttaccctagaaagattagtcaagtgattaaaacccaaaacacctcataatatccaaaaaatataatttggtaaagttaaccatcacccctttggtttgacaacttgggccgaaactcaaatgctaaaacacccattactttaagtcaaaacaaaatttgaagaagttaatttttgcaattgccatataaataatataataggaagtcaagtcatcaacaaattatttaggtgttttagcaacactaactctacatgagctagtttttgaatatttccacttgatgatgatatttagaaattgcaagtagtttccatacaatgttagtattacacaaattatagtttaaatattactaatacgatcgaagctttataatacatcatctatttaaggttgaaaatagcattgaaactactgtgagcaacaaaagtcgcatttggatgcctatttggaagagtctagagaggaaatattttttggtggatgatttgtgagaatactagaatggcggtaagtagttgagaaatatagggttcaaaaacagctaaatgttactgatgtatatgtataattaaaaacaaaatcacctaaacataaaatcacatttataattatatatgtgtatatatatatatatatatatatatatatatatatatatattcttttgttaaatagagtagtagataaatggaagaatacatttttgaggttttaaattcaggctttgaatggttggttcataagttgcgaatcggacaatacgtaccaatattttagtatgcaaaacgtcgggctatataatatgaatcaaataatagtgtgcacttcaacattgttatttatttgaatggagcttttaaagagtgaattaaaaaaagccgaccaatagtaaatttataatggtatggaatttcgtactgaagtgtgtactagtatgaaatttttagtctgcaataatgcactacaacgatgttgaatggtgaattaattaccacaacaaaaggggtgttttacatcatttattttatatatttgcattattatgattgatgcaaatgaattttacatcacttatataagtgagtatggaattggtaatttgcatcggttcaaataattctttgcattgattattgtaatcgatgttaatatgcataagttacaaaaaatgatgttaattttgcatcaattaatataaattatattagtatttgtgttaatttatcaaaataatgttaataattattacagtaataataacttatgttaagtgtttacatcatattattatttttaaatcatattaaatattttttaataaacaaatttttaaaatcatattaaatatttgtttaataaacaaagttttttaagtttattaattaatatgaaagcaaacgattatatttatttaggataatagttgtttattaagctttacactttgttgataccattaaaaccaagatcacaatatataagaaaactatgaagttttttttttcctactgagagtaatgtgggactttgacaaattaagtaatcaattacattactttttataactgatgcttaatctttaactaacatcatttgttattgatgtaaattttgtatcattttctaaatgacgcaaattctttagtttgtatcaaaattgtaaaagtgatacaaataatatatttgtgttatgaataaagatggatgcccattataaggcccatcatctaagcccatcatctagatgtttctagggttttaccctttccttgtacacctatataaagaaccttttatctcaatggaataacacactcatttcttctatctctttctctggttataacacgttatcagcacgagtcctacctagctgagaccctagccacctaagaaaacgaaaaaaaaaaaaaaaacctaaccgcctaaacaaacaaaatcttaagctaacaagataagttttctgttcatatttgtttatacacgaattatgcacagattatctatcattagatctgtctatatttttgcacaaattatgaactaattatctattatcagatctgtttgtatctctatacgaattatacacttattatctattatcaattctatttgtatttttgtacgatttatgcacggattatatgttattgattcttaactgttttatgcattatatcgcagaaaccctatttttgcacgaatgatcagcatctggattttcgcacgaaagataagttttcttccatacttttataaagataaagatctaatgcttctttgaaaattaaaatttcatagttgatgcactattatttttacgttaatagagttgaccatgaatattgtttaccctaaatttgcacgaaaaatttgtttaaaagatctgtatttatttattttatttttttttgagtttagaaaaaaaaaaaaagtgttaatggttttgccctaattttgcacgaaatcattttatccaaattttgcacaaattcatattatcttaaataaaagttttgtcaagatatatgtaaaatccagattttgcacaaaatagttttatacttattggttttacaatattgcattaaaattgtattggtatataatatttgattattttatgaaataaattgattgataaataacttaatttaaaggtataatcacttatagaaattttcatgaatgactattttaatgtatcttaagaagatatcatatttttgatggtcaaagttttttcaagaacttaaattatcaccagaagtttagaaaataaacatggtaagaaaaaaaaaaaaaaaaaaaatattctaaagatgaaataatctagtatatcaagtagtataaaatcttattaaaagactctagaagagcatatacattgttttttatgggaatacaaaattaaaatcattgatgccgtataattctccaaatcttaaagttaatatgatgagatataaaatatactatgattctagagtggaattaaaaacgagatggatgaacttgaagtttcatcatttcgaggaggagaagtaatgaatctcacatggataataagtgacatatccaaaagattatgttcaatctttgactactaaagatctaaaagttgtataaagcaattcttatacgaatgtgttattagataaaataagttataattagttattactgaaacttcaagacttgaagtctctttgtgaatataactcacattgttaagagaatatctatgatgcagagatggtaaaacagacgcttaaacttttatgcaagtattgttgtcctgtagacacaatattttgaaagaaattttgagaactattataaacttaaatcgagtgtttttcaaaggctaagaaaatatatgacttattgatgataagtaatactcatattctgaagtgaatataagatcttacataactagtcaaattaaatttaatatcgtttatattagaatataaatttcaattattgtctcatttattgctatattaacatatgattgattattaaaatacatggaagtaattttgattataagattccattaagggagtaattcataacgaatgaaaagtaaatcagaagttttcaaaaaaaaaaaaaaaaaaaaaaaaaaaaagctagaagtttcaagagtatatttggcttaaccggattggtcatcctggtttaatgatgatgtgaaagtattgagaattatgtggacattaggtgaaaaaccagaagattctccctaatgatttatcaaatgttacttgctcagaaagcaatatgataatgtgatttttaccagtgtaagtaatttggactttatcttttcgtaagtatatacaaggagatgattatgggttgatcacctactatatgacatttagatacctaatggttataaaagatgcatcgattcaatggacctattgactcgattgttgcatcgacaagaaggtcatatttatccttgttataaacccgcaacatagagtttgcgaggttactttcttgattaaagtataagagtatttcagtgtttatttattataaccattattggatatccgttgggataagtgtttaacattttgaaattcatgttcatacacaaaatggtttagtaatatcgatacgcatcaagccaatgaataattaatagttttccccatcattattggttttgggtcagaaaccaaatagttttcatctaaaatctttgaatgtgaaaagtgctccaccacagcacgctaagatgaaccctcaaaggaggataagaatacatgttggatatgaatgataactaagccatcctagaagtatttatataacgctcgttttgaagactatcatattatatagtcagctattccaacataagggggagaatgtatatagctggtgaaaaaaaaaagataaaaagaaatgaattatcaatgattctcggagtaaagaatgtatattaagagtccaaaagataattcaattacagaatttagcgttgtaattgccagacgcatttgctgacccaaataaagtgatgaagtcacctataccagttgtagattaaatgctccagaatataatgaatgtcttgtaaggaccaatttcaaactgctattgagtcttaagatcgcatgaagcgtaatagactttggttccaaatataaatatcctcgtaaaagtgaaggagcacaaaattaaaaatgaccaaattgaggaaataaatattttgatgatctcttgaagagagtgaatgatctctaaaagagacataaacatgacaaatgaaacattcaagtacttgacaatgaagagatctacctagctatgtcatgtcaaaatataatggaatcaaaagcaaatcgacgtcgtaatatatttgcatgatatgagcagttgatattatggacaaaaaaggaggatcatgaaagaaagtctattgaaaagtgtacacaaagtaatgattaaccaaaaatgaaaaagaagaaatagacatataattataatctctagtagagatatttggactagtagtctatgcacatgatgtgtaaaaccagtggaagataaatgagtctttatgtgaaagaatagtgaaattaatgagattttcacaaagataagaaatgtattatgaagagatatattctcttgtggtggatgtaatatttttaagtatctaaagtctgacaataagacacggaacactggatatgacatttatatgaaattcttgaaagatataatctatgaaggattaattatatgagaattatgttctctagaactctactcgatcgaataaaaagaaatatgtaacatgacatataatcatataaatgtatatttatgttgagtttatcaaaatatattgatcaaactaatatttgttttgaaaatcattaaaactcctacagagttatcataagtaatacgatgacaataatctatgacaaaatatcactagataatgatatttataagtctatatgaaaaccatataattatgatcattaagattatggttattaattccaacgagatattgtatttgattgaaaatcatctcctgaagaagatgtttccgaggggagattgaatgatatgcgtggatgtaccctttttccttatcatagtttttatcccacataatttttctatgacaaggtttttaaagagacattaaagaacacgtaaataatacacttgatgaatattaagaaattctatcaatcatccaaatgaatattatacactaatgatatttagagaaataaataagatggtcaagatgaatcatctaaaatattcatgagcagcagaagaatggcgatgtactttatccaaaaatttgttcaagagaagatttggcggacttattctcaaatactttttaatctttgccacatcttctaatcatgcagagtttttagcaattcatgaagctagtcgcgagtgtgtatgggtaagatcaatagttcaccatatacaagaagattgtggtatgtatgcagggaaaaagactccaacaattatgtacgaagacaatgcagcatgcatcgcacaactcaaagacggatacatcaaaggcgatagaacaaagcacatcctaccaaaattcttctacacacacgatctacaaaagagcggcgatgtacgagttctacagatccgttcgaatgataatccggctgacttattcaccaaggcgctacctactgctactttcaagaagttagtctatcgtatcggattacgccgtctcaaagatctcgacgaatatactcataagggggagtaattgtatgttgcactctttttcccttaaccatggttttttccattgggttttcctggtaaggtttttaatgaggcagcatttcaaatactttacgagttatgatactataatggtcatcagggggagtgttatgaataaagatggatgcccattataaggcccatcatctaagcccatcatctagatgtttctagggttttaccctttctttgtacacctatataaagaaccttttatctcaatggaataacacactcatttcttctatctctttctctggttataacaatttgcatcaattttaaagagttttaatgaaatgatgctacatacatcaattattgcaactgatgttaaattatagctttgtatcgattataaataagtgattcaaattaatatcatttaattattgacaaaaattatgtgatgcaaatgattcttttttgtagttatatggattgatccaactttagtccggtctagggcatactacacaatcattcatagccttagaagatcacatttgtaaaatatactccaagactacaagaggaagaagaacacgaatgtttccggctaagtccggttagtttcttcatgccttagtgagagttttcttttagtgtttttggttatttcttttgttttgttttttcttctccttttggagtgatgttaaatttcttccaaacaagaagaatgaaacgcctaatgattgaatcaaaggttcatgagatcatcaactggtcaattccttacatgaaagcataaatccttcattacccattatgggaccgtaaataaactttggatgaaggtcccttgtatgtggattgtgatgtttggaatttgatggctggtaaagaacaaatacatgagagcgtgtttgctactggtatgaccacttgcttcgttatatgttccggtgcctcaagatctgatggtttttttatagagcttgatttctactcatctgaatgaatttgcgaaacagacatatggtgaatcggaagaagtagctgcttgtgtgaaatcttaatcggaaatagagattccgatcaacggccagcttcggtggtaatggcgctgacgaaccgatgaagagtcggtgacgagtcagttgcatcttccacctccaatctgcgcaagaatgtgtaagtcacacatatcgcttctagacctgctggcatattttggcatatctagttattttattttttgggcttatattggcttttattgtatggttggatccatttcatcttgtaattttgctcttttgggttttaatttaaaagtttgacgacaaaaaaaagaataagttaacatttagaaaggagattacttatttaagagaatatgcacaaaataatcaaatttttgaagataattaacaaattaaccatatgatagagtaatttgtcggtaacatgttaaagagtatgtataattatttacattttctttgtaacatgtttttttctcgaattacgagtgatagcataatatatcccgttttatcatattattttgcgtattacctattattaaaaaaaagcatatagtatttcttgagaaaaacattttattcagtataatatttctctctatcgtgttattttgtagtaatatacattgttttttattaagattacatgtaatctttttaataaaatttcttattcttttgataatatacggtttttattaagattgcatttgatttcttttataaaaaattctattcatgttaattttttcgtaacaatgttttttcttcaaagaatactatgtaacaatattttttataaaaaattaactatattttttgaaatattatatcttttcgttaaatataacatataagatttaaatattatatattattttgtaaaatctcatgaaagtgtctcgcataatattaattttgaaacaaacgaatgagagttttgttcattttgataacgtgagtccatacctattttgtaaccaaaattttttttgctctactattttattatttctatgttttatttcgcagttcataaaatatatccattatttaaagctttgccacgttagagttacgaatagctgagttgtaatgggacccacaatttggtaggttttggtcaaaggtacagagttaccagagttacgaagatgcacctgagatagagagattgaggaatcatttcaatcaacacaaccaccaacataaattattctcatcgccgaaaattaaatatctccaaatgttttagtaacacgattctgatactacttagttgaagaagtctccggttcaaatacttgctgctatacgaattacaccattagatcaacgttgagtgatccgaaacgagacgctgcagatctgtatgagcttaaccaaatagtttcatgcgaattatatcatacacgtgacacgtcgtaacaaattagagaatttaaagaccaattacgagaacaacaacacggactagagtgctttattagacctgctaaggttatgtaaatgggaaattttgaacaggcgattcgagcaacggaaatagaagaaaacttagttttctcatacatcattactgtataagaagttgagagatatgattgtggaaatagagactccttcgaatctcataaagctccatggtacctaaaccatgataactttctttctcatgattcattcgcctgaaaagctttatgccctggttaatacataatagactatataagcaagacgataatgaaaacattagtattactatgtttctactttctagtaatatgttcctagtgactgcatgaaaacaaaaacacaaatgttcgcaacagtatagatgctccacttttctaataacaccgcgactaagttgatgataaagacgaagaaatgaaatgctactgaagattattaactcatgtgctttatgaaggaaaatgttctataatggacactattgggacataataatatctaagaaagtagaagaatctggattattggcaagcactgactgactactcaacaatcaacataggtttttggtgactgaaacatagccggaaagcgaaacttgggaactacaatgtaccttattcaacaagatagagacgtgcatttgaacccatctctaacaagcccgtttattgcgtccctgagcctatgataatcctcaggtttgttgtaaacttgaaaagaaatacgcacatatcccgtgatcggatcaatctctccatcccctggtggcctaaagtagattgggatttcaattctgaacttttctcttaaaaacgttctaagcttcaaaacatccgactcactcgacactcctaaacacactggcaacccaaccatgatcatactcgcacacatctcagggggacaaccgagctgagtcccccaagacttaaccaacatttgacccatctcaacaacagactcatgattcctcttcttaataccatcaatcccgccttcaaaccgatttacaaactccaatatcgaaggaaccaccaactgagcactataatctctagttccaacccacgaactctcaaccgccaaaccgttcccatactcattcgaaacaacgggatgatgcaaatccgcaacaccaccattactcgatttcctacaatacaagaaagcaacagaaggcggtgcgaaaaaccacttatgaagattactagtatagaaatcagcaccaatctccttcatatcaacatcaacacaacctatcccatgagcagcatcaacaaaaacttggtcaacaccttctcttctacaaatcttcacaagctctttaataggaatcacaacacttggcatagaagtcacatgatcaatcaaagctaacctaactctcctaccattcgctttaccagactctaaaccaatcctaaaccggtcaataatctcatccgccgaaataaccggaaaaggtaactgtacctcggtgacgtgtccaccggagcgtgtaacatacgcttcaacagatttcttcacagagccataagcgtaatgaagcataaccaccgcgtcgcctttatcgaaccgaccttcacgaaaagcccaagcggtttgttgaagaacgattgcagctgcggttgttgcgttatcgacgatcgagacttcatcgtcatgctcggcgtttattaaccgtttgattacagatctagaatcggagatttttggtttgagttcgtcgaaatagaatcgatccggttgacgaaggaaccggagctgccaatctcgttgtaaagctaggattgatgacggacaacaaccaaaactaccgttgttgattcttgcgaaatctggatcgtgatgagaaaactctgattcgatctcggaacttgatatgtaattcggatgagagattttgggacgtttgacgaaatcggaaaccgatgattcgacggttccgttggtggtggaggaagcggaggaagcggaggaggtgtaccttttggtatgacggtggtgatacgaagcttcttccggtggagatagagacgacgccattgattgatgagcttgaagaagagaagaagaaatttgttgctttcaatttttgctcatttgattttgattaataattataaaaagaggataaagacaagtggtgaaagtgcggtgccacgacgacttaggaaactgtgacaaaaagaggtttttgttgttgtggctcacgtgacttgcgcgtggttttggaaggtcacctaccaaacaatcttcactcacgtgttaaatggtcttttagtttttgtacgggtactgatgagtgttgacacttttaacggttctttttttaacggttagattgatgtatagacaaagagtatttaagatttaacaaacaaacatatgaataaaattgaagacaaatgttaattttttatattctgttttaaaatctgtgaaaggaaccatagcgtagaattacataaagtacaatcaatgtttctgatcatataatgtagcaaagttaatcttcgtcgctatcgttcccgaaaacggacgcgattgctactttcggcttcttgatgctgcttgtgggttggctctgtaaagatgaaagagataactagtttcagtgatgactgagtacgggaggttaaagcaggctaacccgtactggcctgctttaagcccggctatactaggcttggcctgtaatagtgagtttccatacctttgatataatgccgcttttagaagagaagccaaacttcaatgtttttcgctgatcttggacagcaagtggtgcaaccgtggtcttagccggtgcagaaaccgggacattctctgggacttcttgctggctctgttgcatctgatgttgtttgcgagcatcagccctagaaagttaaaagaaaaattcgggtttacgtccaatgcatacaaaatctttagaaacaagtaaaaggtaacagagactagaaacgttttgagcacattttagtcatctccctctcttgacgttgctgctctcgtttcttcctctcatcgcggccgcttgctccgtgcatttctttcatttctttgaatcgctgcataataccagtactttaactctcggttttggaaaaactaataagctataaaacaaggataagggaattagagtatttgtttaccttcttatggttgtgatcgtatgagctcaagtgaccttcaaactccatcaccgttctatactgtttgctgcatagttcacaatagaagactttacggatttctttaacatcgctctggatcttctgctcacgttctgctaggacctggattgtcataatgggcacgaagcgggcagtagaaagccaccaaccaggtaataaaagactgcagttttttattctttcccctctacgatattcccgtcaaaagacaaggatatatccaaatatgttttgaacgcatacctcccgtttctttgcgatttcctcagtctcctcaatctcgatatcaagtttcttccgctggatgttttcctctgcagtgaaataatcatcttcttcttgtttccctaaaccgagtcttcgatctcttataccggactttataggctccgttataccttaccataaacacaatatcaaaagatgaaacataactctaaatttaaccagtttatgaattctgactacacacacatacacaccttgctcttgctttccaagaccttttcctttccaacccattttctgaagaagacgaaacccgacattcgacgacgatatctttacatctaacgaagcttgctccacatcctccaaatcaacattttcagtaaccctatgagtaattggcaaccgaaactcctctgccaatccctcaataaaagactcttgattcatctataccaatttcaaaaccacaaattgatgaaacaaagaccaaaacacatataagaacttgagtatggaatggagaaaattgtgaaattgacctgatctttctcataaatccgtttctctctactacttgcttccgtcttactttcacgccggctaatatccattcctctacatcaatcaacctaaaaccctatgtactgtgtcagcgacagttctgagaaattaacgaaattagggtttcagcgatatagcgattcaaatcgatccctactagtctagctgaagtttctacgagatcgaaaattagggtttctctaatcgcagatcgacacaaacctttgaggcgaaggaaactatttgatctaatgatgaaaattgaagaagcttacctgacagtttgtagagagagcgagaatctgtcacagagcgagaagaacaacaatcgacgttgaatttttgggtctatattttgttagcaggcccgaagcttttgggattgggcccaaaacaaataacagtaatttggggaaatgttagtgtggacaaattaaccgaacggaatctaccaaattagaatcaaaacaaaaagaatcgaactaaaccgaaccaaattttttaatatcaccgaatagatattaaattctaaaaccaaaaaaactgtaattgaatcaatatcgaaccaaaatattttggatatctacccaaactacaattatatatccaaaagtattagttatttatagacaaaataatcaaagagatttgaaatatatataaaaataataaaaatatttaaaaataaccaaaaaatatccgaatatactcaaaataaccgaaatatcaaaaacgtctaaagcaaaatacctgaatggatatttactttttaaacctaaagaaccggaacagaagcgagatttcaaaatatccgaattgatactaaactctagaactgaaaccgaataaaaccgaaccaataaccgaacgctcatgactagtgtatatacatacatagtctacttgtaatatgtggacgtatcttgctagtgatcaaaagtgtaaaagttttgataccaggtgtagaattgggttttaaagagtacattcttttacagaatgcaaaattaatcggaaataccagaagactacatatatgttgtggtctcgaattcataaatggtatatatgatgcatataaaaatcgtcagtaggaaatccatgtattgcagggaaaagtacacgtcgtgagttatttgcggatttgttcatcatttgtaaaagaataagagcaagatatatatatgatgataatagatgacaaacaaaaaaatacaccagcctactaattttgcacttaagggttgatatggtgacaaactaataaataaatcagttttgttttttcattttgtttttgtaaatagacatttttgatatgtgttttaaaataacatgttattttattttacataattaaaaacatgagaaaatatttgttcatgattttaccactaagtcaatttccagaatctatattattaattgggaagcattgtgtgaactaaaacattgtaaaggtagtttaaaattaactaaatgaattttttgcatggataatttagtaaattaacaactactacaactaaataaatatcttggattttgttcttttaaaaaatagaatttaaaattaataaattcataactacctaatattttcgaaaatcatttaaaaacgtttccataacatatcaggctattttaattcgaattgtatatatgtaaatttatttattctggtaatatattattagataatttggaaacttcaatctaatttaataacaaattatcatttagtttaaattttaaacaatttccttaacaaaactatgttaattgtttctcattagtacacataaaaaaaacaattttaaatttgatttagcatattcaaaagataatttttggattttagatttgtaaatatctagaagatattatcagtatagattaaaatatttaatattttaattagaatttaaatgatataaacttttaaagtatttttttaaacaggttaattttcattattttaaaaatatatcactaagctaaatttgaattatataaaaaaagatatatttttaaacgtattataataggtacaagcttttggaatattcactcttctagattcgattatttgttattttttaaacagtaaaacaaagtttaaaataccaatgtttaaattttttaatgcaaatattcaaaatgagaaaatattgattcacaccaatatttttattattttttttgaaatttgaatgtctttttttaggagcaaatagtaatatgattattttgacagatcaataattgtattcgaacaataataactaccatatttgcgataatgcataaggataagtttaatccaaaaaataccaaaattcttgagatcatagtaaagtttagatttaaaaaaaaaatattttcgtcatcctaaattttaaatacgcaattcagattagttttttctggaaagctaagattgaatccaaattaaaatataattttgcgtacaatctatctcttataattataaatgttatgcatacattcacattggctcataatcaatctagaatattgattctttaaataaattacttcatgttctaacgatgtttatctcctaatattactatccatttatgcatattcttatagatttttctttcagggtcaacactagattacaagaaactagattatagttatacaatcttaaacaataaacaaaacaaatataacttaatttaattttttatttttaactaaaatccacaaatttattagtttataaaaaaccaaatactattacttaaccatataaaaaccaaatactattatactttaattataagaactacatcttattgaaaggtatacactaaaaatcggttttatatactccaatatcataaatttataaatcataaattatttttaaatatattaatccaagatgtaccacatgtcaatccctcgattcttttatatattacaataacaatatttaaaaataacaaaataatttttcattttacggaatgaagttatatggtggaacgggtttgagttgatattaatacgggaagataatctacgagtgaaatctttgaattaataattataacataattatacaatcttaaacattaaacaaaataaacaatatttacaaaacaactatattttaaattttgaatttttagttacaaaaaaatcgaccaacggtgtaccggggagtaaattttacattatatcatctaattgatcaaatttcaaacaaaaacaatcaatttatatatacatcaaactaacaaaaatacacagattttccaaatatctctattttattccgcaaatcgaaacaaatctaacaatctatttactatgcaaaatacaaataaaatataaataatatatattaaaaaaattagatattttatcataaataacactataaacttttttatgcatattataatttatatactataatatctttcactaaaaatgtattccaatatatttttttaaatatgaaaatccacacgtatgtgcgggtcagaatctagtaagtatcaaaattaggttatccaatgaatctcaaaatattatgaccattgtaagaaaaatactcttttaataataattttaaagagaaataacatttaaaaaattactaatgaaaaaaaaatgaaatgattcttccactagttgtggtttcctataaactgcatttttcttctggtatttattataaataattaaaaaggttgaaatttatatttgttcatatgattggtcatgggaaaaagatgaatgacttttgtaatggcttgtagtatagggtgttagtgagcttagtggataacttttactttgaaacagatactatctttggaatgtgcttacttgaaatatcgtaactcgtaagtaagaaaactatatatatttataaaactctgcatgtatattaaccccaaaaatgagtagatagggttctcataacacttcatctagttgataattatcttcttctttttttctttcaaaaaatcagccaaaagtgaaaaaccaatcaagattaagacattcaaatccgaaacgaatcaatctttttctttcttttatattccctgtcaaattcgataatgaactttgtttggtggtggattacttatgctttaattatagctaaaaatatacagtttttaggcgaaaagattactatagaagattagtatatttgtatgaaaaagtctactagatattaattaattactaattttatataatttagcttgaagctgttgaatatattccctaaagaatggaaaacgaaagaagaagcgctcgttgtcataagacaaaacatttcgagtgttttattcttccacatataccttttttatttgtcttttgactgtttcattctaatcttccttgatttttaacttagttataacctttttttttctaatgatcattattcgacacctttattgtaaatacatagttgaatatcattataataagattaaaccaaatatctcaaatgataaatgataatgaaatataaaaaaaaaaaaatctataaaacatttagggtaataattttctatatataaaagtggtaacaaaatgtggaacaaaagtcataatgatattaagcccccatcagtcatgaaatctttttaaatttttcgaagtagatgataaaattagctttctgactaattaataagagaatcaatcaatcatcgaaggtttgctatatcaatcaactacaaaattgacatgtttacttacatatacaaataaggattgttttgtaaagccaaaaaaataaatttatgacactaatcaaatttagggtgattaacattgactgactaaagagtttggcacttcgttgaaatttgagagagcaatatctagaagcataactaggaaagaaaagcaagaaccaacaaagaaacagtagattgtttggacttctattacaataatactagcactttaatatagagaaacaaacatacaatatacacactttttgtttgattcgatcatttcttaataaaaaaatgtttgaagaaagttcaaaagcaaatactaaaaaagaaacagagaacttggatgcctttgggaggaattaaggaagataaaataaaataaaatggacagaccaaagactcttaaagttaacaatgaaccatttgagattggtcttgtctcataaaatctcaacaaccatccgattgtattaccagattccacgttacttcatcttcatcttccctttgagatatatatactcgaataatatctcattactatatatgattttcttctttacgttgatttttgttttgaatcaattgttacatatgatttaaacgtggaaaaataattaaccgaaaatatagctcattacctgatggatgagttcgacgaaataatttaattgtgttagaggaaaaatattctatgttatgttatatgtagtattaatgatttttggcaactcaatgctaacttcttaagttagctattgattgtaaacaaaattgaatactatttcaacttctaactgcaagaaaaatatgtagtaaactagaatttaacccgtggtacaccacggggcaaatattttttcatatataataaaattaaattttatggttttatatttagtattaaagttatataattttatattaatattgtaattaaaaaaattagtgatgataaaataataaaataaatatttaacatgtgttatatcaatccaaacccgtctcgctgtatttcatatcaatccaaacccgtcctgctatacttctcgtctcatgatattttgatttttttatgtttaaatattaataatgtttcataaagttaaaatatatcattaatattctttaaaaataataactgtttttgactttagtgtaatgccattctttgtaaattcttactttactaacacaaaagtactttaaaaaggtacttcaaatttttaatatatataatgttaatttttggtaaaaattattataaataaatatttagtttaatcataatttgggattgatatacttgtttttgactaactattttttattttaataacctaaattttgtcattttgttaatattatttgaatcaacaatatcaacttaatacatgtacaatttatttatcccagaaaaaagaacaatttttttttgtacaattgcaaatttaaaacgaaaagtatggattgagaaataatttgggtttcaaatttttattacgtaattaaatttttaatgaaaatattaaagcatatattgtaatataagatttgatttattttattaactgaaaataaatgatttaaaacgaaaatcagggtgattaatgctaattgaaaagatttaaacgtttttgtgatttttttttttagtttcctaaattttagtaacataatagattttatatttagatttaaaaataagtttagtaaaacaataaatgttaatgacatgccattgtaaataagtgtcaagtaggggatttatttgttaaagtggctgcaaaaatgtatatgtagatagaaatcgaacctcaagaaattaacaaaaaaaaaacaaaaaaaaatagggacttcaaggtataaaaggttgaattgagtttgatggactatcagttatgaaagcttgtggtttgggattaaagaaagatcagtacccatgggttcaaaacaatgttcaaggttagctatggaaccatattaagaaagaaagtgaccattcgggtcaacaaaagagtgttaaaagagaataagatggatcgaatagtaaagtaaaattatggtcaagtatctcaaacccctaatgagaaagttaaattcattaaaagtctaaaattcatagaattgctttgaaagtcatgctaatttcaattaaggtagaaactttcaaaagtatagttccaaacaacgatttttcaaactttcttagtgcaatatcaaagaattagcaatgacatgaactttattataagcttgattatttttaggaaaaatgtcgaaaaaacgtgaattttcgaatttggaatgaaaaagtataaactttcgaaaggccataaaaatcttaaactttggtttgactttttgaaaaatgagcaacttttgttgagtaggccatttcgggcatgacgttaaatttttgttaacagagtttattttgtgttaacagtctccattgaaccaagcaacatcgttttatattcactcaaagaaaaaaagaaaacatatactctgaggatcgaacccatgacctactgatgataataacaaacttgcaaccattttgcttctttgatccatattctcttgaccatttcaagagagatggcatttatgttttcaccatatttcataacacatcttcttattctaacaccaagagaaaaaaaggatagtctcaaatctctagtcttggtacttcatttaatggtggtgcgcttgggaattcataaaatatcccttatactttctcgttgtcatcagaaacatccatgatgcttttaacaaatagtcaaaagtaatagttatttacgaaaagtagataataatatagataacgaaatatagatatgaatgctagatagtgaagggatgcaactttatatagaaatgtatgaaataaaaagtaataatacttatacctaatctttttaagaaggaagaaaaatatttctagaattgaaaaagacatgaacgtttaatctacacaacataactgtttgtaaaagacacaactgttagaataattttgttttgatggaaaacacgacttaaaacatggtgaaaagacacaactctaaataaacatatatacaattggttttttaaaatagaaccgtaaaccatatttttaaaaacctataccaaacattacggttaaaagatgcaaccgtaaaaatatttatttgaattgcttaccataaaaatattaaatttgtattgtgatcatcgttttgttcatatataacatgtaatattatagttttttcagggaaaaaatcatataatgttgtataaacttagaatttataattttacatgaacagtgactagaaagtcatgttagggtaaaatgagagagagacaaaagtagtgttaacttttaatttttcttgtctacggttttacgctcacgtttcacctaaataatctttcacctaatttatttatagatagctattttgttagctatataaacatattctcataaaagaataggtacaaataattacaagcgatacatgaaaagcatgtgggacaacttaaacgaaataacacaaactaaaccaaactttatttcggttttgataacttctaaaaaggaccaaccaagattcgaaccaaaccggatccaaaagtgcccttacaaaaagctgttttgcctcaagcatcctataaatacatcccaaaacccatctctccataaacacatcaaattacacactatctacgaaatttacatttctttttcttcattcttaattgctgttcttgttctgtctctcatgggaggtcaaggcagaaagaagttctcgctctttagcttctttaaagcaagaagatcgtctcatcatagagttgaagctgatgcatcatgggacgacgtcatttacacaagaaaggcatgggccagcgacgaggacaagcgttattgggtagctgagccaggtattgaccgtaaagcttctgccttcatcgccaagttccatgcctctcgtgtctctgagtccgaacgccaaactcttcctccttgccaatcccatcatgactagtcatctcatcatcatcataatcaccatgatcatgatgatgatgaatgaaagaaggcctaggggatgatttagtttggtttgctatgtatatgtcttttcttttcgatttgtgttgatgattatccttacgatgatttgtttataaaatgtcttatatgtaggttacattagtgttttaaatgaattcgacagcttgaactttataatatgcaatttacacctattttatgtgttgaatattatcttattatcgataacaactatactctaacaaaaattcccttggtatatgacatatgatcaagaacaacatgtcgagcattaatattatatatttacattgatatgagtagtctagctagtgaaaattaagatcttacgctaaataatgatccatgtacatctatctctagcttagtaagtacttgcactaacaagtccacgatacttatccgttggttaaacagtttagctactataaaccatcacaaaatcaggaagtccttaattaatcttattatatattgggtttttgcggccaatatgtcatttcttttatttgttactttgttacatttttactatagtaaataggaagtaagtaatgataataaatattgagattaataaaataagaacaaaaagatttgggagctagctgtagaatctagaacaatatgtggatgatattatgttcccacatatattgtagtttgtacacaaaggtacatttcttagagtacattgattccttagcttttctttcttcatccctctcaccttcctttaccaattattgttatgcaactatccttttgttttcccatttttaaaatttaataatagtactcacttaaaagagagatattatcttagtagtatataagacgcaaaccgaagaaactattaaattagttcgaattttcttacagcatagatcttgaataaagtatatacataggggtataactaaattcatcaatcctattctctataatagaataggaaacacaaaaaaaaactataaattaatgaagtataaatcatcgtttatataatacagacaaaccagttaaattaaaacagtagttttatggtcgtggtacacacacacccacacccacaaacacaacctcaactttctatttttcttaaaataacataggaataataaaaagatattggagtgttagctgcagtatctttgcagttgaataattcgctcatagccaatatatatctatgtaaattggctgattaacttgatctttatgaatattgctttacctgaacaataagaaccatcttttttctttttactcaattacatcggtcaaaactacaaacccggtcgggcaaggtatgattcaacaattattttagttctgtttattaggatacgcatatactatggtacatttatgtaaaggacttatatgtcaatctccttaacctagcttgactcttaacctaaagtagtaattaaagtctactctttgtataaatagtgtactgcttcatatcaataagatcatccaattctataaacctacactgttcaaccaaaaaactttcgaaataatatttgattagccaaaacaaagtttaatatttaggtatacaatatactttgcgaacaaaatgacaaagggaaaatagtccgaaataaatttatcagcaaagtgaaatattatatgattcgaggccaaccggttattagatcattaaaatggctcaaaaaaaggttgagatcaagcaatgggtcacataaaagtcaagaaaccaaaagttaacctattatttctcaagctaaggattttgcagcaatataattcaattacaaatttacaaaacaaatgaagaagcagaaacaaaaaaaaataaaatgaatgaacgatattagaatagtaaagagaataatgtacgattctcctaatgcaaataagtaaagctaagttttactcgatctgttggttataccaacaaccgcacaatgcaatagatgatggaagaccacatgcaaactgagaagaatattaagtagtaattacagtcacatcttaaacttaataactttttttatgggtttgattcttattagtttcccagtcttaacaaatgaaagagattcacttaaatcgggaaaaattaattgacaagtcattgagatagataatacctcaatattcgaaattatctatgaaaaattctgtccgcttcataataagtgccgttaaaaaaaaaaaaatggaagttgaattttggcattatgttctttttttttgtacttttttcctttgttaaattatgtatcatatgcaaattttatgttaaaatcaaaatgacatttgtttttaaacaaacacacaatgataaattaaacaaacaaacaatgataaaacaacaattaatttaaaatggaattgcttttgatcaagtggttaacggtccatctctgcagcctgcctatcgaaattcgcttccattagatcgcattataaatcggccttcccaattcaatgatgacaaaaaaatagaattcatataaatgttttaaaaattttgggtaacacattcaaatatactaacgtgctgttatcgcaatggtaaatcttctaggtggagatgttgggttcgacgtccatcaaaaaagatcttttttccaaatgagataaatgtaatctgatgtggatcccgtctttaaaaaatagagcatttgagcttgaacttacatatattaaaaaaaatacattcaaacataagtatttcattcaaggaaacttatttgcggatcaattaaatctttcaaattggtcttgtattaaaaaaataatatactgaaaatccataatcttatggctataacggaaaattataaacaaagcaacaaaactgacattcatttgcttttctttttactagatgagtatccacggtacgcgtaggtttgttttgaaaattgttaaaaaaaaatacattgattgttctttatgctaatttatattttctatttgtttattcttgtattgttaataaaattagattcataatatttacaatttttatggttagatttatttgtgactcgaaatatcaatttatatattttgtgtataaagcttattatttataagattttaatattttttcatttcatgaatacatataacaacattaatgatattttgatacaattctgtgtaattatgttacttttgtggtttaaaattttcctaactcgattataaataaatcaattccttattttatgtacttcaacaacattgtgatacactcataattaaagtttgcattaacatcaactgacaaaggtctgaagagtattcgtacaaaaaaataaaaagataacaaaaattgatcgtcattgaaatcaacacttttaaatcttttgccattgcatatatcaatattagaaaaatgatcgtgtctttgatgatttaaaaattgttcaacttgattataaataaactatttatggttttatttattctccagatataatactccaacaacattgttataggctcatgattaaatatatagaattgatataaaatgaataagatttcaagagtattcatatgaaaaaaataaaaagaaagcaaaaattaaagtatcattaaagtcaatacttttagattttctgtcattgcatatatcaatatgagagaaatgatcgtgtatcacattatttggtaggtctaatattttgaaggtttattatttgaaaaaacttgaatgttaaagttatcaaagactcaaaattaaattactaaactaataagaggttaggtagcaaacaactacaacaaaaaaaaaattagtcattgataataaaaaataagaaaataaaaagaatataacgaaagtagtacttaatttgtttacataattttatttttttatttttactttggagaaatcagttaagagtaggattgattatacatttaatttgcttatttaattttattagttttattaatttaaaaaacatcgaatgacatatgtcattttgttgtgtgatgatgtgtcatttatacggagagagttaaccaactttcatatatatgatttggcttagttcccaaattataatgaattacatagttcatattaattaataaaaattagcttgttggataattaacctcggtttggtcaaatactaaactgaatgtttttaaaaaattatttggctttggtcttaacttttttttattggttaaagttttgacctattttgaagatcatattcgaccaagtcgacaaaatagagattcatgtttttgtgtctagctattgatggttttgagttgttttagatttgaaagacaatctaagattcacttttaaatagagatattcgtaatgcctagattttttgtctgatgcatagagaaagtgtcaatgtctagagactctagtacaggatatttagaatatggtgcttagctttattgaataattagtttttgaaccataacaagtattcttgatctggttctaaatcaaaatggcaaattgttatgaaagtggagtatcgatggaactaaccttttaacactacccaatgtttcgtcaagacggcgggccaaatcagtcagtatataaaattttgctataatttcataaatatatcattatagaaagaaaaatgatcataaataattatttgtttttactttcttttttacgtgtttaagtcaataactagcgtaatttctcgatccatgctagtgactatttatgctattgtttggttatgtttttttttatttcaacttttcatttatatattgatgattattattttattttgttttattttatctcaactttttattaacgatggttattttttctggttgtattttttatcgtaactttctgtcaaaatattgacaattatttttctcggttgtgtttttttatcgcatcttttcgtaaaaatatgtacggttatttttttcaacagttatattgttcaattacagttgtattttttttattttacagtcgtgcctttatagttgcatttttcatttaaagttatgtctcttaactatatttcattgcattgtttcgtcataatgttttatatgacgaattcaataggtccgtttcgggcgatggaataaattttctcgttgaggtgcataaaaattctattaaccttcacaaagttatgatcataattcattcacagagatgaaaaaaagaaattattcaattcccaaatttgggagaaaatttgcaatttcaaacgaaccggttgctgatcaaactccggtttaatccgattttcccagtttagaattttattttatcactttcctacaagatgttttggaatgtcttttctttcttatatttctttgttatgtatttgttaataaaaatattcttaactttataagataatgtttttaatcataattcttttttttacaattttattcagaaatacttttaaaaatcttttgaaaatatttatggtataacgttaaacttggtagaatttatgtaataattaaaatatttgaatatattatcgtagtaacttattacataaacacaatcaaatattttttataaatcaatacataacacaaaaaattattcaaaatgactttccacacgatattgcagggtttttttttttttttctgcaaactgaattttattcaagactgcaaatctttacaaagaaggtttgttagccattgtggctgattacatgaatctgcttgaaagactgattttgtgaactctgaagagaaactagatgatgagctatattgttacataggcgattagtgaatctaaaagtaactgatgaaaattttgaagaccaataatctatatcatgcagaagactagcaatttcacaccgagaagatttgccattgatcgcattgatgagcacctcgcaaccaccttcaaattgaaccagtttgtaacctcttatccagacttgttgcattgccacaatgagagcttttgtttctgcgtccaaaggggtgatgacatgatccaaaatcgatgagccccaagctttcgcttcgccgtaatgatctcgtaaaatccaaccacccatgccttgctcgttattttcctgaaaaccagcgtcaaagttgcatttgacaaaaggagctgcatgtttcatccacgaagtttttccttttgtctgtattctcgcgggaagcgacattgcttgcattccattaataattgttgtccagtcatatacttctgcgactgtttgttgaattaccattgatggacattctctgtagttattgagcacaagattgttgtgagccttccaaattttccaaatgagccaaaaatgaataactttttgttgtgttgtatgattattgttataatatgcatcaagtaatgaaatgttctcttcgacatcatgtgtaatggaaagacctgtcagttgaggaaggtttgagagtctccatatcctcattgcgtaaggacaggtgaaaagaacgtgacatattgactcctcttcagttaagcatcgtgaacaatatggactgatgttcatgcctcttgtaaccagtctcgaacatgtaggtaaagctttcgatatggccctccataacatatatttgattttgggaatgatagggagtttccataccttgttctttaaatttacagagccgtgtggtatcaatggtttggtgcgaatatccgttgggtcatgagataggaaccagtatcccaacttcaccgtataatcgcctgaaggagtataatgccagattaatctgtcttgatgatttccttttgccaaatgaaactaacctagtaaaaactaacgatattatctatagttaaatgggaaaagtgaaaaatatccgaacttacaaattttggctaataaaagatccaaacttaagcgttttgaccaataaaagattttaacttatttattgccaaaagtagttatcaaatttttttttttctagcgaataagttcttaggtttacatgagctcaattagttcattgatcattgttattcaaacttaatgaagtgtttagtttccaccaaaaaaaataaaatgaagtgttaagtttgactaccgttatgtttaggttagtgacaaaagttatgttattaaaattgattagtgtcaaaagttaaaccatgttaatcttttatttgataaattagacgtacagatagaaaaagtacgcatctcataacagttgaaaaacaataaaatcattgaaaaaagtttatgttcctatttaaataatttttagtttaatttttacaaaatttgttacgttttcttttaaagtgaaaagctttacataaaacacaaggataaaaattaattacaattttaagaagacatagtttttatagatatttttttgaacatgctataattattcgtttgaactttttttttaacgtgctcgaatcaataaccagccaaatcgtaatgtaatttctcgatctatgctattgaccatccattcgaaacacatcacattttataaaccaagaaacataatcatctaagaatagtgctatcccatatttcatgatttggtctaaagattcttcaatagggtttatttatgcttagacctacaagaaataaaagacaagctagagtaaaagtaggctataataattgtatacaaattgttctgaagtaacagattcatgatttaaaaatcaaatcaagcccatcaatttggctttgaaacgctttgtgtcaaaatggacaagacatgacttccttcgtgtctttcgtattagaaccaaccatctaaaagctctcttcctttttctctaccaacttttgtcttctatttaatttaccaaatcatgggaattaaataattagatgaataaaggatcggaataacaagttctatcgtacactgtaagagcaaaaagaagaccgaaatcttggttgaaattgttgtcgaaagatctcattcacgagatcacttattaacttacgtcaaaaaattatatcgaatcgaaagatctttgtgatattgagtaacgtgaggattttattttggttaaagactaacatatgttgatctttgataatcaaacctagtaaaacaaaacatactaaagggaaagagagacgatacatgcaattaatgatttcaatcctccgtttaagaaactctgattttggttagaaactattagctattcattttggatatcgaaaattcgtttagatctcaatgcaactaagaataaatgtgtgtaaaacagaaaacgatgaaatctcaagtgaagtgatatatcaaggttttaatttttaaccgagtttttggtgttttatcattgtgtttttattcgagtttttagtgttttaattagtatattagaatgttttcaggtaaacatatgaaaatgatgcaaaacttgagtcaaatggtaaaaaggattaattttcttgaacaagacattataccggtccatgattaatcaggctaagactgatccactcttcaaaacttcagaccggtctaagcagaccaattccaaaagcatttatgaacagtctatcctttagcaagccttccattcaagccataaggccggtcccaaagattgcttcgtctaataagaacacgtacgggtaaagacacacctttgaagaccggactaagacaccgaaaccagctccgttgcaccagacccgtccagtcctcatgaagtctaatccaaacagtccgaatccaatagacctgtcccaactccttcacgcgggactagttcagtccgagaaagaaagagaaggtattcctaatctgtttgggacttcgccaaactaccgactctaagaagatctaggcctattagacggatttcaaaagagatgatttcatactcttaaatttagagaagagttccataacactcctttttaatattttcgatttatttatgcattattctttatatttattttcatttttttaccaattatgagtatatagtttcattattggattttagggattcaaaaaggattcatgaatcattagtttagaatcattagattaagtaagcatcttaagagttatatgtctactgttattcgtaatgccgtaactagtttgatcacccaactacttatcttatgtgaattaacgcagtaaaagtggtggaattgttggaaaatatcctagccaacaaaagcattgtttacgaagttttgtgaacctatcaaacttaaacgtttataaataaatattttcatgaaatccaaacgaaactttaggcttttaattggttagatatcttgactgaactgtcaaggaaacgctctctgacccgataatcgatatcttgattggttagatggagctcgactgttctctcatctcttcaacctctgttaacgattctcctgctgttttggcaccccgaagagccaatccttaccaattatcccttatccttcgaagctgcaacgtatgggtttgctcttcgcagatctataaagtttggtacgctctcgactccctctgatgcccatccccaacggaaactaccggagcaaaacggcggcggcggcggcggcggttctaacctaatccttctccaagtcccccgcttgggccatttgtcttgccatttgggcttaggcccaaaccgtttatttctacggcccaacttcaaaaggtgctcttcaatttcatttttacaaaagcccaggtattgcgtgaagcgtctgttgtcctctcttagctttaagttgtgtcgattcatggagtcaatggtttgtggacgccacttgatctcatatcatacctctttgctctgtttgctcaacatttatctgaaaacctgccctttagaatcacctagaagttctatcaaagtttcccaaagcttgaagaagactctctcggatagcttacattatcacggccgtttgcaatggttgaggcagcgcggcactatgatctcggctccaaggagtggggattaccgctgcttcctcaaccatgtatcatcttatcctttgctcaccgtgttctctcttgtacaatttgccatggttcattcggctatatttgtgaagctcaggtttatgttttgtctctatgtgttagaccgactacaaaatgtgtgtggattccttaatctccatggctcgtttcatgtgagagaggacccaccgattttgttacagcttatcacttatcttctacaaaccctttgtgtagcttcttcatatacattgagtcatgagtttgctcttttgaagatctttggaatatcgtccttaacccatccatgtgacatcaacatctttgtccaaacctctgctaaagctctacgttgtgtagttctccttgtgcagacaagaagattgccgttagccccttcatcaacgccattccgtctcttgacattggcaattcgttcatccaatgacttgttcttggaagaagcctcgacaacctttgacctcacatgctccacaaagcttcttaccttttggttcaaagctctcaaggatcacttgccgagtacctcttgttaccttgttattttccttgtattaactttggggtatgccctttattattgtgctttcaactttggaatttcagatttctcttatctttatatttgttatcttttctaatggaatgaaaagaaacttttgatgaaaaaaaaagaaagatatcttgactaatactatgacagtgacagtagactaggcttgtttattgttttcatttctgaactagtttttacaattccctatcgataaattctggtttaattaattgatgatacatggagattgctctaatgacaaatttacatgttatttttgccttgatttttttagtttattttacttataatattcagcgcgcaataatattttgttttacattaattcaaatctaaaagatttgtagtgcgtggcaaatagtttatgtggatttgatccctaaacattgttgtgattgcatgtacattcgagggttaattttctacattctagggttaattttctatctaaaacaaacaaaaaaaaatccttttgctccattataaaacggttaaaaacaaaatttgcagaaaattgtaaagtgaggactcgaactatcacctcttacttaagggtactatgaggacttaacctctctcccataataacctatgtgaaagtgatgctcctaaaattcttttaaagttatttactgcctaatttttttgtttcatgggcttttaaggtcgggcagtgtctagtaacatcatctatgtaacatgcttgttcccactaaattctggtatgtggtcgatcacatttcaggttatcatgacttccacactcaaaacacattctcatagccatccaatataaatatggatccacacctaccacacacaacttgcaatagttcactagatggtcgagtcagaacttctgagaggtagttaacaacaaaaatgaaaaaaacataacttgatcttaatcataactaagggtgttaaaatggttaaaccaactgatacccaaatggatttagtacttaatagatgatgagtaaactcaactcatttaggaaatgctctcgatcaaccaataacttatttaaagttaatggattaaagtttaaataagtttatcaataaaataattaatagttatcacactaccatcatcccgatcgattaatttgtgatggtttgtttttcatgaactcattttaacccaacttataaaactcataaactatttggactcattaattccataagagtcaattttaaaggattcatcagttgagttggattgagttgatccaaagattgaatacacatgataaaatattattttttgaatttataagttaaacaaatgcttaggtaactaataataatatttattagattttaacccgcgatacactgcgggactattttgatcttttaagaacaaaaatttaatttgtttactcgatttaaaatatatgatttaatgttttgtattttctgaatgtacaactcttatatctgtatattatttagtatataattagtattttgatttttactgtttgaaaatattagaacaataacgtacagttgattaagttaaaatctagattataactaaataatttaaattatatttattttattgatattatttgttttgtttagtatttaagataatataattgtattttgattattatatgtaggatttcacccgtggtataccgtctcgtattactatcgatccaaacccgtcctaccatctaatcccatttagtgaaactaaacatatttaatggatttcactcgtggtatatcgtctcgtattactgtcgacccaaacccgtcctaccatctaaccccgttcagtgaaattaaacattttatttctgttatttttattttaataatactttaatttaaaagatacatagttcagattaatttaaatacatcgacaaaatacaagttttggtcgctcttcaaacttcttgttcataaaaaaacttgtgtggttaacaatcggatttgaattcgtcatcgccagatcagcatcatatcacgtcggattcatcttcatcatctccacgttagagtagtttcatcaccaccaccataagtaatcactggaggtgttcatcaatacggcatcaccgtacgtcaatgttcttcaacgtagaaagaataagaaacaaaattattgatttcttatatatcaagtaaaaatacataatcacgtggtagaaatagtttcagtattattcaaatccaaaggagtgttaagattaaagtacctttggctctaatctttccttacaataccaaattgatgacttatttagtcaaaacaagtaaggtgatgaactttgtttctttgacatattgtttcttgtaaataagttattatttatgtttagttgacctcaattagctcaatgttattcaaatttaatggagtgtttagtttgataaccgttagttcaattcggaaaaattaatttaaaaaagatgataagtgattcaaaacgaattagttgacgacttttaaaatatttatatatatttaattttaatttttccaaaaagaaagatagcacttaatgagtctagccttttatttataagagttatagacccaatcaaactataattacttttgttacacaaaactttgggtatattttagtgattaaactttatattttgtaaaaatatagtttacccttacaaaataaaattatgtttatataaactaactatattatccttagttaaatgggaagagtaaaaaaactctctacttacgcgttttggcgagtaaattcttatttaggtttacttgacctgaattagttcaatttaatttaaacttaaaccgttgtctctaattcagaaaaatcaattaaaaatgatgatttagttggtcaaaatgaataagttggtcactttttaaaatgcttatacatatattttctaaaacatcttatattgtgaacctaaataaaatatgtaaaacatcctttaatatgaaacaaagagagtatactattttgacaaagtaggtttaccattcgtgattcgactatgattatcattttttagatagcaattatggagtctagtaaaaaattttttataaaaaatataattacccactcaaaccaagattctattttggttatgcaaacctttggctattactcattaaactttatattttagaatacagttgtccctattataactttaaaaataaaactatttttgtagcaactaactatattaccttcgtcaaatgagaaaaggtaaaaaaaatctcaacatacacattttgacccataataatcacaacttacacaatttggtcagtaaaaatcttaacttacgcaatttggcgaaaacaaaatttgaatatttttattgcaaaaaatagttatcaacttatttgttttgggaaataaatttttatttaggtttactttacctcatttagttcaatgttattcaaactttatggggtgttaagtttgattatgttggctctaatttggcaaaatcaattatatgcattttgtctatcaaaatcccaacttacgcaatttggccggtccaacttacacaatttggcggtccaacttacgcaatttggcctgtaagaattctaacttacgcaatttggctaatacaaaatctcaatatttttactgctaaaaatagttatcaacttatttgttttagcgaataaattcttatttaggtttattttatcccaatttgttcaatgttagtcaaacttaatgtagtgttaagtttgattactgttggccctaatttggcaaaatcaattatacgcattctagcctatcaaaatcccaacttacggaatttggcatgtaaaaatcctaacttacgcaatttggccaatacaaaatctcaatatttttactgccagaaatagttatcaacttattttttttggcgaataaattcttatttaggtttactttaccccaatttgttcaatgttattcaaacttaatggagtgttaagtttatcaatgttggccctcatttggcaaaatcaattatacgtattctgcccaataaaaatctcaacttacgcaatttggctagtaaaaatcctaatttaaaatctgaatattttattgccaaacctagttatcaacatattgtttttggcgaataaattcttatttaggtttacttgacctcaattagttcaatgttattcaaacttaatggagtgttaagtcttaaatcacgaccttttatacagaattaaacctcttaaatcttgaacgagcttggttgtcgaaaagtgatggatctaaattacaaatatttgagactggacacaatggcttggtttccatttgtgtttatgttcagagaatgcaattcttgtgccattactgtatagaaaacatgttttaagaactgatatgatgcatgcatttattcataacgattatatataaggagaaaacattaattaacgaaagaaaaataaatttcattcatgagaaaatacaactacatgtgaaaccaacccaaacatgtaacttaaacaaacagaactaaaacaataactttttattgatagttgaaatgacaacaacttaaaataagatcaacgatggctcaccactgtttcttgttcagatccaaatcatttgtggtctgtttcatattcaaagtaatttgaatttgatctcgaaccttgtcgtaaaatccaaccgaagaagaacccatctcaaccacaggcatgacactagatgttgtaggggcagcaacaggaacgagggcggaagatggttcattgttccttttcagaatctcgatcctacgattaacatctttgagttgttgttcaatgacataaccaaaatctcgaagctcagttttttcgatactagaaaccaaagttttgccactaagacaatcaaacataatgttcttcatctccaactctttgttctctttccgcaacttcttccaagactcggttgctttggtgatcctctgttggagaaaggtctcttggttcaccatcttcttggtcttgtccatcaccgacatcgtcttccattgggacaccacctggttcgcagcctctctcgatggccacacctccgggttcagctcgtacggactgttgacgacagcaaagatcgggacgccacaaagaattcccaactcttgagctttcttcaaaagacctttctttcttttcttgaatgttgattttcttgctgtttcattttctatgaaagtcattttcactttctgtctcgtcatgactttatttttttgtgtgttatacttttgaatggagaagtgctttttatatagaagatctgattgttggaattaagcaaaatttatctcagttcaaccatatatatatcatacctttttagggatatcaaaattggtaatacgataatggaaagaaatatatatatgtttagaagtaaatttttttttcaattttttattttttacttaggaattaaggagtctactaatctagttacaagttttttagtttgtttgtgaaaagtatagttacactttaactgaataattgtccttgttaacttttgggtatagttacttcttaataccaaaattttgcataacaagaactgacacttgttcaaaaagacttatagacttatagtcttatagtgctgagtttttaaaatagtttttatccatgaccagttgaccgaacgactattctttatctggttcataaaatattttttaaaataattgttattactaataattatccaaacatatcttatgtggaaaacatttactttacaaatatttttatcattattttttctgaaatgttatatgtatggaaaacatatctacatataataaagataaatattacatagtttgaacatacatagaatatatatctagatgattttactttatattgtggtgggtaatcttgactgaaaaatcattttcataaagattttttaagttttttttgcaaacaaagtataacaaaaaaggtcaagaatcaattaaaaaaatgtttttaaagggtaactacggaagtaatttaaaaaaaaaacattcttaagaggatattactccttccgtattagtttaggtttcgttctagcattaaaattttgtttgataatatttatcggtttagatttttaatgtagatgtttggtaaaaattccaattatattcttattgtttttatgtcattaccaataaaaaaaatattaaacaagggtaaaataaaaaaaaattgattttttaatttctgtaaaaacaccataaacgaaaactatttcaaaacagagggagtattagtttgtgtatgttaattaatttggaaatctatattattaccttttgccaaagattttgaaatctatataaaatttaaaatgccatgaaattttcaaaatctaacatgtggatttgaactagcatttataaaccattcaaaataattagattcgcccacatatttaatctttgtatttgtaactaggttttgtacccacgctatacgtgtgtatttttgatatatttcggtaagaaatacatacaattaattatattttttaaatcgaagtaaaaattcaattttatttcaaatacactatattaaaattataaaaatcagtagtgtttaagaatcgaatttatttgaaagaatcataaatcaattttattttttcatattcaattgaatgtcaacacatatgtctttgtatttctcttcacattcgttgtttcttacttttcatattcattcttgtcatcttaattattaattttcttttagccgttgtcatcattactttctcgttcacttcttcgttatagtcttcatcttcatcttcctcgttattttctcactttcttcctcatcctctctctatattattctatgtaaaatattcgttattatgtggttaaaaaacagaacgagaaatttaaacttagtaactttaaccaaacatagttcaataagcttacgaattaactcctaaaacgacttagttcatttcaccatctgaaccaaaatttgatcccttagttctcgtctcccgaacatgctatcaaatttcagattattccgagtacgttggatttttgtttgttgtctccacatatttgtttagatctaaaactttaaaagaaatcttcttgaacctgttgaagaagttgtttaaatctatattccactattcaaccttaggagcccaataaacaaattgtgagggtttagccacttagcccaaaacggacaatatcatattaatgtggaagttagattggacttggaaagcccaagagtattttggttagtgatgttgatgactttctagtagtttcttatgaggattcttcttatcaactctcaactgattcatatagggcagaataagatcagttgatcaatgcgcctgcaattagtatttgttttttcaaacacaggtttttcatggactctcagtgttacaatgttttcaaactcaaaaacagagtaaattcattgactctcagtattacatgcaattttaatttatgtaagaccattcaagggaattaaaagctaaacacaaatccaaaacaaatctaatgtgtgttattgtaagcctatgtgtgttagggtttctttggaaagtgatataaataggattgttatgtgtctaaaagatgtaaacaactctcgttcatccattttatgaaatattaaccacaatctctttgttttggtgacaatctaagttattttccctctttttatatttttgcacaataaagctctaatgaactatttcaaattatagcattttgactattttctatttcaataatcctttgttggattctcttacggttcatacaccaaaactattacattgtgagaaactttagatggcatggggtacatgggatgctcaagatgagacatgtgggttatgtcggatgccatttgatgcttcttgtcctgactgcaaactccctgaggatgattgccctctaagtaaactcctcggggattattgcctgttagattagatatatgagaatcttatatttgtatatatctaatatcttatgaacagatttatgcttatctcatgtaaccctatatatatatgttcaatacataactttccattcacggagattcatacaattacatggtatcagagctatggccattgccctatgtgtcgtagaagatggaaatataaagagtaactagagtgggaagagagagattttatattgcgccttgattagacatctagctttgtatccactttatagagatgtaataaatcattaatcagagttaagttcgacctttgtatgaatattaatggaagcaactacaaatagcaacaaaaatgtaatagagattttggttcatgacatgtggctaaagaaaagaaagataatttgtttcatggatatattgttctttttaatatttagcacccaatttcaatttttttcgttttaacatccgactaattttgagaatatacatgctccttttaagaaaaattagtgaatctataacagtaaaaaattagaaattaataaagcttaacctctataaattaataatatcgaaattatgatatttcaatatttatacagttattaatttattaattaaatgatcttaaacacttattagggatcaaagattttaatctatcgagtattaatttatataattattactacacccaaataaccaagtgccgcatgcttagagtttacatactgtaaaaataaaatcttgagttgtaccaaatttatataattagttcttaatttaacgtagccatttgagtttcggcccaagtggtcagaggaaaggtgtgatagttaactttaccaaattattatttttggatattatgaggtgttttgggccttaatcacttggctaatctctttagggtgagtgtaggatcgattagcccactcaccgagttttttaatgagtacttaaatcacgctcctctcccttacctctgccatatcttttagagagggaaagcttctttttatgacattgatcagattgtaaaatagatttctttgttttgtctcttccaaatcatatcttagatctatagcttaggtttagtgacttgttgttgttcatctctgtatttgtttcggacaataaaattccaactaagatcggatctgttttgttctcttctttctacatacataaactcaaatcgccgcagctattggttagatcctctttgttcaccgtcagctcaactcttcttatatatatacgagagtaatatctccacatgtttatccatggatataggcctattacggccaaaggcgaagcttcctactataggagcagattgagattatgaagatttgttttttctcgatctacttcaagatggattcgatggggttctctcgactttagcaacgggcagcgctgtagaagaggagcggtggtggatctgaagtctggcggcggagctgcgctgatcgtggatttggctagctacgtttgtgtcatctcatctccttctcgcgtgtggacacgtataccgcacgtaacacttttttaatctcgtccttatctttaaattttagtaggataaatagacttcaatttaaattgaagttgtaaacgctggtggtttgggcttttttcatcatctatataactcaatgggcttttcatttttatgaaaatgatcttgtggacaaaaaaaatgaaaaaataaaaataatgagaccataaatcatagcactatttgcaactaaacctaattaaatttactaataattttataacaaaatacaaacaaaaatttatcaaattattaccctcgattttttaacataatttaaaataacacgagatgattaatatttgcacaagcaaacaaacatgtaatgaaaacccagaaaaactaaatcttcacaatatgcaggagcaggctatataaaagactaatgatatatttgttttgacattaagaaaacagttagattttatgctgaatattatcacatacacatatatactgtaatcaatgctgtgatggtgtgtagatgtattttttgcaagttttttcttatcaaaagatatttttttcctaaaacagtatttaggtgatttacacagctctctagtattatcttatatagttatacatttttgttataatggaaagactaaaaactacccacactttttttctttctacatttttcttcacaaaataaagtcatggaaagtcatgaaaattaggaaccaataacacccccttagagtctaactggtgcaaaatttggaagaacaaattttctacctaatttttttgagcccaaaagaatgggaacaatgtttaaaaaattgacctaggcactgatcgatataggctcaaggcttctatcgaaagcctaactagcgcctaacgatttttttaacattgaataagagtagttcttttttttttgttatcaaataatttttttcgaaaagaataagagattattgttgcttttgccatttttcatagaatttttttgaaattgtaatttttactaaaatcttatggatatgccattttctaacactaaaaaaagtatgtatttccgatttttttggtaaaaatacgtagtttatacaaaatattaaatcctaagaacaagcacaaccgactaaaccaaaacataacgaataaaacacatgttaaatcatattttcgtagtgtgaaaaaggcaaaatctacaaactattcagaaaaggacaaaatccacagataccatcccaaaaaatggcaaatcgataattgattcaaagaataatagttcttactttaaattgctggggaaaacaattattctctatgtatgggtcctaaaagaattcaattgaaaatttccgtctaaatattgtaccagtcacatcttaaattttcgaaataaaattctacaattaaagtttcccacactacggtgagcaaatacattacttaataatctttttttgggggcaaaacattacttaataatcaaaatacataattaagttaaaaagagatcctttaaccattattaataaacaacattagtttttgtctttcgaaatgaagaaaacacaaatacaaacaattgaacacttagactagttcttctccctcttttgtgattagagattattgttgatgtaaggatcatagacaccggtggtggaaggcatgtaactggtggaagcatgatcaacggctggtagttgattggatggtagttgatggtagttgtagcagtttccgtccacgaaaggaatgctttcacgccctccaacatgattcatatgttgttccaccatcggattcatgaatgattgttgttgattcagatactgattcgaattcagattcaaattcagattcaaatttatgttgtagaattctcgttgaatctgattaaacagattattaggagcctggtattgaacctgattcatattctgattttgaaaaaaatcacaaacgttagtaggaacaaggtgttgaaacggttcatgcagattttgactcatattcatattttcatatggaatatgatcaaaaaatctactggaagcagttaccgcagttgcgtccgcatcaagaaaaggagtcatatcgcccgtaagaacatgaggattggtagcattaagagtatctacaaccccagttgtagcatgaataggagagtcggaaaatgactcatcaccaatttcgtcaacaccaattctagtaggaaaaggagagacggaagacaacaacgactcaccattttctttaatggactcgatccttccgttaagctgatcgagatatagatttatacaagattgcaaatcttgaaggtcttttgcatcataatgatactgggacattttgccttcaacacaatcaaacataaatcgtctaacctgtaactctcggttctcagcagccaggttctttagttgctcttttgctttggtaatcctctccataaggtaagtctcttgatccatcatcttcttggttcgggctgtcggcggcatctccagaaaccttgaagccacctttttagcaccttcccttgacggccatgactctggaaccggtatgaatggactgtagatgagagcacaagcttggacaccacacagagttgacaactcgtggagtttcttaaaaatcccgtctttcctctttatgaaggatgttttccttgatctttcattagctatcaaagatagcttcaccttcttcatccccatcaatttgttttttttttttgttttgtgtggtttgtttaatttgtttgctcaaaggatgtttatatagcaaagaaaggtgattctatagacactaggattcttatcactttggtggactaattaattctaaataacatccaggaaatctcttatcaattaattgaccaggtaattcattattatctatataaaaatattttttcttatccaaagtttggtacgtctgatcctaaataatatctgatgacaaaaaaaagaaaaaaatctatccatgtaatacgagggggcatgtaatataatattttgtatttctaagttttgtttttattttggcgaattaatttctcttactctcattgtttctttttactaagaataatttctagcttactttgttcttaaaatatgaagttttgcaatagttttaagtgattgtacttttaaaatacagtaatatattgtcaatgtatatagaattgtggtaagctagaaattactctaaagtttgttatctaaagtaaatttcagaaagtttgttatctacagtaatttaaagatgtactctgaatcatacaaataaatttttagaatgggcaaacaacttggaaaatatgcaaagtacatctcacagaaacgccaaaaactttgaataattggtatgaatgccctttcaacacaatcccttttcagtattgccctttcttatttgttattttcatttatacccttttttaatttttaatgactatttacccctatttaaaatatgttttaggtaaaaaaatgaaatattgatttttcccgcctataatattctgaaaaaaattttccgccaaaaaatttcaaaaaaacattttctgccataatatttgttttaaaaaagatttttcccgcaaaaaacaaatttcgcaggaaatagatttacaatggattttaatagatttttaaaatgtgtaaaagggttttaaaatatttataagggattttaagagatttttataaagtgtaaaaggttttaaaaagatttacaaaggattttaaaagatttttatagggttttaaaagatttacaagtgattttaaaagatttgaaaagggttttaaaagatttacatgtgtttttaaagattaacaaagatttttaaaataattttctagaactttaaaatggttcaaaaattattaaagggtttacatgagattttaaaagatttttaatggtttacaagggtttttaaaacattttgtaaggggttcataagagtttaaaatggttcaaaaattattaagggtttttaaaagatttttatatggtttttaaatagttttcaagggttttaaaggatttaacaaggatttttacaacatttacaaatgtttttaaaatccttgtaaatcttttaaacactcttgtaaatcttttaaaattattgtaaaaggttttaaaatgtaaaacaaaaggttttaaaacgggtttttaaagtatttacatatatatttaaaatttttataaagattttaataggttttaaaatgatttacaagggtttttaacaaatttacaaagcttttaaaaacctttacaaagatttttaaatgcatgtttttagctggaaaaacatttgttacagagaaaaaaaaatggcgggaaaaaaatttggcggaaaaaaaaatattttggtagaatttttttttgtcagggaaaaaataaattcggcgggaaaatttcagttcataaattacatgtttctcattagatgtgggtaatttgtttgttttgctcaagagaaagagtatttttaaaaatggactacatataagggtaaaatcaagagtttaatacattaatatgactacatgtatttatttattaataatgacatataaaaaattatttatgaaaattatttttatttagaaaatatatgcataatttgggtaaaatcaagagtttaatacataaatatgatttttgtctttttttttatttgtaaaattataatttataaaatcatgtggatattatatcttttggggcattgacccgatattatatatttttcattgcacttttagaaataaattttaccagctaataatgaagagtaatttagctggcattaccctatttttgatcttattaatatccctaaaataaatagctttatgtagacatgagagaattggtaagaaaatatgatccaatcatagctttggaacccacatttcagaattttggaatgcttttattaattatcaagataaaagcatacaatttcaataatataatatcttagattgtagaaaagttttggtagaggtttgttatccgcttgaaaagagatttgtgtaaatgtcaaattgaaaactatttgaaagaacgaattctgttttttaagagttgcgatttttgcgaacccaagtttagatgtattaaataaataatttagaagtacatatatgaatttttggtgttttcttaacttattaacaaacaattatttgttctaaaataattaagattgtgaatagtgacctagaagactattatattataagaaatataattaaaattctttactttaatatgatgattattaggctattatgactttataagcaacgttatagagttgataaaatgagaatgaagacatggtctatgtttttaacttcgagcgttatgattaggggtgtcaaaatgggtcagaattcatgggtcaactcaactcaactcaacccatgattcctaattagttgaaatttttgactcaaatgagttgatgggtcaaatgagttattgggtcaattggtttgatgagtaaaatgagttgggttgtaatggttaatggtttcaatggtttacccaattaacccatcaaattttgtaaaattgaattaaaccaaataaaatctctaaaccaatatcaatttaagtttaaccaacacatctaaaccaatttaagaaaatcaatatttttccaaatttcttaaatatacaagagatgaaattgagaagacgtaaactcgtaatttatccaccaaaaaacagaaatccgtaattttcccgacaaaaacgtaaatccgtgattttcccgccaaaaacgtaaacccgtgattttcccaccaaaaacataaacccgtgattttcccaccaaaaacgtaaacctgtgattttcccgccaaaaatgaaaacccgtgattttcccgtcaaaaacgtaaaacccgtaattttctcgccaaaaacgtaaacccgtaattttcccgccaaaaacgtaaactcgtaattttcccgccaaaaacgtaaacctgtaattttctgccaaaaaacgtaaacccgtgattttcccgccaaaaacgtaaacccgtgattttcccgcagaaacgtaatcccataattttctcgccaaaaaaacgtaaacccgtgattttcccgccaaaaacgttaacctgtaattttcccgtcaaaaatgtaaacctttaaaaaatagaatccgtaaatatcctaagtttgatgataatgaattaataattattaaaaatgataattatttaatagtgttttataataataattaattaaattattacttaaatggattaacccattttgttaaatgggttgagtcaacccataactcatttaaccctaaactcatttgattatgagttgggttgagtttgattacccattttgacacccctagttatgatgtttgtattaattgagttattatagatatattatacaatgtactattatgtgtttgatttttttgttaaaacaatatttttaatatatggtttaaagtatggtgttttatattttgatcttttttttttttttgatctttccaacaaatatacactttctagaaaaatcagaaaaatcgcctcggcaaactcattaatttctaattccatgcaacctagttttaagtcattttttttatcttgacgtgctcgttagatttctttcttttgtgttaaattactattgttttattacaagattaatgtaagctttttgtcacatgataaagtaattttatgtaacatagcaaactaatcggatcatttgaaaagccaattgggcctatgtaaagctaattgttgggctctatttacctgttaaagcttgttgtgattagcataggctaggttttagatatacaaaatatctagccttttagagcatctattggaatttaaatatgaaaatggatctaatgtttagtcaaaaataaatcaatagagtaataaagggaccaacttatgttattttgcacctaaaaatttgttataagatcaaaaatttgtatgaagaaattttttgagagggccgttcaacctatttaaaatgcattatgtaaatattgattttaaaacatatatgacgtgttaaaatttttatgtcacaaagagtcaaagagatccaaactatacacacatatatgtaaagaaaatagggtatttcttctcatcccggctacattcggattctatacgtggactcgataaaagactgcataattaacttgtccatatagctacatgagccaaataaaatcttcaaaatatagttacaaactaaattttcttgaaatggaaacgacttgcaaattatgtttctctttcgtgtgcaaccattggtcgaatgcttttccactcttaaacacaagttatacagtatgtggttggcagagaaacacaagaaagtaaattattatatgtatgaattcattaaagttaataaactgaaattgaaaacaaagcatcaaataataaactaacacgtgtcgcatatgcatcatactggaagataattaaaggaaagaaaaagaaagattagattggagaaaggagagtgtgatccctataattgagacatagacttgcataaaaaaaaaggagtgactgatagaaaggtttatgaaatggaagatgcaaaaaaaaaagtacttattagtgaagagtgtggctaatcaaagattgactattaattttcctatttccctccacttaattaattaccaaacacatcatgtaattgttcttctaatggctcatgtttttcaaccagacataataccttttcataattgccctaaatcaaatctttaacacctttacagtttttttctttctgaagggaaattagttttccagggaataccgacggcaacaattagtcaatcaagtaattaaaccaaattgtcgaagcttggtaacctagtggtaccttccaccgttgtgaattttactatattcaattttgtgggaattcacaaaaaaaaaaaaaaaaaaaattgttgaactaggaaaaaacagtaatagataaagcccttaggttttgacaaaaaaaaaagataaatcccttaggaagatgaatgcatacctaacatatccaaactactattaacgaacacttttaattatattgtaatttgacttctactaaaaaagcagtcatatgagttccatgattctaagaatatggatacaaatatgaactcgattaaaaattaaacattaaaagaaaaagatattggaattgagttaaggtcctacttatatgtaattatgcatgagtaggatcatgggtcgtacttttcaactagacaaaatccctttttattattacttctttttatcttttgaaaatccatgtcacctccttaactatctttcaaacttttcttcattttaattgttgccgttaaaactcaaaactactatttaaactttctaatcattgcttttgctttgcttagaactaaagtatgatatataccatcacatagacataaaatctccatgaataagatgctagcttgaaagaaaattaactcttataattatagtgctaaaataataatgagtatttacagctaataacaaatttatcacaacaattttagaaaacggcttataccacaacaaatatatttctatcttttggaaacgtttagatggttttactctttatttaattgctaggattggtgaatatttcgcatcaaatatattttatatgtgaatctaaattattaaattaatcttgtgagactgaggtttaagatttttgattttagggcatagtttttgataagacgtcatgccataaattagacaaaaacatacaaacataataaaaaaaagtcttgcagataagaatttcgcttctccgtcattgtaaatctgaagtcattattgttgtatcaccaaataatacttaactctaaatcatttttaaggattccgttaacgtggacccaattgtccaaaagttacgagaattgttaaactctaaagtaaaaggcaaacaccttttcttgtaaataaaatctatggaatgcttacagggatattataattactaattattatgtgttctccgcgattaaaaagcgattatcactaatcgtgtttaattgtaattttgatttcggcgaggatcggacctcatgtaaaatcagtaaaagtaatgacgacactgacttctgttaatctctctccgtcggcgaatgcttccatctttgtcttgacgacgtggcataacttcagctttataaatgactaaatagttgtttgttgtacgatcgaaacttcaaagatttggaagcttagaaaaacacgtgcttattgttttgtcctaagcatgatttaaccaaagatagtgcttcttatataactcaattacatggaccattttgctacattacatgtgaattatagctttattgattcgccggtaatgtaatatctagtaccttcacacttttgatatgacattataattaggcatgaccacggttacggttattactgttacggttacggtttattaaccatcggttacgattataacatgtattttcggatgatgattatttggctcattctatctctaaccgagtttcatggactaagtatttaaacacaaagtgtgaagatagcatgatctcctattgtttgctggttgttggattaaaggttcctaactcataagcctactatatgtttttttagttttcagaccaactcgtggagtttaaacggcttcgttgattatgtgaatattttaattttgtgggaaatatgtgaatgttattctttaacaattaattcttgaatcagacctgaattaataaaaacttcgaaaaatggacaaaattgttaaaatgagttaatgactatttcggattgctaattattagattaaagaaatattggatgataaataatatgatcaaatttaacaaatagttataattcattcccaaaaataaattgtttcttacatttttaatttataaagctcataatgacaaacacaatatacttcgtaacatatgtataagatatatattagtttaaaatattttcctacgtaaaacaaaaaggtttcagtacagaaacaacagacgaatgatgtagattaataattatactcagaaaatgaaacaatcatatataaacaaacgaaaaaactgagagtattcatgaaaaaaaaaatacgaggaaacaaaagcctggtgctacacagtacacacacatcgtgggattgaacatgagagtgatgtttcaacattctctttcttcactactttcgtatagtattgcttctctaagcaagctttttttgtacttagaacaaggaaatttataatttcttgtgaccaaatcatgaaaattctgtttttgtcccacttttgcaatcatcattctactacaaaatgatgctctcttactttagtttcgccctcttttattcgtcctcatttttccctttcattgacgtcgtttgtttgttttttactaactatttttatgagttttcgaaaacaagtaactaattcattgacatgcatgttatttttgaatgttatttactttaatagtagtacattattaacaattaaattaagaaataaggtacaagtcaacatgcattgttaagtaaattattttctccctctctcacttttaaccttaaaactgcaacaatgatttaaacaaagaacataaactttaggacaaacaatcataggtttaaaatacatgaaatatcattgatcgatgaactttcttaaaatctttaaggacgctctaaccctcggaaagaaagggagtttaccaccctttcccaacctccacgtccacttatccaatctggttgatcagcgtgtatccaaacattagatcatacggaacaactcaacactatctagtaatatattttttctaaagtttatgatcaattataacccaaagagttacggatacaaatcctagtattttgatacattattgtcaatgataatttgcatataaatgcattgcattgagtctacaacgtaactactttttcctcctaacaaaatgcatgattaatttacagctcatttctagtaatggcaccaatttgaacgatattagccaaaccattggaccaaattgatggccaagcatttgatctacttttgtctttttcttggtttttatagctattgatctttcaccacttcgttcatttcgaaaaatagtcctctcaacaggaccttggaagaggcaagtcctactctcatgaacatggcttctcgaagataaaaccaaagtcaatgtcaacctctctccaacttgaaaattttaaatgctcaatcatttgaaaggcggcgaattcttttgtatttcccattacaaactatacaaaaacatcaccgtgactatataattttctatgcacataaaaacatttaacttatgccaatatatactttttagtttttacaaccaattttagtccactttcgactacgcaaagatgattttataaaacttgaaaatgacagaattaagaggttggcatcggctaattgattgcatgttataaaaatataactggatgactttctcattacagttttttttatcgacggctaattcgattttatccactgcatttagtttcttataagttctttactgcatatatatatacgtaatatatgtatattataatttttctttcttcctctactcgtcctaataattttgatgaaatggttttgtatttaaaaaatatactaattatattttcaggatacaacgacatttgggtagtgtaaatgcaaaataccaaaacaaatatatactatatgttatacaaaaattgtttaaacatgtaaaaaatgatatgcataagacaaaatcccattttaattgaaaatataatatatcattcgtgacgcagctgacgctattattaaaattgaggtgatgatctatgagattttttcctcttacaacaaatatgtcaaaggagacaagccagttgtatatacaagggattgagtgttttttccgttgtaatgatattcttcaattatgctattgtttgtatgatttcttaagactcgacttaagctagtagctttatataaataaaatagctttgttgtaaactaatcatcatgaaatttcaaataacaaaaaaaaactaatcatcatgattgtatttttaaaaaggaaactctctttcctataatacgataataatgagaacgcatctcctatcataatatacgtttctaaacacttattgttgttctcgtgtagaagcatgctcgaaattaatcaaaattatctttgtttttgttttgtttcacgttagactagcctcatcgatgtaagattaatgaaagattacccgttacaagtcggtaactagtaacattagtgtgtatataaataagaatattagtggttacgcgaccaaattattgcatagtggaaacatttaaggctatttttccaccattactttgcgtacttgaattgaagaactctttacattctcagcacatcaaggtgtctcctttgagatcaaaaaagtaggaaaaataaaacgaaaaagtactataaatattaatttcgtttacgaacaaaaaagtattaaaattccgtagacatttttggggggacaataattttagactcgtacaatgctttcatggaaatgagtttgttgttgaccgatggcttccctttatttttctttccacttttttattactaattaggaaactagtaatatttatactcgatgtataattcactaatcatatactttccaaaacgtagcaaataattcgactagaatatattgtccgtgaattaagtttcctcttttctttttttatgttaaccatcatgtttctgttatttgttgattttaataaccatactattttatacttttttaaaaataattgaaaataaattcagattacaagtctacgataatgattcttcttctttttcattgtagataaatttcttaaaagttgactacttttctgtcagtatatgtcacatttttctatctatcgttcgagaaaaaaaaaagaaaaaaaaaagtttacaagtgttacctctaaagtcttaaccaccatttctttctattttgtaaaggaatcaaatagttatttactatgtttgagttcatctcttgagttttctgaataaggtggtcccataaaaggtatcaattaattcacccaacgattataaaacaaaagtgtttacaccagaatatcgccaatcatagtttctctcattttataataattttctccatcttcttccttcctcttcaagcttatagaacctccaagaaccataaaactctctctgcaacaatctatactttcttcattacttttataaaaaatgggaagacattcttgttgttttaagcagaagctaagaaaaggcctttggtctcctgaagaagatgagaaacttctcaattacatcactagacatggtcatggctgttggagttctgtccctaaactcgcaggtttggtctctatgtgctcttatattatatatagcttaaagaggtttatatagcatcgtttataatgtttttatatgcgttggtggatatatatgatcaaataggtttgcaaagatgtggaaagagttgtagacttaggtggataaattatttgagaccagatttaaagagaggagctttctctcaagacgaagaaagcttgatcattgagctccatgctgcattaggcaacaggttcattaatttgcaacacatttatatagttttgaatttataatgtatattgtgtatatatatatatatgttaaaaaaaaaatctttggttcatattgaatatgtagatggtctcaaatcgcaacgcggttaccgggaagaacagacaacgagatcaaaaacttttggaactcatgtcttaagaagaagctgagaagaaaaggcattgacccaacaacacataaacccttaataacaaacgagcttcaatctcttaacgtcatagatcagaaactgacgtcatcagaagtagtaaagtcaacgggttcgataaacaacctacatgatcagtcaatggtcgtctcatcgcaacaaggtccatggtggttcccggcgaatacaactacgactaatcaaaactctgcgttttgctttagttcaagtaatactacaacggtttcagaccagatcgtatctttaatctcttcaatgtctacgtcatcatctccgacaccaatgacttcaaacttcagtcctgctccaaacaactgggaacaactcaactactgcaacacagtaccaagtcagagcaacagtatctacagtgccttctttggtaatcaatacacagaagctagccaaaccatgaacaataataatccactagtagatcaacatcatcatcatcaagacatgaagtcatgggcatcagagattcttcattacacagaacacaaccaaagctcagaaactgttatagaagcagaagtgaagccagacattgccaactactactggagatcagcatcatcatcgtcgtcaccaaaccaagaagctgcaacattactacacgatgctaacgtggaagtgtacggtaaaaatctacaaaagcttaataacatggtgtttgatcagagcctttagattattaacatgtgttatagagagtttcattttctattcatattcatagacctgagtttattgattgatccatacatttgttatgcttgtgtgtaaagtatgtatatggtttttgatttatgtaaattttctgctcgagtgaatttttttggtgctaagatgtagttctttattccatttccttacttatgactttgacctgaattgagtttcatacatttatatttttacttacatctatatttagttttacttaggaaaagttatatcactgatcataatattaaaaacaagaagataaagtaaagtaaaacatgtctcggtcgtggtggatggtctttttgttttaaggagaggttaatagatcttaagttggagtggagacttcttcggaaaagtgattccggacaaagagagatgcatgcgtgaacaattaaccgaaagacccataatcttttttgtattaaaaacaaatgcagtgggtctcaaatataatattccatgatactatttttttttcttttgaattacaagtatacaggccgtgttagtatatcaaaaggatatgaatattttaaaaattagaaattatataaaagaaattatattcactagtttagattatgaattttgttcaaaccatgaaatttatagatcttaaaaaactattaagttataaagtttatattaaatatgcatggaagatcatgtttttatgattattttcagagaaattaaacctatgtcttccgaaatgtaagttaacaacatgctatcatttcccccctgatattctctagattcaaccagttgagctattgacaccgatatagtatgtgaaaatattgcgaaccgtttcaatcattagttttagaagtcatatttctgtttataaatcattttagatacaatttacccaactatatttaataattgaaaagtataaaaaaattaattattgaaaagtataaaataaatttaagtatccttataatcttaatattactaatctagtactcttcataaagtaatatcccaataaataagtacattatggttgaaattagttttggtattaatattgttcatacttgtgttgcggtcagggatatcttctatcaaccaaataatttacaaagaaaaaaatatatcaactaaatagataaatttacaaaaaggacaattcatcttagaatggaagtccatcgctgtcccctttgatactcattgtttttacatcccagacatcgatctcccacagttttgaaaatgacaggtgaatattgaaagatgtaatatcaaaatgagaagtgagcatgtggaaagaccaatatattcgtgagttgaagttttggtgcatgactaattttagatgtgctagtttctagaatttttagcttattaattcaaaagatcaaaggtatttaaatggtttctttagtagttataattgattgaaaaaaaaaaatatttttgtttgatagttttcattcgttttatctttacagcaatagttgccattccttaatttatcaaatattagtgatatattacaaatatgatcaactcttacaacaaagagttttagaggagtcatgactataagcaccctttttttttttgaatgcatttatttattggtgatagatatgaagtgaaagtatatttatcttgatcatcaagtaagcaaatatgaatcaacaaaaacaaaagtaagcaaatatgtaaacgtatggaaatatcagattataggttttttacaatttttataatcactctgattggttgtactaatggtgacaatttatataagtgtcgttcaatccattatttcaatgtataacgtatataatcgttttttccggatgttcaatcttcagcatggcggagcctccaaaaactatttctttttgtcacaggcctccaaaaactatacacctttcatttataagaaatgtgcttatctttaggattgaatccaaaatctagtgcaaacacactaaattaaatacgttttcacctatcttaaaactaattcagaagaaacttagaaagaaaaaaaagaacactgaccacactagtaatgaaataacacacttgattattggttggatcttatagagtaagtcgttaacaaaacattatgttaggattaattttactaaccagagaaaattctattcaatgtttacttgttccacttttattgatcttggtttgatagataatttacgtctcccaaaactgtatcgttaaaaaaatactatttaagagctgtaaaagattattggatcatttagtgatgatagtcttatagttgatcgtcttattttgtatagatcattgatctttctgatgcactctttttcttagcataaacaatatttacaagtccacaaaattattcttaaattttgatttatgatcttcgtctgccaaaacaagaaataagtcatgcgtgtagaagaagggacccttgatcttgtaaggtggtgaacgacgaaattcgaaggtggtgtagtcttctgacaatatcccaatatgtttcacacgagtgcagcttttgagttgtttttttcctttgaggtggaccaaaattaaagttctatgcttgcagaagaagggcccttgttgctgacatctatagggttgatataacttggaaaagccatgcaagagataagaaaagccagcaaatgtttttattaaaaaaaaaactcgaacatttttacatttaagatttagtaaggacaagctatgatcccatgtaggaatacatatgttgctttaacccaatttaactagtttgatttagaagagaaatgtatacatggtcatgatcatggacatatgtgagttaccgagcctgatgaaaatgatgtgaacaattatatagttttttcgtaagccaaaaccaaaatgcgagatagatacacgatagtgattttgttgatttcttaacatcttattcgacttcttgtatttttacatcagttatttgatacactcaaggtttaaaaacgtaggtggcaactaggcgcctgtctagacactcatgagcagtgaatcaaatcgatatatcatacactttagtaattgtaattcttctatcttcttcgacatcttttattttttacatcgttcattagtactttgtaatcaacatgtcaagtgatcatatgtaaaacgttattattttttaaacattttaccttaaaagaaagaattgcgagacgaaaaagtaacttattgtgtcggctatcattagatagacagacactgatatggctctcttgatctctttatgataagggaatacctatattttcggtccgactctattcttcaaatttatttatgatgctatctttcaattataatcaattcattgatgcttctttcaaaatcaattaaagtttgaaaatgattagtatgaatggtgaaaaaacctatgtaatactatgtgtggaggctatctcaatatgtattaattgacaagaaaatacatttttgtaaaatggttccaattctacgtatgtgattaatatttttcttacaatagttctcatacgtaccaatccatgtatttaagggatcggagaaacaatacctgaaaaatagcagaaaattatcgcaattgctatcattaaaattaaatattcaaatataacaaaaaaaattgattagtgaccaaaacgtatatgcttttaacaatttaagaactaaatgtttttgataaagatgaagttcaaacgtatttatgtaaatattcttttaaacgaaaacagttttggataagtaggttttacgaacaaaaatgcaatacctttttaagaaactttcattttatagttgtcaacttatagtcatttatatctttatacatttattatggatagagacaaaccgatattcaaagccaaaaaatggctatgaaatttaatatacatacattgttgattgttgaatgagaatataatacagaggattctctagaattttcaaaagcaaacgtttatgagttgatcatttatattttgaagacttataaaaaaggcattttttatccttacacctcacaatttgcatgtgagccaaaataattgaggccctactttaatcatgactttcatttctatatcacaaatcacaaaaaatatcattatagctccattgcatttattcgaccattgttgttttaaaatttctcaacttgtatataaatttaaagagcatgtacatataaaatatgaatataaggatttctttatatatgagatttttcaaaaggatcgttgtcgttttatatagcgataacgataacgtaaacaagaaaaacgagcttagtgataaagacaacgatgatggcggtggcaagacaatattctagagttgcattatttaccacagtcatggggacttaatatcaaaacttgaggctgtattaatatttcatgaaagttgtaaaataacattttttgcaaaaacaaagacagcaatattcgttaaaattttatatctgaaacttgatatagaaattttcttggttacaaacttacaatagaacaaacaaattttatttacaaaatgaaacttcttgaagtatttccaagaacatgtattttttcttcataaaacatgttaattagttgttctcttattaataccaatataagctaaaatatttgtgttcaaaacaatcgagcaatatatatacatagcatggttatcgacattagtacttattaaaatggttatgtttacggccggtccaatatcgctagagctttagcctttaccctaaaatcaaaaagataattaacaatacaaaacatgcatacacatttgcattttaaacaaattataaaaaaaatgtgcgccagtagttgcatggttatgaacttatgggtctggggcttttgcactcttgtcccaagatcttggactggacctagttgtataggttacatatattagattttcaaaattttaaaagaagagctgaactcttcgtagctagaatttcgattttatatattatttgttactattttataaaattgacggtagtaaaaaatattatattgcatagatctgtgtgtttttaaaatcaaaaataaagttgtaaaaatttggtgagttaaagtttttttaaaataaaatcttttttttttgttaaaggatttttggatttgccttgaaagttcaaacttcaagccaatgtcaatatgattacaaaacattattcaatgtgattttttcatattcacttttatattgacccaaaagataatataaaacttattgcaaacacaactgtgaagaaaaagaaaagtctttcttcattatatttcaatctctttaggaaaactttttccaagatttggtacgtgcaaaaggacacaatacaacaagatcactgatacatgaaactttaaacaaaacaaaacgaaagaaaataaatgtttttcacttatacttcatataggaaaaaataaatgagatcattcatttgaagataaagattgtggcagctcctatcacattggtatggacaatctacagtaaaccctctataaattaatagtgttggattgagaaattttattaatttatagaagtgttaatttagtgataaataactttttgattaattttgcaatctcttaaaaacaattttttttaaattagtttattttctttaaaccagtatctttctaaaaccaattacaagtagaaaatcaatcattaagtttaaaaaataacacaaactattttggatgtaataaaaatattagaaataaactataccaaaaattaatacaaattaaaaaggatgattttgaaaatttctctatttttgagtttttgtttgaaaaatacactataccctattattaattaaaaatacaatttgaaatatgttaaaagacaattctctccagatttaaaacacaaaattattttaaattaattaaaattaaatacgaatttaaaaaaaaatgaataaacttaatttcaaatcttaattattatttttagctatttttatatatcttaaatattaaaatctaacatgatattatcaaacaaatattttaaagtttatcacttcatatttgtcacattatataaagaaatcaatctaactccaaacacataattctttatttttgtgtcgacaaatagataaaactgatttttattttaaatataaatgttttaaaattattagtaaattttagtaaggaatggataggttatttctcaaacaaaaacttagaaaagaggcatttttccaaattttctcaattaaaaaagacaaacaatattagagtcatatttcattaaatgttttacatatataaatataacaaattatatatttatatttataattctatacaattatttatatatgatagtgtgggactatataggcttataaataattcttaagaaaaatattattttattatattatcgatttatctttatttttacactagtttcagcttataaccgaaagaatttattaaattatagagattttactttattagtttcacttcagctctatcaaaatcccaataaccgctatggcaacaacctaatcggattttaaaacgtttaagaatctgattattgaaaatgtacctcgattgttggttaaacataaacgcacataaatttgatgttttaagaaaatgagaaaatagtgcactaaaatattaacatttattttactcagaaatacgttaattttttagtgcatattaattttgttatattaggtaaaataacaaaattattcaattaatctttcaaaaattcctaatgtgttataccaatgtataataatataggagagttagaacttatatagaataaacattgattgccaataaaatgtttagtaaaccatatgaaaggtcgaaagaaaactggatctgtaaacagtttggccaaaaccggttaaaaatcgattgtaccaggctatgagactaaaatgaaatttattaaaaataaaatatgaccaatataaaaattgatttcaccggcgtaatataatttgtagttgatatgagtttgagaatttatacatcctaggatattgagaacattcaggttcgagaacattcaggttctgaaagagtttaaaactgctgatgtaagacaggttgaggcttatgagaagtatgctatcaaatatccccaagagttcaatatgatatgaatggtagtattgactacaagctccatctgggtaaatataaatttcttcaatttaagctgctatgttcaacctctgagacaaaaacacgttttcataattttttccgaatataatcaaacaaattaccaccgccaatatatcacccggcttactatgcattccaaaaaatattgctaaaatatatatcaatctggctctgataccatgataaaataagagtcgatcgattgaatattttctgtgtattgcttttgaccacaaggtctagaatatatatacaaaacatacaaagcttgaaaaccaagctatttccttaacaataggaaatatacgatatgtgcaaatctaaagatacgatacacctaagaatatattaataacagaatatcttccattattgtattaattctgatagaaattcataggttagttattggaagttatgtcaaaaatagttgttggaagttctgatcaaaatgtttacttagtggtgtctcttgttagtggcgtgaatccgattcatgttgcgatggacattattatggacaaattatgtacaaattatgtacaatacacaaatagttttatagcatgtacagagttttcatgtggcttttataaatttgggcatatttcagcccaaaatttttgagaaaaagcacatttcacttgtctttatagagatggacatattttggtggataaaatgacagtttcaccctcattcttcctttcttcttcattcttcatcgatcttcattcctcattctttatttttttccagaaacttcatcgatcttcttctaccttttgaacccaataaatccattttagtattagaaatctaaaccctagaagatggtgtatagggaacccaaagatccaatcttaaacacatagtaaaatcaattacatatttgggaaattcaattgaatcaatctctttaattacatgtttaactcaaaactggatttttgatatagaaaattacatgtgtattcaatcgaatcaccctctttaatttaaaatcaaattaaattttttttacatgtttgagatttgtgatagtagattaatagagacttgattctccatggcttctcttctccctcttgatttctaaaatcgaaataaagatgtaatgatcgtagtgatgattttctttccgggttagtactgattgggaaataaaatctggagaattcatcttcatggattcatttccgtttgagtatgacagagaacaagtaaagagctcgacgaatttaatgatggtttgggaaaagaaaaattgagggcaaaatggtcaatacaatttaccaaaaatactcatatttataaaccatccaaaaagtttcgttttttgcaatacctcatacattattgtgtttttttcataattgatcctagttttcatatattaaggtcatttaaattctaaggcaattgtctaaagagacatatagtacttttattttgaacattatattttcttgagactgttcattgttataattgacaccgaattcaagaaattaattaacttaaaatattagatgatttttttttgttctaaggtgtactgattcatatttagacttaagaaaaaaaaattaatccatgaaattctcacacatactaattccaaggtcagattagtaattgttttcttagttaaaattttcttctatctactccagaatgaaagcgatgtagttttatgtttagatttatgtagttttaaaatagtttaaataagattaacaagaacaaaaaacatatgtgaggccatcaatgatatcttttttattggcatgtaatcagaacacattttttgatccatccaatttttctaatgaatctctttggttaatctaattttgaaatgttattgggatcaatttgaaagtattaatgtataactcacttttttggataaaactattcattttgtataataaaactattatttatatataaaggcgacattaaggtttttctgaaaagtagttgttaataggaagatttgcaaaactacctttttttactaccattttgcaacaatactcttttatgttgtccatttttaaaaataccccttcccttgaacaaaatgaccaaattaccctcatttaatagaaacatgtaattggaaactgaactttgcgccaaaaaatttttttccagctaaaaaaaaatttcccgccaaatttttcctcagccaaaatgattttaaaaatcattgtaaatattttttggcagcaaattgatttacaagggattttaaaagggttttaagagatttacaagaaattttaaaaaagttttaaaacatttacaagagattttaaaagatttacaagggattttaaaagggttttaaaaaattttacaagtaattttaaaaggttttaaaatcccttgtaaatctttcaaaacacttttaaaccctttaaaaatgtttacaaatcctttataaatcttttaaaaccctttaaaatcccttgtaaatattgtaaaacccttttaaaatcccttgtaaatattttaaaatccttttaaaacaattttaaaccctttaaaaatctttaaaagacctttgtaaatcttttaaatccctttaaaatctcttgtaaatcttttaaaacccttttaaaatccattgtaaatcttttaaaaaccttttaaaatcccttgtaaattactcttttaaaatcccttgtaaatcttataaaacccatttaaaatcccttgtaaatctatttcctgccaaaaaaaaaaaattggcgggaaaaatatttttgaaaacaaaatttggcgggaatttttttttcgaaaagttttggcgggaaatttttttccgaaaatttttgacggaaaatttattttggaatattttaggcgaaaaaatattaatatttcattttgttaacttaaaacaatttccaaataagggtaaaatggtcattaaaaatttaaagaggatagaaataaaaatggataaaacaaaagggtaaagttgaaaaggatagaaataaaaatggataaaacaaaagggtaaagttgaaaagaggcatcatgaaaagggcattagaaagaatttttcttgttaatatggttagagcttagagtaataatcatccaatacaatattaaaaaaaaactcgtaatttttattttatattttggattaacctatcttatttttataaatataactagcaaatttgaatccattttgtgatacaacaacgcttgtacaactaactagattcgttacaacttacaacctcggatataggaatggcctctagtagaacatctttaacagaagccattgtagtgccaataagtctaatactataagaaaaacaagttcatggaattatggttctttaaatatataaaatatagagatgatattgttctaaccattgttaatgtcatcacaaaataatttccgatattcactttaacaaaaataattcgactaaattcatattagccacattactgtttcggattgttcagattgacatatagagttatcatcaaattaacttcttacaaagaaattctatttttttccctccaaatgtaagaactggtacgtacaaatggatacgaatgcagcaaaatgtcattgagatatgaaagaaatggacaaagcttatttttcacttctacttcgtatattaaaagaaagaatgtgaagatcattcatctgaagaccagattgtgacagctcctatcacacgggtatggacaatctattagcttcacttcagctctatcgaaataccaatctccaaccgctatcgccaccgcctaaatcgccgtttcaaaacgtttaaaatttgattatttctcataaatttgatgttttaaacttctcaaggcaaaatgaaacatgaaatgcatacctttttgtgtataacaggagaatcatcggcgaaccaagtgtcttgcctttcggtttggcaatgagcaaagcaagaattgatgaacaaaccgttctttttcgaattcgagaaaccactcacagctctcaacatttggtttctaaaccctgtcaaaattgacaacatcataagataagagtgaagttggatcattttgaaaatgatgacttcttttaagttttgaatttaccttgcaagaaccgtatctgcgccggagtgcatctaccgtggtttaatctgcattcatgccaataaccactaggatctgcactcggcggagcgatactgctttgaatctgttacaacaaaccagaatggttacttttaatagtctctattagtataaaacagagttgatatctaaagaagaaaatttacctgccaaatatcatatgctgcattgacaatgaaaagaggagttttcatctgactgatcaagttttgagggaagaaacactgtcccaaatcgaaacatcacgagtttacgggtcagcttttgtgcttatatatacaaaagagaatcgatttacactaagtaaagaagagcttacagaggttggattgagatggttagtgcataaatgtggcaaattgttcttcactccctgattcattaccataacaacaaagtgttaaagtaaaaaaatcactttcattataaagtttataatatgaagattggtaaaacaacatcacacctgcaactgcacaacgccgttatataaattccttatagtgtgtccaccggatacatcaggcctttaaacacgtaaaacaagcgcggttcaataaccgatactaagctgattttgagaaagaaaaaaacagaggaaagattcatataaactaaacttacgtgtccaagaacaagcctgcatcacttaagcatttaactctggtccatccagaaaacaagtttctgaattcgtcacagcgtaaaataactgctagaccacctgcagagcaaccagatagaagtgcctgaaagagtactaaacaaatttagagaactgtttcattgattataagagaagaagcctataagcaagagagtgacaaagttaacacacctgtttcgcatttcgcattccctttgccttcaaatcgtccattgcggctctccatatcttctctcctctaaactgaagccgtgcagcctgaaacattacatgttaaaaagaattatacgaaacaacaacacaaaccacaaaaccaagaaagcataaaaatcaagaaaatgaaatgtatgatctctattgataagaaccttgttctgactatctccactgaaggaaccaccatcgcagtaacgaagcttaactcgattccagttgaaaaagtctgcaaatagagatgaaatgagctattatagtttcttaaagattattactaataagagcctaaagcggaaagacaaagacctggattttcttgagctttattgctaagtattcctgtaaactgtatttgtttctccatatagttagaagatccgcgacgcgacttctttcggtatacacagttcctaatgttgtcacaccatcctcctccctttccacatttccaatttcaacacaccattcaaaaaaattttagtaacaaacattactaaaaacagaaacttctttcgctaacctctaattgaattaaccagctattggctccagatccatgtccacgatgtaagtgatatccaggcaatgtaccatccaaacaaactagtaattaagacacataagacttagattcaaacactgttctgtttttacatttcagtttcacataacacaatcagaaagtaacttattgtataatgcaactatctaagaaacatgagtgatactaatatagtaatatatgataagcaaacaaaagaaaaaaagtttgttgaaggaaaaagcagagagaaagagacagtaccagctcctttagaaccagctcctctgataagtgtgagaccaaccattaatggattgaaattggaactaaatttggagaaaccaaactctaaatcctcaatgcgatctaattcagtgacattgaactctaaatacccatttgcctcattcccaagaaccagtcctgcaactataaaccctaacaagaaaagcttcctcattgctcttgactctttctaagaactgggaatggagaaagaatggttaaaagttttagaaaaggatataatacaaatgcagaaactggtaatgtgttagtgaaagaatagatctttgtgttcagcttttaatgagaagaagaagaagaagaagaaagagacagaggcaagagcagagcagagaagtgaagtgaagaagactgttttaaaaaagagattttatggctggattcacgtttggaatctcattacctcgattgtcttaattaattatacttaaaagttacaattacactaatctttaattaaagaaaatagtagtagtactactaaactactaattataactaatttagcattcgtcgtaaaacaaggagaccatctttttgtttggtttcatacttgaaacacacatcaacatacacaagaggtaactatataaattgtgatatctacctatgatttttcattattgatgtttatgatattttctaaatcacgcattggaaaaaatcattatcaaaaacaatattaatatatattatttatctgtgatttttttatccccgacacctaccaatctatctaatggtttccaggatgcaataaaatcatgagcgataattacggaagtggtaatcatgtaatttggatttaaaacattcttttaagatatttcaacacatactatcattgtttggattgagtctaaagtaatcaaggatgtcaaattaatacacaaccatatagtttgtcaaagagtggcaaataaaatttaaaatatttaaggaattctgtaccaatagatcctgcacaaggaatatagatctcttacttaatttgaatcattcttttcaaaattagtaattgttgtaagaaaaaatataggattattctcgtttccttgtccaggataagtttaggccaataaatccaaaactctttgactaaccaaaataattgtcataatttatcggtttgaaactaatggctgagagaggaagaagaaagagagtggtggggctgtttgtaaatccgatgcacatgttacgctcttacaaaataaacactcccaaaccggtacggtgctatctatcgtccactaaactatgtacttttaatcactggatttattaataatttaatatttacatcttcattcaatttgatgcatccaagtttttatttaaacttctaagtaaactattaaaattcaaaaaaaaaaaactagtaaactactattttaccattgaacaggtgatttccaaaaacaattcgcattttatctaaaatgtaaagttttgtttgattgttttttgtttttttttttaatattaagaggttttggagcgaaacctataatctttctagaaccgaaactcgtaatcttcccaagcccaaaatcacagtatgtaatattaattttgtctcaaacgttattcgaaccgatgacctttaagcttcgcgtaggatctttaccaattgagctaactaccttcgatagttttgtttgtttattatatacaatctattttctatatatatatacatataatccttgcaatgtttggaacattaataggatgctacataaagttgaaagttttggggaattaattgtaaacttgggatgaaggtgttaactaaggacatatcgttgtatttttccgtggtgcgtaatgaatatatgtacgtttctccacaaaatcctgtcggtgaacgtctttttttagcgtaactatatttaaatgatcacgtaccaccaccgtttcttatacttacacaatgattatatttgttgtagatatcaataatgttgacgtttaaaaataaaataaaacccacgtatcacaccattcaccaccattacgttctttgttttttactccttgacccattcgattcccatgcacgaataatgaaacctcccatatttataaaatcaaaatgattttttggcaactcaagtacagtttcgtttgctagatctacatgatttataatcaagtacacactttctctttagatttcaatatctaccttcttcttttttaactaatgaaccatcccacaccgtggtaggatgagaaaaccaagaacaaattacgatgccaactatatgttttcttttttttgttatgaatgttaatatcattgaaataataaaatgaaagtgaaagatattacggagaacattacctaaaatattataattttggtaaaaataataaaaacaagatcacgatacgatagttagttttttttttttttttaatataatatcaaattagatttaaaagaaaaaatacgtttttacaacttgtgctaagtttgtttgaaaagtaaactctaaaaacttctgaaaattttaaagctttctaagaatcagtgataactagtctcgagagtaaatctagtgttggtaagcatcgttataacgcatgtcgcctaagagagtcggattgctgaaatctgatttcgaatttctttatcaacccatagtcaggtttgatgagaactatatgttttttgaaggcttcagatccaaatcggatcttagaatggatttgtctccagcaaaaaagacatcactgtattggtagggaaataaaatgccaaaagaatagcatacccttacatataacgaaactcagaacatttatatgggctacattgaacattctctctctcaacttataactttatagctccaaaaagtatatagtcatataagatgcatcttaaaagagagtttcgattccactaacatttctttggactatgactcatgggccttaactatatgatgggccttaacaacctgatgggctcattaggtttaaaggcctcataaagttaatcagactctagcgcccacacgtgttgaggaggcgggaaaacaattatcatcgccggcgtgaggagaccaaattggcaaagttccctgagagagagagagagacaacaccttcgcattcgctaactttctctgtaaccgccatgggtattaaggtctggttcaaacaaacgattacttctcgtttcagttttagattacgattcctgaattcgatctaatgttttgtgtgtgtttttggtcggatttttagggtttaacgaagcttttagccgacaatgcgcctagttgtatgaaagaacagaaattcgagagctattttggtcggaaaatcgctgttgatgctagcatgagcatttaccaattcctcgttcgtgccccttcttctcctttgtatcaatctcaatgagtatagtttttgtaattgtggttgaatgtgacacagattgttgttggaagaactgggactgaaatgctcactaatgaagctggtgaagtcactaggttactattactactctctctttgtttccactattgtaaagtttggatctttttgtgtgatgtgttatgtctctatgttttttttgtatatgtagtcatttacatgatgtttaatcggtttggatctttttatgtgatgtgttgtctctatgtttgttttgtacatgtagtcatttacaagggatgtttaatcgaacgattcgtcttcttgaagctggaattaagcctgtgtaatgctctcctccttttactttctctgttggtggaaaaggttctctttttttattagttctgaatcttttgatgcagctatgttttcgatgggaagcccccggagttaaagagacaggaactggctaaacggtagatttaattatctggaatgcttcttaaattgagttttagttagacaatggctaaagtgagtttctgaactgttgctttctactcttgattcagttactccaagagagctgatgcaactgcagatttgactggtgcaattgaggtttgtcactcttacttgccttgcctagctttattttattaccggaagagcataaatttagaagcttttctgtgctgataggcaggaaacaaggaagacattgagaagtacagcaaacgaactgtgaaggtagtatattattttttcatctatgaatcgttggactccttagtttttatggcatccacttcaaagcaattgaatctaggactcgtattaatatatgtataaatttccactctccaggtgacaaaacagcataatgatgactgcaaaagactcttgagactcatgggggtgcctgttgttgaggtacttatgttatgtgcagagtcccgagggtctaaatctcttctattaactcgtctttttgtttatgatatgaaatggctaaaagtttgaaaagaagactgatgttgcttcttacatacaggccacttccgaggctgaagcgcaatgtgctgcactttgcaagtcaggaaaggtcttaattcttttgtttgttctctttttcgcgtttaactgtcagtttcaagtgaccactgtcttcaatcttatatgcgatgcttccttatgaaacgcttttgtctgtttaggtttatggtgtggcttctgaagatatggattccttgacttttggagctcctaagtttcttcgccacctgatggatcctagctccagaaagatccctgtcatggaatttgaagttgctaaggtttgtctctcacacacactattctttcttcaacgtattaagttaatgaactgatccttatattgtggtctcgtttcagattttagaagagcttcaacttaccatggatcagttcatcgacttgtgtatattgtctggatgtgactattgtgacagcatccgaggtatctagatatagatcaatattgtgttattttctctgtgaattgtagaacgcaagttagaaactaatatgtattttgtgaaacaggtatcggagggcagactgccctaaagctcattcgccagcatggatctattgagactatactcgaaaatctaaacaaagaaaggtttaattctgttttagtatctcagagtaacttgatttggtgactatatactgattttattatataaaagttcaaaccaaccaatatgagtgaaggttataacttgttaattagtctagttggctgcacattacatctgctgtttgctgaaaatatttcttatcgcgatgcattaccttagccacatatttaagaagcatttatctgtcaacatgtagtctaatctaaattaatccatcctgtcaactttgttctatctcttaacatctgttgttacatgagcaatagccatagtgcgttaaagacgtttacattttggtattttatgtaggtatcaaatacctgaggaatggccatataatgaagctcgaaaacttttcaaagaacctgacgtaataacagacgaagagcagcttgatattaagtggacctctccagatgaagaggtagaaacctagttctcccctattctgctccacgcatattttggattcttcgggaatttttcttaggtacctccttttgtcttccttgccagggtatagttcagtttttggtgaatgaaaatggattcaacatagacagggtaaccaaggtatgcttcacgtagtgttatcatactttgttccatattttccatattgtgcaatgctttattctgataataatattgtggatgatctgaaattcttgtataggcgatagagaaaattaaaactgcgaagaataaatcatcgcagggcaggttggtatctttcgaacaaattagtggtgattttagcttgtacctctccttccactcatttctgtcttaaacatatcacaggctggagtcatttttcaagccagttgctaactcatccgtacctgctaagagaaaggtttgtcccttacagttttatatatggttgaaccaattagttcttaagcttctttctttccacatgtacatgaatgtgtacgtcacataattccttaattgcaaaagaaacactgattagtaaattaattggtaactctacggctttccaaatggattgtaagacaactcccgattagtggtacttaaaacattttcatgctttccacctacatcttgttattatcaatttattgtccatagcctgccacaaactcttaacacatgtccacaaatgaatagaaatatatgtacactttagggaaaccttatatgcctagttgcctccgaagtgattcccaatatactggatcacagggtaccaaatgcttgctcaggcagtataaaccagccatcagcaataaagtctcctctctgcatgcttttggatggtactcctccgataacattgttagcgttaggctgttctctctatcccgggcttccaacctttcggttcacatggctggaggtgtcataggcacaagaatctgaatatccggtgaacatacagctgtgagcaggagactatcttacgtacatagaaccaagttcctccatttttaagattcctgggatcaatataacactctactttgtgtttcacatgtttctagatatgcatcgatcatttggtgtttatgaactgtttcttacttgctataggaaatcccagagagtaccactaaaggagcagcaaataagaaaaccaaaggagctggtggaaggaagaagaagtaaatcacagtcctagtttataagctagtacgctttctgcagaaaagatctcaagagaagatcaataaactgtgatggtatttcctaggtctaagtagtctgtttgctttttgtttttaccatgtttctgtaatggtagtttagtcttttactttctcgatggtagaatattaagtcaggtctgaacttcatttgcatcattatgatttctgtgaaagttcatgagttgtcttttgacaagggaaatgcttgtgcttgtgttttcatgtgctaattgtagaattcaatatgatggaaaagctagacaccaggctaaattatgtattttctattgatattacttggttcaagaggagccaataacaaagctttcatcacatagtaagataaatgaaacataatcacataagaaattttgtatggactaaaagattgcagtattttacatgaagattaagagatggagacaggattcaaacaatggtgcagccacttccgctttcataggtattaactgataccatgtcacggggggtgtagtagcagtaaggaatgaaacaagggtccttcttagggtctggttttgggtctggttttttcggtggtccgacgctgattactactggtttcttattgatcttcttaagctgttctgctacgcagaccggatccatagtacccaccacggttagtatactcttctcttgatccagtgaaactatattcacacctgcatttcaaacctctcatcttttagtcgcatctctcatatatacacaatatgtaacatcgtttttataaaaaaaatcataccttctagctctgtgacagcttccatgattgcatgtttgcatttctcacaatcgatatccactttgatctcgattttctgcacacaatcgaatgattcaagaaacgaaaaactcgaattcttttccgtataagtagtagcatgagcatgtttttaccttagtcgtcatgatggagagattaacaaggattatgggatttagatatgaatagaggagaagaaattagaaacatataaataggagagatttgatgaaagaagcacttgagttgtttcttattgtcttcatttctcaacatcttcattaaataaaagcgacttgacttcgtttaagtctttctcccaaactgttgcgtcaacgagcttactctagttatattttatgtagtctatacattttgtctacacttatattaatatagttacatattatatttgggtttttacatagttgataatatatatctaaatatcgattcaagctgaacttgggacttttgtgagtttatccatgagggtatttgttagtcataagtcttaaaccatttgttcacttgttcatctatttaacatattatatgttgtgtacttgttaatgacagtgacattttagcggacaatctctgtcgacccagaaaccaaatctcaagtcaccaaatctccccggtttggttacaaatgtaaaattcaataggaatgcgacttcggttctccgggtcggttagttcggttatcgccaacaaaattatacagatgtcgatattaacctaaaataaattcggttcgatccggtttccggttaatttgttaattcagttatgttttgactaaattctgggttttgggttaaattcagtttggtttggttcggctattgctgaaaacggtctaaattttgtgaaaaccggtttaattttggtataatccattttcttaagtatctgagaaatagataggttcgacctgaccctaaccaaaattaaagtcctgtcgatcggttcagccgaaagaaccgaaaccgatccaaaacacgaaatctcggttcggtcttgtttggttttctcagttcggttatttatccaagcctcaagtaaaatgagagtttgtattagatttgagtcgtttggccaaaaacaaaacaaagctagctgagttataacgaaattacaagccaacatctagtttctattttattaatccatacaacgatttttttgtggccacgtttaatttaggagagtttcctcgtacggtactaaagccaaatagattagatgagatgtctcaattcaccaataaacaactcttgttaatcaccaacaattaaaatttaaaaacctaattttggctaaattaagaattaaactccacctctcacaattggcctaataataaacattgtaaagcatcctcggtgtttataagaataccaaattcaaggcatttttattgtgaatttattagtaatttataaattcatcaaaaacaaactcttttcagaaaaaaaataacaacaacaacaataatggcgtcttttgcaacccatcttgttgttgttgttacaatgttgtttgtagccatggcctccgcggagatgcttcaagatgtttgtgttgctgatttgtctaatggtatttacctcactaacacattttgtttcaatcaattttaccttacccgtgacatgttttcacctctttttttttgttcatcgttggtaaaaacattttattgttttttcttatagatcccaatttccacatgatattatggttttttgtcctcttctagttataaaattatatcatgttaagaaatttgccaccaattgagatattatgaaacgaaatcttctcatttatactatactttatttctcgattttgtattatattattcaagagtttcctcgaactttggcaggatttataaatgatatagtatttatcaaaatgttaaaatataaagtaggtggacaacattctttttcaatagtatcataccaaataataatagagttttgaagttagtttgtcttttgtttcttcttgtcaaaatttatctaactgtgttttgctctcttttgatcacaaatgaagcggtcaaggtcaacggatacacttgcaaggactcaacacaaataacaccagaagacttctacttcaaaggcttagccaacattgccgccacaaacacctctaccggctcagtcgtgaccggagccaacgtagaaaagctaccgggactcaacactctcggcctctccatgtcccgcatcgactacgccccaaacggcctaaacccaccccatgtccacccacgtgcctccgagatcattttcgtccttgaaggtcagctctatgttggctttgtaacaaccgctggaaaactcatcgccaagaaccttaacaagggagacgttttcaccttccccaagggactcatccatttccagaagaacattgccaacagtccagcatctgtactcgcagccttcgatagccaattgcccggaacacaatcacttgtcgcctctctctttggagctcttcccgatgacattctggccaagtcattccagctcaaacacaaacaggttaagaagatcaaactgagatacgcacccaagaaatgagtttgtttttgtttatattgtaaacactaagcaaagaagaatgaatcaatataaagtttgcaactttaaaactattatgagatgaaactaaagaactgataaaaagctttgttttcattgttttaaaacctaaagagcaaatttctcaacacaatgttcataaaatgggaaactcaaaaatagttcattgatcacttagcggctcttccatctggaatggagaataagacaatgggctttgaagatttgacaaaaggcacatcacatctgaaatagcctttcctctcaagctgaatcacatctccacatttcagattcctcatattcgaatcaccaagtgccaatgtttccttctttgtgttaggattcacaaaatcagcaacttcatcatcatcttccagctgtgttgcagcaaaaacaaacaaatcagtgattttgagagagaaaacaataatcaaatgtagagatgcatcaaccgattcttaccttcttcttggtgattagataatcaaactctgttaatgtgagattgaccaattcattagtatcaggaagccatgtcagcttcagctttgtagtctttacagaaccttggagattcaagacaccagataaggcagtgacacgaccctcctcgtcctttgtgatttcctttacgatagcatttccccaatccatcaaagttacttcctcaccaacggatatggcactcgcatcagcttcctcgagccaaatgctcttagtgaaagtggtcgccttttctccagcaccttcgaatttcttgtgctttggtatcatgcgaacaaacggctcatcaggaccatccgttaaggtaaatagtacacgacgttctgcaaccacagcagtgtgtctagggcacacaggatcaattattctcttatttatagaccaaagtttgtcccattccatcaaatttagattcttcgaagccccctggaaacgaataacaatcatcagaattattatacagatcattcaaatgagataaccaacaatgaaacagaaaggtttacctgctcgagaatgaattgaatcagagcctcgattttcaaacctctacgaacaattccttggactgtcgggaaacgtggatcatcccacccgtcaaccaatccagtttggacaaaccagagaagcttgcgcttactgagaagtgtaaaaactaggtttaaccggctgaattcgtaaagctgaacctgtcgcagtcccatatcctccagaactttaaagtactgagcatttcggtcatgatactcactagaccgaagagcatgcgttataccttcaagggaatcaacaaacgggcaagcaaagtcatatgttggatatatcttatacttatccccgatacggtggtgagacataggattgcatcggtaataaaccgggtcacgcatggctttgttgggatcttgcatgttgaatttcccacgaacacagcactgtaatcctctctcacttcctgcaatcatttccttccatagcttcaaattctcctcgacgctatgattcctacatttcgaatcaatcccatccatcctctctttctgcatctgctccctcggtgtgtcatcaacatatgccttaccctcacgcatcagtttttccgccatatccatcaattcaggaaaatagtccgaagtgtatgtcactttctcatacttgatccccaaggtcccaatatccttcacaagattatccacaaactcattgctttctttagcagggttagtatcatcaaaacgcacaatcacttccccttggtaacgctcagcgaaatacttgttcagcaacgcagccttagcatgtcctatgtgaagataaccacttggctctggagcaaaccggagtttaacctttccaatctccgcttccggcaagtccacttcaggcttacctttatcctgaccatctcctttcacagcttgttggctatctttagacttaggtgcagcaacaggcttccctgatcctttcttaacataagttgctagaaccttgttaagcacctcactgtactcgtctaatatcgaattgaaccatctaacaagactctgatactttttagatttcctcaaactttcccatctttgaccagttcctaccaaatctcaactaatcagcttcaaatacagagaaactcacaccaaacacataacaaagataacaaatttcttaccagcaagagctgaccaaatagcgacatcagcaatggaaagagaatggccaacaagaaacgtgctactctcgagatacttatcaacacgaccacaagcattctcaaactctgaaccagaagagaagacagatgcgtaatctacccactcatcaatctgagaaccacccacaagaacaaacaaagttacaaagattcaaaatttacatcagaagattcgaactttcatgttaatacaaagaatcgagacctgagaagaatcaaaagcattgttgccatagaaatcaggaagctttttcgctgatcgaccaacatagcgaagaagaacggtggctccattcaatttcctcctacatcaagaaattaacaaaaaggtttaaactttcatagaaatcaaagaaggaaccagactaagaaaacggaaagtacccgtcggagaagacaaaagaagggacggttgttgcagcggcggaagaatcaatcgtcaccggagaagctgagagagaaagagcaacgatgactgaaagtggtggactttccggtgggaacgaaagcttcatcccatccatctttggatctaaatcagagaaacgagaaatggattgtgcaatgtgggtttgagagagagacgagaaacagaaccctagttttttggttgagtggtttcgggtcttaggattaggtttttacttttttaactgtgggcggctccaagttgtcaactttttcaatttttagtccataaagtatcaatctttacatagtgtttttttttttaactcaacttggattagagtaataagtagttaaattggtatgtacacatcatttggagaatcatactatactaaaactatccttggttatatgagttatgtgactggtttctgtatcagtgtctctgcagttctcttttcaagagagaatacttcatgggagctccaatgcagaggcaattcagaaaagctaaaaggcaatacaaatctttgaactaaaatctctcatagactcatataggaaaaaatcgaaacagataaacactgtgccaatagaactaaggaatgggaagtaaccagatactcatttagcaataccactgaaatccaatgctaaatggtccctcttctttggacaaggtcattgcttaacctgctttttgttcgattcacgaaaccagaaagactatcaatcaactctcaaccaaatgtgcacaccacacatcctaaacaatctaccgagacatcattataaacctagccatcactaaaatctctgtaaaccaagtcacaacaggctatattcagtcctaggctagttttagtagaccaatagactaagtcttgagcacctaaacttcttcgaatacacacattatctgtcttgaactatcatcttacacatttggcacattagagagacaaaaaaatcatctaaatttactctgcactgaagccaatcttaatctaaatacattgaacttactataagtttgatcatctcccacaaagctaactcaactaaatgaaatctaccgataacaaatctgattcaatacacaattgcccttttaaagaatcatcactggtctaaaacataagaaacaaaacactcatagccatttgatggagagattctatacagattgatccaaagaaagaaacccaaaaccaaaaaatctataaatataagaatcaagcaaccccaaatcccaataacgaaacatacaaaatattcaccgatgtggattacactcatcagagcagaaatcattagtctctaacataactctcaacatctcatgactaaacctttcatcattaggatcagaaactggagacgaaaccgaagaatcatcatcacctccttctctccttcgaggtctcatcacacgaaagcacccacctttacgcgacccagaccatcgttttggcgatttgggtttcttacgaaacttacctaaaaatcgattcttactctttaccaattgattggtggtatcgaattgattatcgtcatcatcaacgattgttacatctttcttcttcttcttcttccttgtcgtcgtcttcgtcttggtatcgttatcatcgactctgttttgttcattcaatgaaatctcactgtgattcccaggcattaaccaaacgagaaaaagaaagattccgaatttctcaaaacccagatcagaattgtgaagaaattgaggtctgcttttgtgttgttgttgttgttgttgttgttgttgtattgtctctcttcttcacttaggtttttccccaatcagaaaaaatcttcgctggctctcacaaattaattgtgtgtttaacgacttttattaatttagtattattttattagattcgggtatatcgctgtttttatatggaaattttattattattattactgttttttttcttattattattgttggttgactgaaaaataaaatcttattactggttttgatgaagaacacgttttatacttgccattgttgttttgtttgtcccaagcaaaagttaccaaaattgaaacggatctcgataaaggagtagttacgccggctttattctctatatttggtttcagtttgtgattctttagcatttttataatattctattagaggggtgtacattcttgtttacggtttggtttttgtttttcaacttcaaaacaaaaatagaaaatagtttcttcatttcttcggcatctaagtttcagtgttagccattcttaataaagtgaatttgcaccgtttagtatattttggtttgtgagattctatttagtgatatagttcatggaattgtccgataaaccgtgttcacatgacttgggaatagtatgtgatccggggcttatcggtctttgctgcggacggccaatctcgggcctcatgttaaaagcttcaactactctatgtgttggtagctcggcttttataatttgcaatcgcctttggactcaaaacaaaaaaaaacttttgtttctattgtttaccctaatataatatactaattagagccaataaaatgcaaaattaagagttaatattagggaatgttgttgaaatgattactgagaattagttcaactagaatgggcaaactatgatgtcgcaaattaagaaaaatgaaaattctatatacaataaaattggcgtgtccatatcttttaataaaagatgacttcataaagagacgattgaattgaaacttcaaataaataaatacatcttcttaatcaaatataattcaaaacccgaaaaatctattagaccatccccatcggacaaatttagagggtatcttcaaattttaataaaattaaaaaatagaaaaatgggaattaatgcgctgaacaggagagacactgtggctttgatgtctgtgagaagacatttttctgatactggaagaaacagaacgtgtcaccataatattggttggtgctattttttttttccttcatttggctaacaaacttctctcttcatttcagaaaatcggtcgatacttactaagactaaattaaatctatcacaacgaatcgatccgatggtttttacattaagccaatttctccgatttgtttttggcgaatgtatctggtgaatggagaaaggtggtggatttgtgttaatggtgaaactgaaaaagtggtctgatgattcttctgtaatggtgaaaactgaatcttccatgaaagttgaagacacccatttaagctcaccaatgggaagagaaaactgaaacaaagttaatgaatgtcttcagattaaaatagtattaattttataataaattaaagttaagacatcatgtatgaggatcaccgatgtagatgctcttaggttttatggtttttaagttaacaactgaaaaaaactttctaaaaacttgcaaccaaacagaattatataatttgtatgggtttttcttggtatagttttttttgcctacttagtaataagaaagaggaaaattgtatatcatttaggttaatctaatacgattttcattaattggtttaaatgaacactaaaaatgatttacgtatatcacttagagggtaaatattttaccattatctttgggaaataaaagtttacaacaacatagtctaaagtaaaattggcacacttcaactcgtacatgactttgagaaacctataacacttatttttggaaacattagaagatattctcacatcctccgaatcttatgtgggacaaagaaagagcttcaatgctttgacgaagtgatgtttcgacgaactgatggtaacattttcgttgaaacatagttttggttgaatgagataacgtcgctgattccatggcaagatatacgagaattctgacaaacattaggagtaacgatcctcgcgttgttcacatatatcccggaccctccagattttgtgatggtgaacattctatcagagaagctacaaggaacaagagttctgtttggaaaatgaagcatgtggttgatcataagccaagcagggatcgtatgttttaggataaatgtttcaagactctccggagtaatgtctgcatgagaaatatcgttgtcgctaggcatcaagaaagtaatatctgtgttcctgaagtaatttgtatcgttgaggaaacgaagaaggatgacaaaaccgttgtaagattgccttctcatgtcggtcatggcagagatgaggtcggtttggttgtagttgtcatgtctcaatatgagatgtggtggctcggtggatgcaagaatcgtaagagaaaagaaaaacaaaggagctataactagggaaaaagttttcatactagctgatattagaatcatcacgcatataattttagaatttgaaaacaaagttatatactatgttggacaagaagaagaacatgacctttgcgagttaatactaaaccggcgagagtttcgtagtaattagttgatccatggttgattcatgacttcaacttttttcatcttttaagtgtgatctagaatactcgtgtggattttctctctctttgtgtcatacttcatccgtttcatataaatgttattttatgatttcattctaaattttgactcataagatattttgatttgtccatacctatattaaaacaaatagagtaactttttaatcttgagaagctcctgaggatctgtttagaacttagaaccttaaactcccacaaacgcttcaataaaggagcggccatagaaaaacaaattaaactctagtcctcaattctaccaactatatgtgttaaactacataaagaatctctactagagatggcaaagaacaacaaacacaaaactgcgttacaccattataagtataaccgaaataaatacacacatatatacatccacagtcaagaagaaaagaaaattaggagttgagggaggtttagtgaagaacaagatcattaaacccgcgtttagaggctaagccgataacacacaacatgtaaaagactttcccactcttcacttttgcttttactattgattttcctttctccactttcatctttgccttcaccaacattggcttatgcgagtctcctaaccgctctcgctcttctgcttccggttcctcctctatcgtctcgagcctcccctttaatatctcttccaagtctttccccaactcacatatcctcttattctgtcaaatcacaaaatattttagaaagttaaaaatatatgaatccgagatctttgggttttcacaacatatacctcgcaatcacggtttaagttccgcttgttcatccgtcgatgtacaacccaccacatcttcctatacaccaaactcctcatataacctttcttgcttcttcaaaattctttctacttgtcacatcagtttcttttaaaagcttggcagaaaatgtgatggctttcaccaaccctttacagctttataatgatacctcttgattctctcaaagtgaccaaaaaagtttgttactttacagacaagcttcaatctttaaatgtgttgcttctcattatagcacatattatttaaaaaaaacgaggtggttgtcacaaatcatcacattctgttttgtaaagtctttatgttctgtaaagttatcatctcctttatcatgctatctctcttcttgctttttttttttctttctttctgttccttaattgatgctttattagtcacgcttaatctccagcaattacataaataatctctttctcatattgtcaacgactaatctgagataaaataataaaataataaaaattatagctgctcttataaacaaaagtcacaacagactatcatctataatctgctacattcagtcctaggctagtttgagtgcataaacttcttcaaatacaccaatgtccgacttgaattacaatcttaaaaaatcatccaaatttactacaaacagaagacaaatcttaatctaatacattgaacttattatgagttcgaccatctcctacaaaggtaaagaaaagaaaacacaactcaatgaaaactaacgataacaactatgctatgtgaatcagaatcaatattcaatacacctagcttttaaaagaatcattattggtctagaacataagagaaagaacttagaagatatcctcacgtctccgacggtagaaaacggtatgagtatgattggggaatattatgatgagatatacatatatatgttgtacgttgataattaaattgctatggagaggtattggagaagctcaagaccattgatagtcactttgttgaattctaatggcttccataaaagttgaagaatggttctcaaagatttttcgattagttgcaattgtatcttctatatcatgtacaacatttttgcattcatcgatcacaataatttcccgccaattctctcaacgctaagagtagatgttaatcccatcatgttttagtttgtatttgtgaatcgcacaaaaataatttgtaatttcaagagaaaccatagatgcgtggataatgtatatctatgttgtcatagcaaacaacgatatcattctgcaaaccacataacatatgtattattatccacatcatgattttacaattacactgttgtttgtttgttctggttggacaatgcaaaaatcgcagtcgcagtcatggcgccgcctaaatcccgaaaacaaattggaactaaaactgcttaaaaggatggttgaaagtgaaactgacatcagcatcaggataattcatgtattttttttttaagttgcatgataaagtgaaaagaatattttcttgttttctttgtctcaagtcatcttattatatactattactagattttaacccgctgtgtaccgcggggacaatttatttttaaagttagtatatataaaaacaccatttattttattaatgctgatcttatttatgatatgtttacgaatcatttgtctaaatattttagtcgatgcgggacgttgaacccacacatttttcgccaattggttaaaatatgttcatttttaaaatttcgaatcacaagatatgacggaaaaaaatttgaattttttttaaactctatatattatataatgatgttaaaaaattgtgatatattaaactttttaaaagtttaaatattgataacgttttattaagtttaaatatagaaataattatatttaaaaagttaatattttttaccttttaggtaatgacataataaatctaaaagcaaggatttagaagatttagatctttaattaaatattttcattcctaaataattaagcatgacattgtaaataagttcaaatacatgatttatttatttaaacaaaaacgtttagtaagaataatatttatttaaacaaaaaactttgttttaaaatattgttaacaaatatatttatgctaattttaagggattgatgtgaagtttgtttggattaaatttgattgataatgtgattgacaatttaaattaagaatgtaaagtaaaattaattagtttggaaaaaagatttaatgctaatggcattattgtaaataagttcaagtttaggatttattagctaaaatggctcaaaaaatgtatatgtaaattaactcgttagtttaaaatttggttttcttagtctaacaagaagttaagaaaaatataaaacttactttttttttcccggaaagatgaaccttgcaggaaaaagacaaactctgtaaaaccaaaccgaccttactttttggcgattgaatgaaacataattaagaggctttttcaagatcaggatactgatctcgatatgaatagtctaaaaaatctagatcattttcaatttcaaatcgattagaggccaagtagaaagttgtattttggaatggtcaacaacgatctactcgttctttagccatttcatacaagaaagtttattagtggtgtgcatatttccattgttgttattgaaaacaagtttttgagttctaacctaaatttgtttttattcaaagttattgaaaacttgtttaggttagaactcaaaaataaaaattatattgcatttcaacttttcatactgccttacttaagttgttatctatcatcttctaagtttctatggattattggattttaatggattgtaaaattgtcgtagaaaattaatttattagaagtcattgattttaaaataaataaaaagtagatatgaaaactagacaagtagaaaattttaactaaaacaatattgatgtagcattatattaagttttttttttattgatacgacaatgctgatccatttacattcacatcacaagaaagtaaaagcaagaaaacctacaacctaattattgtaaagtctttgaaacatatttcaacaataggtttacttccttgaattatttcgaacatatatagtatatataaataaggttttgtgcaactttaccttctatctccaaaatatgcagaataatgctataaagtccaaaataaaaaacaatataacccttatacattatatctaagattaagtctatgttcttcctcgctttgaatgtgattccccaaagatgaaggcttcttcttggcagatagaacaaatccgagaaattcatgatcgttgaatgacgatttatagctagatttttgtcgtttttcctcgaaacaacagaggattgttagatagttatgatctttgatgcatttttatacttccaatgttcttggtccaaaggacggctctgatcagaagacatatcgatgtaaaatttaatatttttaaatattttaaagttaaaaaatgaaatattttgtttacgccttgtaattatggaggaaaatgcaaaaaaaaaaaaaaaaactgtattgatctggtgctgcttgagcctaatcgttttttgtgatgtacgcaagttttttttttgtgtgtgtgtgaatagattagtcctaagaacaaattactaaatgctcagtaaaacaatcatgcataaataacaaacagagataagaaaaaaatatccttaggattgcatccgacgtttatactttatattgtggaaactatcatgccgatggaagaactaaacccatttgcacaagaggtcaagccacgagaccaacttccattgtaagacgatagtctatagatataatttggctgtatcaaagttaactataaatataaggtgtattttttttgtagatcaataagattacattttaacaattgtacacatggttaatgaatgactcaggtaaaacttaattttaattctttttctatctaaaattttacatctttttaaacagaaatgataacaaataaatagaaaatcgtagtaaaaagtttggttaaccattttcgttaaataactttatgagtcagtccgagaattaatacatgatgctgttgtaacaatttcttttatcatctagtagcctctttgacaaaggcccattaaagcccataacaagtagctctaacaaaaccagacgcaaacgcttcttctgacttggtgacgaagggacacgcaaaaagaggacctttaactctctctgagtcaccactttcacgttaatcgaaccaaagttcacgtttctctctttgacttttcaaaacgttaaataatagtagtaatacaaagtctaaaacttcaattaagcgttattaatcagaccaaacaacgagattatacagtgattaatttgagcataaacacaattaaagacgaaacaaacactaatccaaaaccttttagaaacaataacaaggttcgtgtaagtgaagaagtcgaaaaaaacgtctccgacggtagtaaaaagccgatctgagtcgtgaccaaacgacgcgtttcaatttcggagctgatcttaatcttgtcaacacaactcgtttcactctcgtaacagatcttgaaactttctcagcgaaactctgttttcttgaaaactggtagcttctgagaaacaactgtctcttctccatatactctccatatggtgcaccgtagtagtcaccaccactagtgcttctgaacacaagcttctcactcatcggaatctgaaaacgcttcagtcgccgccgtagttacgaagagtttggttagaagcgtgtgttaaactctttgtctcgctcattcactttctctctctctctttctcgtttcaagtacttatagatgtttgctttatgtttaagcactgtggtcttattggcacaaagtaacctaagtgctctctctctcatttgaaagtctttgttcacgttaatacatccaaaaatatctggcaagattttaagttttaacctattcccaagaagcaacaacattcccactaacataaagttgttacggtgaatgttgtttagagaatgaatgtgtattagtacttctttttatgaggccattttgttttgaaaatgaaaagaatatactacttttgttttgtttaattccaacacacccatacattgaatcagaaggacccaagataaatagttcaaaggatttaaaacgaatgcctatttttgtcacaaataaatgtattaacattttttatatttacacttaaaagtttatacaattttaaatagtatttcattatctaatatacgaatcttgtagtgctttgtttcttttcattcattttagtctcttttgtggtcacaaaaagaatatgatagacctaaagaaatagtttaagtttggtggacattactagtttagtgtagttaggtgtgtgaagatgtgacaaggcattaaagaaggataagctaactcctatgcatttactttgcttgctatggtcaaaacctaaccctttcatcatcctaagaacaagacttttgtatgcaatgtcaccacaatactactacttacaagctcagtcaccatctgaattcaaggcctctgtttattatttagatctcaaacttaagatactgatgccaagaacaaactgtatatgtaaacattatcagactctgaaatttggctttacatgtattagaaaagaatggtcctagttcgctgctgcgagcgattcacaagctttagaagtaattaactgagaagttccatatcctattatctacaaagcaggcaagaacaacacacaggctgcaaaagaatatggcagtagaagactcattgtataaagctacaaaaggtaaatgggtttataagcttttttcatttatcctcaagtctccaactaacaacatcttccaactaagaacacacctcagaagattcatctgaatacaactattaggagcatgttttgtacctgttaatggtgatttctacattttctctgctcctatctaggcccactttcacttgcagatgggacattgctggggaaactagatagatcaatgtcaatgagcgacatatcatacattgtttcaagagaatctgaggcatccaccagcaaggaagatttcacagcatcagagcgtgcaggatcagaagttacgctggagcttttaggtgagcttgcctctgaagatagactacttgagactgaaacaccatctatcttgtttgcatacacaggtttgttttttctcattgcatccatctcttggccagttggcacaaaggttctcgatcggtacttctttgtcccctcgtcaccaccatcttgatggttatagagcacataatcgtgataggtaggagcaaactgcaataaaacaatcatcagaaaaccaatatgaaaaaagtatattatctgaagtaaagatggcttcaagagaaaccatttacctggtgaacagtgtcatggtaaaagtcatttagttttacagcatgtgataagcttcctgagaaactgccagatccaccaacattggcaccagcatactccttgtatggaaaagcatagaaatgacatgctgcagcaatgagcatctcgacacatattataaaattttgaaaatgagctgctgcctctgcactctttatgaatccagattttgcagcaaggaaaacgagaacaccctgtgcaaagaagagggtcatggaacacaatcagaaaacacaactatgcgtggaagatagcaaaaggcaagagaggatatcaaatactctgaagtagtaagcaaatttaacctgccaataggttagaaagaccacagactttatgatcacaaactttgggactggattgaatggctgaagtagatctctgcatgccatataaaacagcacaagtgcgtacaaagccactgtgtaggatatggtatagatgatggtaagatagagatatgcttgatcagggttaaaatttccatccttgtacttccctttagcataaagcacaagtgtgacagcaactaggataggcttcagaattacaaattgcagacaaccctgcttgcatcgtcgaataaatcgcctgcatgaaaaagaccatagtgcatgtgtcaatagatttcagctaagaggactgtcttataaaaacgcaagataaatagaatcatcatgagacctcgaaatccaaacagaacactcaaatgtccaggtcattaatattgtatgacttgcacagaaaaatcatcatccaaaatgataggaaataccaggaaagattatgtaaacactgccttattgataagtagaagaattttgtttcattctgcgaacttacccgtccagtgttaaaggcggaaagcaacatgtcataagagaccatgatggctttaaagaacgaccactcaaactaagcactactgatcctgggcctccaacccatgccaaacacagcgatagaaaattgtagataacccatgcttcatatctggaacaccaaaaaggtcatcagagtaggctaaaggccattgactttgaacggaaacagaaaactttcaagaccaactctaagacctattgagccactctaaaagaagaaaaacaccactaacatcgtctatgcacaactagaaatttaggaatactcacacttctcgtatggaatcaaaatatatcgagcttttgggtaacacaagagacaagaatgacatgaaggcataaacctggcagcaagaagcaaacaaacatgtcagtgagacagaattcaacatgttaaggactataaacaattcaagctagagatgatgaaaagcactaaccgggaccatgaagataatgcgtacaatatatctctgataagttggttccgtgtaattcaaaagatgcctgtagatatgaaatatcgccaaagcaatagctccaacagtacatagaaacgccacaatattcagataaaatggtatcaaatccgccattctgcaaacacacataaatctccatgaccaaactcatcaaagcaaatgcaaaaaaaaaaagagatctttggtatacaacaaacctctagaaagagctaagacggatctgtgaagaaaacttcaaattgcctcttcttaaggtatcaagagggttctgaaattgaagggttacaccgaaatcagagcaagaacacgaacccaatttcgcgattcactaaagttggaaactttctgtcagagatcgaagagaatttgagatacgatcgaaacgcaattgaggataaaattcgtacctttgaaatcaaaaggggaagagaagaatgtaaccgtagtaacgaagcaacacaaaaacagaaaaaccctctgattagcggattaaaggggattttgtggatgagggttttgagagataaagcctttcttcttcctttagaaaggaaaggagagaactttatcacagcaaagcaagttcgaaaatgcagaagattgttaaaaaggaatgatttttaattttggttttgtgaagagattatttagatgaggtggaatcgattcaacgtccatccaatacagcctgtgaacttcaaaccctaaattatttcataatttattttattttatttttttggaataatctattttgtttaacattattatttattcacaagtcttacccaattcaatgattacaattgttaattagtttgttaaaattgtcggcaaaggatacataaggttttctggtttgcaatagcaaataaagaaagaaatatcgttgaattttagtattttgttatatatcaaaggagaaaagaatattgaaaaacagtttggtataagattagtgattgtattttaagaatatttaatttaatgttggtgtagatgtataatgttaaaggaaaagttttaaaataatagattgcaagtttgtaagataaatctatgtgacaaatgagatgtaaaaggtgaaacatatattttatgtcataaagttcaaaaaggattataaaagaaaaatacttgggttaactgtttaccctcttaattttagccaatcaggatttatcatctaataataaaaataataatttatttaattaaaaattttaattttttattaaaacgaaattatgtatcggtttgggtttattagaaagggttagactttaaattttatgataaaacaatgttaaatatcggtttgggtttataaacggatttaaattttataattacacaaagttaaatgttggtctgggtttagaaaatacgattaaggtttagattttttacgattaaacgagtttaaatggtagtttgggtttacaaaagagaattatggtttagattttgtaattaaacgggattatatatcggtttgggtttataaaaaaatggttagagattagatttaataattaaataagtttagtgggttttaataaatttatttatttatttaatattaattgttttaatttatttaattagatgacatgataaattttaattggttaattaagagaaggtgaatgaaagaggttcacccctagggctgaaataaagagtcataaaatgtttcaacctattctgctatgaaaaaattcaccctttttaaagatttatgttttattccatagaaaatagaatgaagatcctatacttggtttgagagacttgtattccataagaatgagaatgaggatggttttggagttattgatcatttttggtaaagatttgccaaaaacaagatgggtaatttgtttggttgtagatcccaattggggattatcacatgtgtaattgaggaaaggagaggcagatccatattccatagggatgtcattgcttcatatggtgttttggtgaccaaatcgttggctatgtctcaatgaaggtcaaatactatattgttcgttgtattactaagacaaaggtatattatataaaaaaattatgtgatttttttaatcaaccaaagagactcaaatttcttatgagattttctaattagaagtagtcattttttatatctttgcaggataatgtctttggattattcattctctcagttctactcggttgtgactagttgagctttcagtttaagttttctatggttatggtatattggaaattgtctgtttgtttgttcttttaagcttatatttttttgttcaggttcgacgccaactgtttctctgagattgtttgcgggttttgatggttttgaatttaagatttacttattagattcttttgtcatttacttcatttttctcttactttgcttctttttaagacttagttttcaccagcttagttttaaaaaagtttcaacttttatcggtttcgtgtattagaatcgtattctatcttgtattctacttttcttttaatatagtggaaatgttttttgtcggcaacagctatataaatctacttttgcttttaaggtcgactgtattagcaataaattaacgaaaaaagaatattgaaaacatttttggtacaatattatttaaagtattttaagaacattttatttaatattaacttaatgtctataacaacaatttaaatgttaaagataagttttaaagtaacagattacttgcatgaaaaaataatctatgtgaccaattagatgtaaaaaatgacacatattaaataatttttcataaagtttgaaaaatattataacatgtttcaacctaatttggtatgacaaaattcatctactattttatagtttcataaagttttttaaaatacacccattttacttttgtaaataatgtttttcttaatctactatttacatttaaaaaaatatttctcattcattataatcgtttttttttttttttgaagatgtatcatctttgacatgatattgttttatatgtagctacatgaaggcatcaatatgttgtagtatggtatctctaaccaatggttgtggacttgtggtgcaactgcctttcacaatttcaacaacagaagttaaaatgatttttttttgaaagaaaaagttaaaatgatcttctacttttcattttacctggtggataatttaacactaaagattgaaaaaataaaaatctatttaaattttcggtgatggatttatcgatagatttctaaataacaatgattaacgagatttagttcaataattatcaacaaggtggaagaaaaatagtgtttaaggagggtgagaatgagattgagactagtacatccaaaatatgaaaataaatatctctataactatatccatacctccaatgatccaaacatggccagaagcccagaatcagaataataaaagccatacaatggacctaaataaacatagcccaataacggcccactaaaatctgatattttacatcaacttgagtggtagaaataaataaagatagggcagaagcagagaagcaaaatcgtggaaggttacaaagcctttcaaaaacctcactctctcaactctcaaaccttatctccttccttctcttctcctctcctctccgtcgagcttactatctccacaaaatggcgtcgacggtaggagttccatcactataccaagttcctcaccttgaaatctccaaacccaattccaaaaagaggtctaattgtttatctttatctctcgataagcctttcttcactcccttatctcttgttcgtagaactcgtcgtatccattcctcttctcttcttgttccttctgctgttgctactcctaattctgttctcagtgaagaagctttcaaaagtcttggtctttctgaccatgacgaatatgaccttgacggcgacaacaacaacgttgaagctgatgatggtgaagaactcgctatctctaaacttagtttgcctcaacgtcttgaagagtctcttgagaaacgtggtatcactcatctcttccccattcaggtttgtctcttttgtatgttttatttctgttttcaaaattcttaaaaatggttcctttatggataagttcgcttagggttccgttttatctcatttccaattgaaaaaatggttcctttgtggataagttagcttagggttcctttatatctcatttccaattgtaaaaatggttcctttatgaataatctgtgttttgattaagaagcacaatcttagatatgtttgagtctctattgacatgatgttgtttggtatatgtgtatgaagagagctgtgttggtacctgcactgcaaggaagagatattatagctcgtgcaaagacaggaactggaaagactttggcttttggtattcctatcattaaacgtctcactgaagaagctggagactacactgctttcaggtctttgtttatttttactttggtataccatttgtttagatgtgaccttttttccattggattttgctaaaggtttagtcttttgttgtgagcaggaggtctggtcgtcttcctaagttccttgtccttgcgccgacccgagagctggctaagcaagtggagaaggagattaaggagtctgcaccttatttgagcactgtttgtgtgtatgggggagtttcttataccattcagcagagtgctttaactcgtggtgttgatgttgttgttggaactcctggaagaatcattgatttgattgaaggaaggagtcttaaattgggagaagttgagtatttggtacttgatgaagctgatcagatgcttgctgttgggtttgaggaggccgtggaatcgattcttgagaatcttccaactaagcgacaaagtatgcttttctcagcaactatgcctacttgggttaagaagttggcgaggaagtaccttgacaatcccttgaatattgatctggtaaacgctttcctatgcttgcctttgttccttatcaattttcagcttgactcagatgcttaatgctatcttctcgtttgttttatttgattggcaggttggagaccaagatgagaagctcgcagagggtatcaaactttatgcaatcgcaaccacatcgacatcaaaacgcactattctaagcgaccttattacagtatgtctgagctgataatttgctgttttcttaacatgattgatgattgattggtgctttggctctcagttgattatttttattttcttaatttgaaggtgtatgcgaagggtggcaagaccattgtttttacccaaactaaaagagatgcagacgaagtttctcttgcattgtcaaacagtatagctaccgaagcacttcatggagatatatctcagcatcaaagagagagaacactcaatgctttccgtcaagggaaattcaccgtattagttgccactgatgttgcatctcgtggacttgacatcccgaacgtagatctagtaagttctcaaagtttcggtacatagtttatcatctcttatggcatgtttgtctgtttgttctgacattttcttctacaggttatccactatgaacttcctaatgacccagaaacttttgtgcaccgttctggtcgtactgggcgtgcagggaaagaaggctctgccattctcatgcacaccagcagccaaaagagaacagtgaggtctctggagcgtgacgtaggctgccattttgaattc

SEQ ID NO: 749 - DNA, 110946 bp, Arabidopsis thaliana
gaattcaacaagaggatgatgttttaagcaaatcttgcgcatagtagagacttctttaaagctttaagtagcctaaaagagaccaaatcactgaagtcaaaaatcaacaggttttgacctaacctgtgcttcctgtattgttgttaggatggaagtatctgcaagaatctccaaatgggcaaaaattctgcaaaacccattaagaaaggaacagactttacttggaagattacatacatacacacatatgcaatgaatttttttgcagaatcaaacaaagcaatgtaaaatgtgtgattccaccagaatataaacgaaaaggacaagactttacacatccagagattgctaggaatgatgaacatagcgaaacaaaatcaatccgacgtaccgaggtaatgaatcgattgcagagacctttcgtcgcaaaattggagacttgtggattaacaagatctaagaatttcgtattaaaagaaacagagatgttaaaaatcgttcctttaagaaacagagagaaaaaagagagaagagagatacctgaggaagaagaactgtaccaaagggctttagctcgaagatgaggtttgctttgaagatggcgttttctagcgacttgagtgtcttgaaactctttctcgcaataatcacagtaatatttccccgacggcatcttccggcgatgacgacgacgactcgtagaatcaaaaagttttggcttttattagttttaggcgcgtgaggatacttgtatttgctacagtgacttttagggtctttgtttgatgatgttgcagaggaagaagaagatacaaaagcagaagtagcaaactctttatctagataaaaaatcttggtgggcttttacattatgaaccaaccaaccatagtaataactctttttttctctactcatacaacaaacaaagggtgcatatcagtttgtgacatattgatacatagagaggtaatttataagaagtgtttgttgtgttcatgctacattaagaggaaatcacaaaccgagccaaggacactgcttccttgcatgctcaggtactaacttagctaccatctccaatggtacacctttcagctctgtttcacaacaattacaggtatagctttagtaaggtaaaactttgatgattttacaggtaagttggagataaacaccattaggaaagggagatgttgtaccgtgaggcttgaagttgaaaagcggtggaaggaaacgtccattaggtagacgtgcgtttgggtctcttaactcatcaaagaatgggtggactaatgtgtcgagctgtgatcaggtttacgattcaagtaaaagcaagtcagacaaaagaaaaataggaaatgaaaggaccatcgagaagattcacagaagaatgttgaatttgtaagtaatactcacagcggcacttcgtagattaggagagtattgaagaagtcttgagaccaaatcaacagcttctggaggcatgcgtttgtggaaaatctgtgaatatattatgacgagtagatattgtcacattgactgtaactgctactgaataacacattgacaagttgatttgatgaatataagtttatttctaccttgtgccatggatgagctttaatctgagggaatttgaattccgtgtagtttgggttcatgcacttgatttcttctctagtaggcgttcccaagacctaccccaaagcataacaaaaaacattacatcaaatcttctctcagtattattgaaaacaagaacttgttatcaaagtgaacaagtgcaaagcttataccttgataatctctacaagttgatcaacaccgctctcaccagggaacaagggctgtcatgagcagagaatagagtttgtcaatcacaaaattccaggttaagtagaacaaaaatgtttgaataagatttaatgcattacctgtccaagcaatagttcagctagaacacatcctgcagaccagacatcaatggctgtcgtatactcggttgctccaaaaataagttcaggtgctctgtaatacctcgagcagatgtaggaaatgtttggttctccttttacctgttttcagatattacaatgatcaacaagattgaatctaactttttccaagaaacaaagtacccggaagaggtttatcaaactcaccaatacttttgcacttccaaaatcacatagctttacttgatgagtgtgcggatttacctgttccattacaggtgaaaaaagtagcattagacaatgaagaaaagtatattcccgggtatactgtgagctcctgtttatttaacttgtacataccaacaagttttgaggttttatgtcacgatgacacacaccaatgcatcggtgaatgtaagataaggctctaaaaatctgccaaacatagagaaatccgataagagatccaaaacataactctaaatctaacagaaatgtaataattgatacctgataagtgtaaagtttgacgtatataagaggcattctctgattcagtttgttgtagtgtttgataacacgatgaacagtttctggaacgtactcaagaacaagattgaggtaaagctcatctttttcagtggttgagaagaaacaatgtttcagagacacaacattaggatggtcaagtagcctcatggtttgaagctcacggttcttgtacctcctatcttgtaaaactttctttatcgcaacagtttctcctgtctcaagacatttcgcctaaatcacataagaaaatacagaggaatccaattcagtcaattgatagatacatgatgtaaaacgtgagagatgataagctaacaaaaactcacttggaacacaacaccaaaagatccgtgaccaacaacacgctcagccatgtagctaattgtctgcattgacattgtagaaaaattaataaaaacacgaaacactaaccaatcaactaacttaagaagattaaaagaacagttttttgcaaagaagaagaatcaaaaacctgttttggttggccatttctaccaccaatagtagtcacaatgatatgtccagtctctgttccatttccatctaccactgtcgcttccatttcctaacaaaccacaatccattatttagattctcatgaaatacataccaaaaactatactacaacgcatggaaacatactttatcgtcacgaattttcatgtcattcatttcttcaggcaatttatcaacaccagtagagtctcttgctccaggattaggagctatacccactgacgccatttttcaggctacaaaactcttcaaactttcaagcctgcaacaaataacaacagagattaaaatccaatgagtaaagtttgttgctttactaataacaaaacacacaaattcaatttcaataaaggaacaaaacacaattctttcaagcttaacaattgaacacttcaaataagtaaaaaacaatttagaacactaaaattacgaaaaggaaagtttttttttaacgggaacaaaaaaaataatgataagcccaaaaaaagttgcaaaatttaaaagacccaaacattaaaaccaaattagagtttggtagagaagagagaatctgtcgattttaaaatgatgggttaaattaaaattcatggtgaagcagatctgaagctaaaacccagaagaagggatgaagaaagagagagatctttaagacgtaccgatgaaaacgtaaaaatctcagatcgatgaagagaagaattaggatattaaagagagagagatccgtacgagtaaggatttgtgggttttaacaaaaaaaaaaaaaaggatttgtgggtttgatgattatgaatctctctctctaactttatttatttttccggtgagagacgaattatgaaatatttttactttatattattttgtgattcgtctataatcatctctctctatatagctggcttctcgtgaagacaattttattattactatattgtaaaagaaaaaaaattaaatcattttttttttttggtagggtggggaaaaaaaattaaatcattgataggcaaatggataatttctttgaaagtgaaaaagaaaaaataatgggactcgtcgaagttagtaaagttacattggttttagtttttgtcctctttttgagatttgaccattcaaacttttatattttcttcccaacacaacaaaccaaaagagataagggtcatagaaaataatgcataaagaacttatttattaggattattggtaactaaaagtgttttagctgttagttggagctgtaaactttagctgtacgaaaaattagtaaaataaattgagaataaaactgtttgtaacgtttttaataaagtttttgtgatcggtaaatattaaaactgtatgttttagaaaattttgtacagttttttaaaattgttaccaatcaaacccattattttaatgtgattggtacattaaaaccaccatatgtttctttgaatttttcttgtagttaaaaacatctaattagtataggaatttatttagaagaagaataagtgagggtaattttgacttttaaaatttgtatacctaaagaatatacgaaggagaccagaagctgaaaatgggccgttgggtcaaacgtgtcggagaggaaacaaaaaagaaaataatcaacgaccactttttttattataaggtgaggtgagagaccctccctatctaaagtagtaacctatctcaataattcatccccaattattggattttatccctactacatttaatttatagttaggaaaaaacattatggtgacaattctttattttattccatgtacatttcatttataaacactagtagatgtgaattaaatgttgaaacaagtattatataacaaacaagagattctggctaggaattattactattttttttcgacaaaaggtacggattaagatattacttagtcaatcataaatttcttctcgcatgcatagaaacacacagtctagaatcaaaatcttagacgaaaacatgtcttagtcaaagaaaatttgacatttcaattcaaactcattaacttactaacttataagaaatttcataaaaggaacaactcaacgtctctgacccatttatcatatatcgaaatgcgacaaatctttgttccaagtaaaaagcaagccaagcatgacttcaagatctttcatacattcaaaacaatggcttcaaaattatagactcctctattttcatatatcttaagttgatttctttcttctaccaataaaccttaaacccgggttttgtctacgccccgcttcgggtagcaaactgaggaacacggccaagtggtaacaggatatccttcattgtctcatactcttcatttccaattccacttccttccaaaatctgatatttttcaccaacatttatcaacagattaaattcagttagagttcgccatttattatgttcaagttgactggaacaaaccttgtctctgttggatatataaggtgcaatccgagggatacgtgatacagacaacgcatccaagaaaagaagaacaatcactagccattcttttaccctaaatgatggaactgctcctgtcaacgacattgtctccaacaagcttccctgctcaacaacaaaacacaaccaatatcactgagaaactatatataagcttcccagcgtaagtttgagacaagattctcatgaggaacttttaaagagtttataatttcaaatatgattccatacttatatactaaggtttcgttctaggagtacttgctacattttacaaagatagacgggaccaatcactaatttgactaggatgggctatttggtttataagtagaccgacgataacagactaatgagaagaaaaaatattggaaacgtaccagtcccttttctaactcggatatcgctattggcagcctgagatgagtgacgactctcggtaaagctctggcaaggcacccagcaattgtctgcttgatctctgaggaaagcccatctaccatgataatcctccgggggtactccttcccgttaaccaataagaactcctcatgagcagattcttccttcccatatatgtatgccagagaggacgatgatacccagccaaacagtgaatcccacatcacagcgaaatttgataactgaggaaggaagaggaccagtgagtttatttcaacgcattcctaatgggtgagtatatttaaatgcataagagacttactgtgagattgaagccctctggaggtccatcaaaccacgattgatcacggtcaaacaaatcagaatctggaatcccgggcttatttggccacttgagaagagttggttcctcttcagtcatttcctcctcactatgttcctcagtaacctcttcgtcaagttgatgtgtgctgggcaacaaaatgattccagcttttgcagctatataaagcatgtcaaagggcaaaatttaggaatttatgcaagtccacaacatatggacatccaaagtatcatagctaaattaacacctcctatgcacttactggcatcacttgcatctgaatttcccgaagaaacagcttcggcagcctggctcaatgccgtagcaagggcttctgctaatgcaaggcgtgataaactattgacatcctctatatcattagaagacaggctaggacctgctgcgttatcattgtttctaacctcacaaagatcaccacggccatcattctgatcggcccaagtaactgaacgactaagcttcttcgagccagaaattttaaggcatgatttagtgacgatttcacttgatgaacacacatcctgagctttatgtctttcatacgattcagctgcaaggatttcttcaccatcttcataagaattagcatggtattcaacagaaataattttctttcttgatttctctggttttgtcttcgagcccttcgtattagaaccagaagaggatcctgatagggtatttttcccgtccaaagtctgaagatctccttttagcttgcaactaagagaatcttccatcgaacattgtggctgcttagacacactatattctacgccgtatccatcactcatcatagcagaactcgcaagacccatctcatcaaacccaaaattcttaaaatccttctctatttcattacaaaaacctgcatatgttagacagataaacagagtcacacaggcacaaaaactgcctaacaatcattagaacaacttagagacccaaggaataaagaatctcattcgagataccaaatgaatacagcaaaatgaaaaaaacgtaacatatacagattattttaagagatatcttgaaagtaaggcctaactatcttcacagcttcctaagtgcttactcaatatttttctggggagaactgtagttttttcctgggcacaacccatcccatcaaccccgaaagtcttcttctccttttctttctcacgacgaaatcctgcagacacacattagaattcattaagactcagataaacagagagcaaggacaacgacatttattgcttcacccatcagtagaaatggcctaataaccaccaaaagatctgtctctccgacgaataaatcaaaacattcatgataccatccaaatacctttaagcaagactaaataacatatacagctacatttcttagagatatgttggtcataaggcctattactcttaaaaactccttaatgcttactcgaaacttttttggtgggaggaactacagtttgctctttcagaactgttttccctttgccatcaacagattccacaacagtagaagcttgcttggtttgcggtggaagctttgaaacactattaacatcaggcataattactgtgctagtgaaatccatctcatgcttctcttgattactttgagtagtagccttggaatctgccaaaaccaaacttaattattacacatcgataaaacatttgttaactgaaattttttgctcacaccatagttcatcatcgaacttaccattacttgatttgcttcgatcaaaaggaacataaccttcaacagcattagaaggacccatccacttctctaaagacaattcttcacctctaactccaaaattctccttaatcataagcttagacaaatccaaatccttattcacatccaaagaacctttcacttccaaagaatcaccaaacaaatccaaaatctcattcaacttcaccgaatcaaactccaatgtacgagcctcttgcaaactccccgaaaacgttttgctatcaattaaacaaccagcggagcaaaacttgctcgtctcctgtaaatcgtaaaccttatggtccttcaacgaaatccgatacttccctcttctagaaacatcggaagggagaaatctctggcaaagagtataaccacagagcttagcgattgctcgttcagtgacgacatcttcgtaatctgatcgagacattaacttcctcgccgcgaagagctggttctgatcagtggtattttcgagcatatagagctgaagcttgtgaaccgcatcgttaatggcgattgcttcattatcctttgccatttttctgcaaacgaaattgaaaaattgcttcaagttcggaatttagggtttttctcaacgaaatcaatttcccccaaaaacacttgaggcagactcgagagagcttaagcagagaagccagaaagctaaaagtgatgagatcatgaatggtccttacttattccttaagccaggtgaaaggcggttcacgtaattgggccgagtaattgggttacattatgggccaatattgttcaacagggaaaatgtcatcagtttaccatttaaaatatgaaaactcttgatttggtaatttaaattctcatttttattttgactttcaatttaatcacgagttcttgtaaactaaactaattgagatacaaattcttctttttttacgccatcagtcaacctccagacaagagattacttcgaattcgaagaagaagagggaatccaaaaatcggttttcggttttgggataaagggtatgtgatctagggaatttctaacgatgtctcttaatcaatgaaaatttgtgtttaaactgaaagtcaacataatattgaggatttaaatcaccaggtccaaaatttatgtttaaaaccaacgaaaatggtaaactgattatttgaatgacatttttcccattttctttttgagaaatgattcaaatacacatgaacaaacttataacttaacaaagggaagcaagatttctcttcgctaaacctcaaggagtaataatatgcaccattatctgactactatctgcaactactgcatttacacaccaacaaaaagaaagagagttcaagacaaaagaactcatcttttggagataataactaatatcaacatcgacattgacacaacgatcttgaaccctgaagtatcccagaagttttgtttctcccctgaaaccgattcattcaactgttttccagtaatctgatcacttagctctttgattgccttgtctcgtctctcccccgcctgcgttccattcatcaatcatacaataaaaacatttagttttctcattatactaaatcaagaaaagctttataaatcttgaggactttaccctctgtagctttcttgtctgactacgagcttcttgcaggcaaaactctagtttcagtaccttcttcttcaactcttgatctgctcttctttgtctctccaactgaaaatgttcatttatcagtttctgcgacagaacacaagaataaggacagagatatggatgctgcacctgagattcaagttccttagttttgagtttccaatgagctgacattaacttcacatcatcttttaactttgcaatctcttcgtcttttaccgccaataacatgttcattctctcaaagttctttggagaaacctcttcaagaagtttcctgagctcacattctgtgcctttcccagactttgcaacagcttcagttatctcacgctcgattctcataacttcctctctcagctgtttttgagaacattctcttgtcttcaaatctctctgaagattatcaagctggtgaccgagatgagttacacggtcttcgtgttctcttagagaacgtgttttgtcgtcaagttgttctgttagcactgagcattgaagctgtgcggattgagcagaagcagcacttgtttctgcaatgtcctttgttaaagctagctgtgatctcagatcgtccacttcttctagaaactgttttcccaaaacaagatcaaaacgttcttagaatgaatgaatgtatgaaataatccattcactaattacctcaatgattctcaattctagcatttcatgaaaatataacttttcaggccaatctagagacccattttcatcttcattgacccagttagcattccaaaaccattcaaggaactctttttgaaaaggtcaagcttcattggacattaattataataaatttgagattctttttccacactcagcttcatctactttaatcaagatctaaaagggccattgattaccaagctatgatgatcacttttcagtaccaacactactcaaagccccaaacttttcagacaacaatatcaaatttggaagtcttttaagtcatactatattataagatgaaaagggttctgagagaataaacaaaccttttcagcagcagaagttgaagctacaagctcacaatttctatcttccaacttcttctgcaatttacagatctccatttccatgttcttagctttcttctctgcttcctaaaagaaacaaaaaaaacaaatcatttctcaacattgaaactagatttctgaccctaccaaagcagtaacaataacataaaggtaagaaatcaaacagagaatcaaaaacaatggaacagtgagaagattaacaaattaataaaaggaacttacttttctacaaaagctttctttaacaaagaattgttcttgagaaaccaaacgacctctcacttgctttaactcagctgccatagacacaacgttccgcctgaaactctcttttttcccatccaaatctttcaaaagcggatccaccgtcgttttgacggaatccgacatcagggttttgtccaatttctcataaaattgtgaatctgcataagcatcgaatcaaatctcacaactttgaaatggaagaaagaagaagaaaagacaaatattcaatgcatgtggggaaatcttaaattattaacaaacttggaggaaaaataaacactgttgaccaatttaagaactttaaatgaaagaatttttaagaacaaatcgtaaagattgagactttacgagtttaacagaaacatagagttcagggttttgttgctcgaactgttgttgtttctggggaaaatttcgtcggagaaaatcaagtgatcatagtatttattgttcttgcgtgacagaggagagagaaaggaaagaaacacgtaaaggaagctaacacgcagtggtcaattaatttttggcttatctgattgtgagaaagacagatacatctggaaattagaaaagtaaataattactactacttgattttattaatttttccactaattatgggttttgagaatttattgttttttgtcataaaaaggattatgagttattacgtctttcccttccgaatttctagttattggattgataaagtacccaaaaatatggttcaactttataataagaagaaaaaaaatcgaatttaaattaggttattggttggattgcgcagaagtggatgtgtttaagggacaatgtcgacataaaagacaaagtgagaagaaaacgtggagaaagtagagtggtctttaggttcggaatattataagtagggttttgggttcggaaagtctaaaacctcgctactcactagtctctagctcaaagttcgagacaaaaagacaacaacctaggccgttttgtgcctgggtagaggtgtcaagtaagccggctcgtgtctacttggaccgatctacaatgggcacttatttttgtaagatcgcaacggatcggtccgttaggactacacgcaaaaataatatgtttagatccgctctgctatcgtcaacaggttagcaggccggcccgcaagtttatcttttatttttataagtaactaaaatttaaattaacaattatgaaatttgaattttttattattattattattattgtaaatcttataattttatatattatatttcattacactatcacattttttatatttttattttaaaaattatataaaagtgtttatttattaatattttagatttatttttattaaatatttgtagtctgcagaccggtccgcaaatccattaacaaaacccgttaaaacctacaactcgattgagcatgtctgcaaggtccgctattttataggcctaacaaatgatgtccaatcccgctctgatatggtactatttgggctgagcccgaagacttctggctcgcttgatagctctatgcgtgggtttttttcagtcttttgtaaattactaaatttcatgacatctagataaatttaaggagtagttatcttattttattttgaacaaaaaggagtagttctttatttatgaattttcatgtgaataaaattagaaataggtgaaaaaaaagaaaaatatattaataaattaaacaaaagacgtgaagaatggcgactacaaatgcttttaagcggttactcgtcacttgggtgacggttgttctcgatttcgccggcgaagtgggtcgttagaaagccactatcctagcgggtatctccacgttgatccctcgatcccaacgcgatgctcctttggcggttatgaatcccttccttctatataatggaaaatctggatatccattcaatccacaagcaatttcgacaatccctcttactcttctatatccttttcgcttctacttaacacttctgaaaatggctgataatctgatacgggttgttcaagacatcaatctgggtgttgatgatgcatcagtaacgattccggaggcgatggtggctcaggcagcggtggacaatcgattcattttgttgggcaggcctgtgatgccaagaagacaaaacctgcgctccattgttgcctcaatgcctcgtgtatggggtcaatcgggacttgttcatggccgcctaattcctggaaatcaattccaattcatcttcccctctgaagaatccttggagatggtggttcgtcgaggcccgggggctttcaatgaccgtatgttgatcttacaacgatggactccaatggcaaatgctcctccgctcaacaccattcctttctggatccaaatcaggggcataccataccaatttctcagccgtgatgtaattgaagcgattgggcgtgcgataggtgatgtcatggatgtggattacgatgttgaggcagtagcaagagtggaatttgtgcaggttcagatcaattggaatgttgacaatcctcttcgatttcaacgcaacttccaatttcaggaaggcgtcaatactctgttaaggttccgttatgaaaggctttgaggcttctgtgaggtatgcggcatgctaactcacgattcaggtgcttgcctaatcctcaatggtggaggtgatcatgactcgggggatgaagatgatgatgacatgccacagcagggtcctccaaaccaagctatggtcattcgtgaaataggccctgaagagaagaatagtgatgcagaggaaattattccagtcgtgaatgcaccagaggatgcagaggatgctgaagttcttagtgacattgatcgggatcacaacgccatggatgattatgctgattatcaagaggtgggggtgcatacagcatgtaccgtggagagatggatactaatgagttgttcaatcccatccccatttttgagaatgctacgggcgacataccagacaatgaaagttaccagaggtactcggatgtacttcatccaagtgatgaaattatggagcagactgttcgcaatcaggaagcgttggcaataaagaggggaaaaaggaagcgggaggatgagttatgtcaagaggattctccgaccacacataagcaggtgatccgcgagaaaggtgaaggaagcagctctcaggctgagagcgaccagtgtggaggtgtggtgggccctaaatcaccattttcttcatgattacaacctgctggaactgtcaaggccttggcatagaccttacagttcgacgcctaaaggagatcaagcgtttgtatctcccggacattttatgcttgcttgaaacaaaacaacaagatgacaagatccgtgatgtttgtgtggagttgggttatgagaagttcatctcggttccacctattggtctgagtggtggtgttgctgttttctggaagtcttattttcgtttctgttatttttcaaagttcaaatcttgtagattctcaagttcaaagtaatggaatatgtttttttttgtcttttgtgtatggaaatccggagccgagtaacaaaaaacaattatgggaaagacttgaaagaatatccacttccagaagtggtccatggataacaatgggagatttcaataaaatcaaggggaacgatgaaaaaagaggcggaccacgtcgattagaaagcagcttcacagatttcagaaggatgatagctacttgtgacttccatgacctcaaagctgttggagatagattctcatggacaggaaaacgccacacacatgatgtttggtgttgcctagatagagctatggcaaactctgaatggatggccaagttcccttcagcacagacagaatttctccctttcgaaggttctgaccacagaccactggtgaccagcatttccccaactatcactcaacgtaaaggatgtttcagatatgataagcgacttattgacagagatggtttcagagaaagagtcattcacagttggaattcaggaggcccaaacacaccattaacaacacgaattcagacctgcagaaaggctatggcgacatggaaacgcaggaataaaactaatgcagcagagaggattggtctattgaaacaaaagctcgatcatgccttatcaaaccctggattcacaactcgagaaatcaaccaaattcgatatgatctatcccaagcttatcgtgaagaggaagagttttggagattgaagagtcgaaaaacatgggttgacttgggtgatagcatcacaaaaaatttggcgacaggctctattctatgctgcaactaaagccagagtagccaggaaccgtatcatagtcatcgaagatgaacaaggaaatatatattatggagataatgacatcgggaaaatggcttactcatatttcacaaatctctttactacaacccggcaggatcatatcaactatgagacaatttttcgaaggtttccaacaacgagtttcggcttcggttaacaatgacttgactaggccagttacagaagatgaaattaagaatgcagtttttgcgattggaggagacccagcaccaggaccagatggacttactggagctttctaccaacatttttggtcagacattaaagaatcagtggtcatggaggttcagagattcttcttggagaagacttttcaaggagaaacaaatcatactaacttgtgtctcatcccaaaggtttttacatcaaagagcatgagtgattttagacctatagcactatgcaatgtcaattacaagataatctctaaaatcctagtgggaagactacagaagcatctttcatcaatagtctcagagaatcaggctaccttcatacctggccggaacataatggataacgttatcatggctcacgaaatgctgcattctctcaaagcaaggaaaaggtgggcgaattcttacatggctgtcaaaacagatatatcagaggcgtaagatcggcttgaatggaattttttaagggatgtgatgagccatatgggatttgatacaacgtggattggctggataataaaatgcgttgatccgtctctttcttcgttttagtcaatggcacaccaactggatacattcaaccaagccggggcattagacaaggcgatccactttcgctgtacttgtttatattatgttctgaagtcctctctcacttgctcactaatgcatcaacagttaatcgacttcgtggaatgaagataagcaacactggtccgactataaatcaccttctatttgctgatgatgctctgttcttttgcaatgctcatcaaaaatcgtgttccacaatcatgaggatcttaaaggagtatgaacgtgtctctggtcaagcggtcaacctacataaatcagcgatcacttttggatcaagagtcaaacctgaggtgaaaacaagactacgaataattctcaatatccacaatgatggtggttatgggaggtatctaggacttccagagcaaattggacgcattaaaatagaagtttttgacttcattgtcaaacaagtccaacaacgaacgcaaggttggacaacaaaattcttatctcaagcagggaaagagattttaatcaaaacagtagcccttgctctcccagtctacactatgaactgctttaaactcccgaaaggaccttgtgacgacatcaacagactacttgcacaatactggtggagtaatggtccggataagcgctcaatgcactggttgtcatggaagagaatggcattgccaaaacaggaagggggcctaggttttcgagacatagaaagcttcaatatggctatgttaggtaaacaagcctggcgaatccttcaatcaccaaatagtcttctctcacgactacttagaggaaggtactttgcatcaacttctctcttaaatgcagaaacaggcacaaaaccatcctttatctagagatcaattttggaaggacgagatttgcttaaaaagggactgagggttctaataggtgaaggaaaggaaacaaacatctggatagataattggttaccaacgcatccccaaagagccccacgatgtcttgaaggaatcactccaaacgtatcgcatgtgaatcagttaattgagtcacgaccaaagagatggaacagatcacttgtcgaaaacctgtttcatgaggaggatgctaggctaatacttcaactccgtctaactagtcagccatcaccagatttgcttggttggaattatatggatgatggtgtctatacagttaaatcgggttactggctagctactcatctgcctaataacaatccggaatttgacccccctccaggagaaacaaaacagaaggaagcgatatggaagatgaagacaacaccaaaatcaaacatttcctgtggagagctctcacaaaaactttggcgacaggctctattcttacttcacgaagaataacaaatgaccctcaatgcaagcgatgttgtgcagcggaagaaactagagaacatctcttctttggatgtatttatgcccaagccgtgtggagagccacgcatgttagcagaccggaatttttcaacccaaatctttcctttgaagcgaagctcaagatacttatccaaattcataacgataagatgaatgatcctttaagaagacaactaccattgttgacactatggagaatatggaagagccgcaaccttttagtttatcaacgacgaagtagtacgtgggaacaagatgcacacaaggcaaccactgatgcttttgattggattccaagacaaaattctcggcgagatactcgaacacaattgaatcatggctgtcctgaggatggatagcgcaaaccagaatggggttacaagaaatgtaattatgatgcaagctacaaacaaaatggggtagaggtgaatgtaggctggatattgcgagatgaagaaggttactacaatgaagcttcccacaacaaagctcagacgtgcagtacaattctagaagctgaattacaagcattactcatggcgatgcaacacatgtggataaaagggcaccggaaaataatatttgaaagcgataacagtcaaatcccaaaacttctcaaaagtgaaataaacaacttcggtcttcataatcttatacaggaaataagagtatggcaacagaagtacacgagcgtgaagatacaatggactgcgagatcaagcaataaggcaacggattgtctagcgagaactcggagacccaatgatctttcatttgtcaattacttccatgtaccaaactttcttgtagacatccttcacgaggattacacttcatctatctaataaaagaagttgctgttaaaaaaaaaaagttagagataggtaaagtgaatttcatattttttggatagtatttttgaattgcttcattttcgagattaacaagcttcttctttttttaacaaccccagagtttcatcaactttcaagcaacagaaacacatgattaaaaaattaataacatcaaataaagcatattttaaaaattaaacttttcatcatatagattcttagaatgtgattgtggagccacgttggatctccagggttagatataaatgaaactgtctatgccgtgtgacagcccttgcaactattcaattcaaagttgaccatacatgaaactatttcaagcaaacgacgcccaacatcaagtattcaagttgttgatattgtctaaaagattcaccatatataaaagccaacttcatggaatcgaaattgtagcggtacaacagttactagatcaccactttatgacaagcacactcttgacatattaatcaaacttggccaagatgatcccgagctaaccacacaccacccacacatctaatatttgactgttcatgccacacttatattgaccttgagaaaaatgaagagtatatcgactcggttaacaaaacttcaacaagacaatttcttataaaaaaataatcatagactgataaatttctcaaaacacttttcaatttaaacaatttcataatatgtgtatgttgacatttctaatacatgaatagattgatgctcattgaactttattgaaatgtaaagaagagataaatgtgaaagattttatgttgtcttcaagaacaaaataagtttcaattatgttttataaaatgttgaatgtggctgttcaaaaaagtagccttgattacattaatcaaagtcttacacaatataacataagcttacacggacttctctaatgaataatgattataacttgggtttaggatcctcttttccacctagaggcttttatattgttctacaatttaattttttttaaaaaaaaaaaaaacaggagcaaaataagatagtgtgtatgtaacataatttattgttgttgtaagacattacaaataaaaaaaatatgattgcattgaagaaaacaatatcaaatgacaaatacatagaaacaaaataataattaagtaaggcaccgagagtagaaattaaaaaaagcttataaaacaaaggaatctcggtcacctctcaccaactccaatgctcacttatacagaagctgagaagcagaaccgcttttatataatcgcactcactcagagaaacagagaagacgatagatagagaaaaaaaaaaaatggcgttggctcttcgtagactctcctcttccgttaagaaaccgatctcgcttctctcctctaatggcggttcactccgtttcatggtaaaatcctatcacagtcagattcattcacgttttatccttcgtttgattctgatccgtttttgactcttatacacagtcgtctttatcaaccgcagctatggcggaatcggagaaatctcgttctagtgtaagctcatcaattagatcagatgcgtcataatatataatctaacgaatggcttatttcgatttaaacttttctgtttctttatcagtggattaagcaattgaatgcatctctagatgaaatcgatcctgaagttgcggatattatcgaattagagaaggctagacaatggaaggtatcaacaaaatttagtgagaatgatcaaattcacatatatagaagctttgatttattgatttgggggatgatgttacgagttttttcagggatttgaacttataccgtcagagaatttcacttctctatctgtgatgcaagccgttggttctgttatgactaataagtatagtgaaggataccctggagctagatactatggaggaaatgagtatgtatttgttatacttacaatggtttactttgttgttagtatatgatgcttaaggttgtttgcatcttattgactaggtacattgacatggctgagacattatgtcaaaaacgcgcattagaagcttttcagttagatccttctaaatggggaggtgtgctaattacatactttcgttgtgaattgtgattaaagaaatcctactagaaaccaaatttactaatggagacacttgttcattttgtagtcaatgtgcagtctttatcaggatcaccagctaatttccaagtttacactgcattgttgaagcctcatgaaagaatcatggcacttgatttacctcatggtggacatctttctcatggttatcaggtacttgggttctagtctctctagcttggtcagtcagtatttgactttcttttctcatctctttgtggaattgatattgtatcttttcctcatttcttttatttgctcttgtgcagactgacacgaagaaaatatcggctgtatccatcttttttgagacaatgccatacagattggatgagaacactggttacattgattatgaccaggttggttagttcatagccagcttagcttaatgcttcaacattctatctttatccaatataccattgagatatgggtttaatacatacaagcttttcgtttacggttcttatgttaagtaattgaacagtttttaaaccaaagtttatttatttgtgatacaataatttgcagctagaaaagagtgccgtgcttttcagaccgaaacttattgttgcgggtgcaagtgcttatgctcgtctatatgactatgcacgtattcgtaaggtaaagtattgtctcaactcttgagtgtgaagtttagttacaaaagttgcagttttcaaggttatgcataaaaaattgcaggtctgtaacaagcaaaaggcagttatgttggctgatatggctcatattagtgggttggttgctgctggcgttattccttctccttttgagtatgcagatgttgttacgactacaactcacaaatcgcttcgcggtcctagaggggctatgatattctttaggaaggggttaaaagagattaacaaacaagggaaagaggtgaatttttcgtttctatattgtatatgaatgagtaaataacttccagttactgactaattttatgtcgtttgtaactttacctgataggtcatgtatgactatgaggacagaattaatcaagctgtttttcctggactgcaaggtggtccacataatcacactataacgggtctagcagttgctctgaagcaggttcagtcatcaaacttttattgaaactgtgttccattgtctaatgtgttcgcatgatctcctttcactttctgattaaggtctactctaggattctcttggtcttgtaactcttgttcatgatcttttgacttatcgatttgttctattataggcaagaactcctgagtacaaggcctaccaggatcaagttctccgtaattgctcaaagtttgctgaggtgcgttgtgtttgctgattgtcgtatttttacttgagtaattagttgatatgccttagatatcttgtcatgtttggaacagttggatataagacctactgtaatcatctcatatggcttgtcaatgcagactttgcttgcgaaaggatatgatttagtgtctggaggcactgataatcatttagttttggtgaatctgaaaaacaaggtacttctcattctatctttaattgctcaaaccctttgatatctagatggaaatgtttgctttaaatgtacgagtttgcatatgaaaggactgaatctcatcggtattagagaatcttaactcttgaaatatgataaaactaaaaacaatgatgatttttttcccatatatgttgtgtggtttcaatttttactaacgacatactgaccagatggagctaatcaagtgtaaaatgtttaatttttgtactgttaaccttagtaggaagtgcttagaatagctaatttactcttgtaaaatatttgatgttggaaaatgggttttgcagggaatagatggatcaagagtggaaaaagtattagaattagtacatattgcagcaaacaagaatactgttcctggtgatgtttctgccatggttcccggtggcatccgtatgggtaaggctcttataaaaactctgaaagaagtaatgtgttagtatgtcgaaagagtagtaaacattcatacgtctgctatttaccaccattaatgttatttttgaacaaaaaagaacactgaaacaagtaaagtgttagtatgtcgaaaagtgctaaatgttcatgcttcttgcaatctactacttatgaaaaaggacttctatgctaattcatagagacctgttgatcaccaagaaaatcgtgtatgttccgatttgttcttatgatggatgatggtatggttacaggaacaccagccctcacatcaagaggattcattgaggaagattttgcaaaagtggcggagtattttgatttagccgtcaagatagccttaaagatcaaagcagagtctcaaggtatatataaaaagtcttttggttcggtttactttttctgtgtcatgcttgggattgtattgatgtatctataatgtactgcaggaacaaagttgaaagactttgtagcaacaatgcaatcaaatgagaaattacagtcagagatgtcaaagctccgtgagatggtagaagaatatgctaagcaattcccaacgattgggttcgagaaagagacgatgagatacaaagagtagttttcatcgtgtggattgacacgtttccacatctctgagatgctttaggtacctaaaacacttaattatacataagcttcttctatgaaatattttggagggactcattatggggcgattgtgcaaccgtttgcagtgatcatggaccagaggcgcaaccgatggtctgaagtatcgctgaaactaaagttgaactaaaaaaatcgcactccaatgttgtctcttaccctttccttttgtctctcaaattttatctttgcttccttaagttggttcctcaaaattcaaaatttgtaatgcaactggtttaaggttgctatgatggataatggcaactaaagttataggataaacgatgcagctttgataattgatattgtaaacagaagtgtttctgaaataagatgtctcgtgctttttcacataaacaatgctactttgtaattaagcatgcttcaagaatggcctaaatgtgaaatttgaggtacaataaagaaaaaaactgtccaaagttcaataaaacaaattagaggtttttgttgtcgttttttgaaaagattgaggtttgttttacagtttttcgaggttaaactcgcatttgtattgttctcattaaaaaacgactattaatattattttattttaaaaaaaatttaacttgctttaaaatacttcaacaaaaaaaaaacatatgttttttttagagctaaccaacctcaagtttgattttttcattctgttgcgaatagagacatacagttcaactgtgaatagagtacggtgcggttcaaataagaacaaaaatatatacatacacatatatgtagagattttagttactattgaaaccgcaacgcattgtttggttcaccgcaccggactgcggaatttgtgatttgttcggaaaaaattacggcttgtcgttttttcaaatgattgaggtttggtgtacaatatttttattcaaggttaatcttgcttttctttttgtaatttggtgatttctttgcattttttgtcaataattttttttattttaactcaacttggtttaaattttttaaaaatatttcaacctgccacattgaccacaatgatggaggaggaaacaactattcattctccttctcttttcaaaaaacaaatactactataaaagttgaaaaagaaccaaaaacagatcccaatatatccaatcacagctgcacatctcgaaaatgtaacatgactaaattaaaccatcaccgttaattttaaaaacatccaacacatcaaaaacacatctgtaaactcgcatggaccacatcaatcctctcatgcccatcatttccgccataaaagctttaccttttttccacaattagccaggtacacactaattcgacactagtagaatcttacacacacacactagaatccacttcaatgccgtcatctatccgctggtggtggccgatccatttcacttcatctggatctgtaccaaggtggctgagttggcgtcgaccggagctgagtttattgtctgtggtggtcgacgacgttgtgtggaaagttgttacggcgttcgagtcggtggccttggtctccatgctctgtttcttcttcctcttttgtggctgcaccgtctagttttgattttacttaatctcgttaagattttttgtatttttttgtgaacggtgttttatcaccggaaagttttgaattgtttttttttctttttaatttttagctgcgtcaccgtgtggtagtggcggagaaatttatgttagtgattcaaaaggaggcgcgtgatgctcactcgagagttatgatcatttgtgtttagttttggtttcttttgaaggatgattatgttatgttaggttcgaatcttgtgaaccagaaaaaacaaaaacctatggtttctatattaagaaagctgtaaaatcgaaatcgtaatgggattttgaaaacggatattacatagttaaattgaaaatgcttttggaaattttaatcttcatattctgatttttcaacgatttttgaatatgtttttacttagcaacctaaagttatagaaccaagctagaaaatacatgacttattcaggcgattgattttggatttttcaaaatgtagaattttttatttgggcctgctaatgggctggttcgtttacatgaacaatcaatgagcttataggttactctcacttttactaagggacttatgggagggagtcaataaactcaaaagcaccaaaaagtttcgctgaggttaattctaacaaggaagatttgtgaagaagaagctctgataatggtgtggacacgactgaagcagaacgcgaaatcagttctaaagatagcaccactatctttaactctaaaccttactagagattactctaaaccaactttttattccggtagattgttttcacttgtctttttcacggacctaggtacagaatctcttagtctttaaaaaaaaaacaaatgttttcacttgtaattactttgttagattttgcttcggagacatgtcatggattaggaccgatttagccatagtgacatgcctagatagaatacgtatatctggtcttgtaggtttggaacataactaaaagttattaaattatagatgaatagtttcattgtattattaaaaggcaaaaacaaataaagataatgttgataatctttaacaacacaaaaaagaagaaaaaaaagtaatggcattcaagtttccaagtgcatgatgcttacactatccatcagagtgaaataagccgcgatgactagtggtaggattatagatgcacgcttttccgtatagattgtataaaatcaagccgcgatgacaaactatgtcgtttcctcctccaatccttgggataaccaaaccgtggtccttactagacgataatgataatgatagcattacagaactacccaggtactcgtttacgaaacgtatgtctacacgatgaggttgttgtggtggagatgcgaccgtaagataaaggttggttaaatatcgagaatggataagagaaactcagagcttagagacacacttgaacttcatcagtgatttagcaggcaatctaattggaatctcgatcatgagatccaaaggaatctttgccgaaaccaaatcgtctatttcttcctcttctcgtcgtatttgacgactttttcttccattggaaaaaaaatagtctgagctttagacatacacatacggcatacccatagctcaactacagtgtcaaggacaaaaccctaaacccacaaatctttgttacatttttttttgcaagggaacgtgataaaaaaaggtttaggctaatgggccaaagatgtaatgggcttagccgtttaataaacaatcgatgagcttatttcagaaaacgacgtcgtagtaaggaactcccatcagagaaacccaaaaacccaaaatctctctctctatctctatctcgcccgaggaaaagctccgataatggcgtggatgcgactgatacagagcgcgagatctgttcttacgacagcaccagcgtcttcgactcttaacttccatagattctactccaaatccgccgctccttatcacggtaaaccgtttttatttgttcagattttgcgtcggagaaatgcggatgctaaacttgcgtgtattggctgattcgttaccttagggttgttgcaagtttcatttgtgtggagattcatgattggtcttctcgtctgagtagattcagtttcagtgatcgttattgttattcaaagtttgcaagtatttagggaagactaactattgagatgttgtgaatggtttttgattgctactttgagatttttttgtagtgaaagttggaattcctgagtttttgagtggattggtggaggagttgagactcatattgctaagcttgaaaccgagttaggcgatcttccgaaattgctcgtgactcgtacgcttagactcaagaagtttggtattccttgcaaacatgtaagtttccaagtctttattgttctgtgtaagttacatagatttcaatgtgcatttggttatattgttgttgcagaaaagtgggttagttaggttcacaggttttaatatgttactttaaaatgtgttccattgcgtattttagtgaggtatctatagaatttaaggtaaaagagaagaaaaagtcgagttcttttaactttttagacacaaagagattgattgaaatggtcttggaacgttagtttagcttgttggttatcattcaaatatgaaatataggcttgttcgcacttcctgtcactcaccaagacatgtttcttttcgtgttactgttaataggttttggtgaacaatactattgaatttgttccattacgtagtttagtgaagtaactatagaggatcaatgagagaagaagaaaaagtttgagttctataagtttttaggcacaaagagaatgattgaaatgtatgtacctatagttctattttgttgtcatggaaatgtaggtttgttcacacttcctgttactcacgacgatctatttctttcatgttgctgttaatagattttgtgaacaataccatgtttgggtttgttctctcaattcttcatatctctattttggtcaatcttcttttgaaaattctgaattctggttttgcagaggaaattgatactgaaatatagccacaaatacaggctaggtctatggaaacctagagctgacgcaataaaggcgtgattggttcctgtactcatcgaatcataagttcctctcatactttgttatgctaatggaatgagttgttctcagaatgatctaggcatagcaatgttgcaaatcacttgaaacattgtaccaatttgcattcatgtacttgttttttccatggttataaacattaagcgactgttcacatcctggagcagtaacttttgaagtgttgaatgtatcggtcttgtgggaatccgtttgttcacaaaattttggaaatcaattgattatagtaaaatatatctttttccattggctacaaaaatttggtatgaccaaaagactctagtcggactgggtttaagataggtatttactaatttgctactgttaaaaaaaagagttaaaaagttcagtgtgagcttaaccatttgctaaatttatttttttgagtcttacgcccaaccgagagaccatctacaagtttttgggtatcaatattttgtactaccaacttatcaatatttcgaattagtttttgagatttttcgattctgatctatcacatatatgtacgtggtagtctaagaaaatatatgttgagtcttgtaatttgactcgagttcattctacaagcttgtattttcaaaaagacaaaaatcaagcagcttgtaatggttagaataattaaataaatctcgaatttaagtttttatatgtactttattgggtttgaatgtaagtggtagtatagcaatgttcctattattctgaaaattaataatgtattttctttcaaatgaactcatgacaattggtctaaagtgtaaacataaaataaaatggaaggcaatcataaaacattaatatatatatttttatttactgtatataaaaagtatttttctgtcaaaaagaaaaaaacgtattttgtaaaatataggagaaattttataactttatatatatatattttataaattatataacttttttttgcatggacaagtatttgatccatcttatataagactcaaaactcctcccaatcgaagttatcataagttttctcttctaatacctccaaacatgataaaatcattgttctacactttccttcaaacgaaacaccaagaagaaagcaacaactcaagagatcctaattatcctctatttcctcaagagatcgagattcgacccatagcttatttcccttgggaaatcatcaaaactctaacaaccgatgaaatcataagtaagttccaacttccaatggaaaaaatccgagataccatgcttagacatgcttcagaagaagacatatatcgcacaaaatttatgagttgtgagaccaatatattggtaaaagatctcgacacaaacactatccatcaaggtaaattgtggaagcatccatgcgaaaataattttgcattgcgtgaatcttggatcgaagaatttgtgaagaggaggaggcttgtggttggcatggtggttggtatgtattgggattttgaggcctgcatgttttgtttctctgtgttagatggaagacaatgaatctaaagattcaaattattatttaggtttggggggggggggggggggatcagaataaattatgaaacttttgttttcttatattttgggttttagggataatcatctttgattctgtatgggagtattgtgttgtatgtccttcaatgatacgaagcatcagaagatagttgactgaaacaatttatcgtctacactctacacatcataagtcaaataatagttaaacggatatgaatttatattcttaaacatatataatttacaaacttataaatatttttgcttgaatgaaaactgtaatatataatgcactttcgaaacaatatttatgcagttttttttttactttatatatatttttggtatgagtgaacatggattaaattacatctcaactctactttgaaaatgaccatgccaaatagcctaattgttattatgtcattatcgttggttcaaaccaaatatttatcacatcgttaacaaaaaaaagttaatattattttaacattatatacttttgtagataattagctggagtttttaaagaaaaatctacaaactaaatcattatggacctgttcgtttattaatcgctgcgacaacgacaacgactccgacaaaagcaaaaattataacggagatacaaaaacagtcgctcaatatggacgccggcgatgtccctagtgaagatgttgagtcgctgttattttaggcgacacatgtatatgccttataggtcgctgtttttaaaatcgagcgactcctctccatataactctctacagaattcaatgtaattgtgtattaaacaactgtttttgtggtcgctggatctgatcgcagcgtctggaaaaagaacagggcctatatcaatgctaaagaaagagaatactatccacataatatatgttctgtttctaatggttctatacattattttaaatataataaattgcatattttaatttttttgattctttgttaatattatatccttataataggtatagtatgtctgtatgtgtataataaaacccttgaataagtttaactgcaaaaaactatatcatcttgtgtatggacaaaataattaagacagaatttattatctaaacttttttttatctttcttacaatggatgtttacaaaatttctcatatataattaaaggaatatttttttttaatattaattgttacaattagttttgaagtttaatttgaattataattatttagtccacatataagatgtttgtggatttgaatcaacaaaatatacaacaataaatattaaattgataatatccatatttttttaaagattaaatattaatttaaaaggtatttcttaaaagttactttaaaatcatgtaacttatcaaatcatatttataacaattcataaaatcatcagaaagtaaaaaatattatatgtgtaacagtgtaaggcactatctttcttttagtatagataaaatcattccttttgtttctaaagtccagctaataatctagaaaattatatataaaatctaatttatttttaggtgtaagtgaaaatagtaatataataatatatcaatatattgagatgtattaagaccacaccaaaatttagaaaagtttgaaaaatactaataataagaattgtcaaagatttacaagtaaggggtttgaaaataaccaatatttgatgagtaatagttatattttctattttacaaaatgacatgacaactatcaacttgtaaaaaataataggaatatgaaaatttctaattttagggaattaaaatatataaattattggaaaaattgaaaatgataataataatattttactgtactctatattcttacgaaataaattttaactaagactttcagaggaaaaaacacgaaagatatttatatttttcagtctaaaattttgttggagaaaatatgaaaagaaaataaaaaatcaaattcatgacgtagtttaaaacaatcaaatgtcccagcacacccaagggaataaaggaccaagtcctaaacccgacggagggagacaaactctcttacttcaccattttaacctcaccataactttttgtgtaccatctgaaatatttcaacaagagaattatgttgtaattcccaaaatcggtcttaacaacactagaccaggccagttcatatttacacttgttcagaactgaaatatgtcaaacctacttaaggcacttgtttgtcttggtctcacaaattcaaaaccggtttttaaaacttgaagtatatatcctagggtattaactttaatggggagaaaagatggataagctgtttacaaatacgatttgagaattttattttagaaaaagaaaattgtgtataaatatggttatttgttgttcaatttccattttaaatgaaaaacgcaatagaaaatattccattatactaactaaccattttgatatcaaaccctaatattttcatatttatcatacatgcccacacacatctaactttaaacttatgtaattagatttccatttttcaaataatatttatatttattttagcctaaatttagattttatgtacataaggcacaagcaaatttatcttgttaacttattaaaataaaacaatagagtagccgttcgattaggcctaaattcaatatatcaaaacattcaatcaattgaataacattttggtttggtataattaagaagcaagtttagatccaaaaatacagtctctattaaataggaaaactaccataatctttttaaggaaactaataattcatccctcaccataattatactaattaacttgccattctccttcgcctcctcttctagtcttcttatgattatttttcttcctcatcttgttttttttttttcagacaaaaacctagatagctaaacatgccttgtttgttcatcttcatagctttgcttctaagttcttgtattggaacgttgaaagcccttgatcagacttgtggcaacaaagtcgtgaacacaatcgtcgtcgaccaagccggttcaggtaagttccgtactgttcaagctgccattgattcggttggtgaattgaattctctatggatcaaaatcaaagtaaaacgaggtgtttacgtgtaagtaaataccaactctctactgtttttctttttccaattttagaactcagcgttcttgaccacaattttctagcatttgatttgtttcgaatgtaaaatattactgtcgttggtgtagaaataatgacctagtagcacttgacttcatcttaggcctctccacaattctacatttatactcaaataatttttctagtttcttcgttgttttggagagaattaaagcatagttgatatcattaaatcttgaattcgtgatgttctggttcatagaattctagaaccgtaattaatctaatttacaacgatttcgatggatttgcaattgttaattttcttaatagtaagattaacattaatagtaacatattgttttgtatgataatgaatgtataaaacagagagaaggtgataataccatataataaaccgtgcataatagtagaaggagagggacaaagagtcaccaccatcacgtataatggtcatgcagccactgacgtcagctcaactttcacttcatatccatcccatattgtcgtccgaaacttatcaatcatggtacgtaacggaacggaccaacatatcttttgacttatatactatattttgttacgtaacaatataattttgataatgataacattttatatgtttttgtggcagaacacttataatcgtttgactagtctaactaaagcaaacggtatgagttgggatataaagccagcggttgcgatttcggtttatggcgataaatcagcgttttacaactgtgatttcttggggttgcaagatacagtgtgggataatcttggcagacatcacttcaaaaattgttacatcgaaggtgctatcgatttcatttttggaagtggccaatctgtttacgaggtatgtatacttaatatctctctctattacgtacacttcgattttcaatggcaaaacacgaaaactgtacttgatcactatttacacaaagactgttacattcacagtacaaacacacttttataaaatctttgtttcaaaacgccctagaaaggagctaggcacagccacaccctgtactaaaatcagctttttgttctagaaaaagtaacatttcagtcattcaaataatagaaacaaacttggttaaaaccttgtttgtagcatgttttttcctagaacaaaactaaacatgtgacttgactagctaggaggactgattttttgtaagtcaacaagttgattttgagacaccaacgattaagatctatgtgaaacatgcatgaatcgtataaaatgtttgacaggactgtcatataaacgcaacggcaggagcattggcatcaaaagtgtcgtttgggtacataacggctcaaggaagaagtagcgattcggacccaagtgggttcgtgttcctacgaggtagtgtttcagggagcaccagtgtctatcttggacgagcctatggtccattcagtcgagtgatattcatccaaaccgatctctcttccgtcgtgcaccctgagggttggtactcttggcactatggtggatacgagtaagcacatctctaactataatatatcatatataccattatcaaactatatgtgataatgatgtttttttttgtgtgttaggatgagtttcacgtatgcagaagttgagtgtaaaggagcaggatcggatatgtcacgaagagttccttggattgataaacttcattctttttacactaaacaacaattctctatctctaatttcattgaccaagatcaatggatctctaatattcctcgtttttaaataaatcactttctcttttgttagattctagttgttttatgtaatttgtatttttcctttcttgttgaatattattgtctctttgaagtttgaactatgaagactttttattttcttaccttgtattcaaaccaaactgaaccgactatatatgtatgttttctcgtttcgattctggtacatttcgatcgctctttttatatgacttcggttttcatttcaattcggttcatctattacccgagtaaaccaaattgttattattattggttcattcattcattgtatttcaaattttgattctttatatttagtactctgccaattttcatcaaaattgcactaaaacaaaaacaaaaaaattagccaaattgtaaacgaatttgaaccaatatttggtaaaactgaaccgcaattccattcccagaattataccgaaccgttataaatacggttcaaagttcaatctcttcaactaaaaccgaacttttatctattcgaaccgaaccaacagacccaatggccatggatgatatggttagccaggtggctatggattactggttacaaataaatctacgtggcttaatctcccttacacaaaactctctgtgccttttcttccccacttgagctaattcgcttaaacggcgtgcttcgcgacgaaccgccacagataaggttcttctttttttttccaatatctctggattttttttcccctcgttgaagaaaatctagtggtgattaagccataggggaaacaaaacccagagagacgagtttgctagattttttttttttttggaggctgcatgagtttggagaagaaggcgagtagtacaaattacaactccagaaaggagaagaggagaatcaatttatagaatggttgtttcaatggctttggtcagacattctccgtctttcgattttctgtttcattttccggtcgacagaagccgttttctatcgccggttgctttttctagcgttcgctatcatcgcttccattcttgtagatggttaagtctccgctcttcaccttcatgttctcgcaggttcgaatttggtttcgaaatgaatttgacaatttttgatcaatctttgctaatatttgttgtagtgatttttcgatttttgattataggttaaacagttttagttcgaggtgttcgattacaaacactgatgtatgtcacgaatttgtgactactgatgatgaaatccacgaggatttgcttactccaattgaggatcattcaattcctattgttcatcttgataccaatatctccgttactgaatctctgaccttactcaccgagtgtacttacgtagatactgttttaacagcattgcctgtacgttctttcttcccctttttggtcaagcattcaacattttctacattttttgtaaagcagatcaatcttgttcttggttttaggtattgtctgaggaagagcagactgtaattgcagccactcctgctcaccctgaaggattatatggttagagctctctcactagttcattatcatattagaggccatggttatatcacttatggcatttcccatcatgatgacattttacttgtttttgatcagtcttatatgcaagttgtttggttggaaatttggttgagcaactttggaattttgcttggccgtccgccattgcaatgctatatccgagcttactacctgtggcagtcatggggtttgtcactaaattggcgataattgctggaggccctgtggttggaaagtttatggattatagtccgagagttcctacatatatctcgttgaatgtcattcaggtaaacttttcaaaaaacactgaatgaaaacatcacacatgactttgtggttactttccttcaacttttgtcacctgacattggaattaagtgtccatgtcataaacttattttatgtctacatgtttaggcagccgctcaagtgctatctgcaggaatgataattcatgcatacacggttccttccacatcggcgtcatcaattcttctgcagccttggttttttgcattgttattcgcaggggccattgacagtctatgtggaatagcatctggagtcgccattgaacgtgattgggttgtattggtatgctttctttgtgatgccatagaatacctgtttttataagaagataaaccgactgaagtaattaatttatcatttggtagttggccggcataaacagaccaatcgctcttgctcaagcaaatgctgttctccacagaatagatctgctttgcgaggtatagtaattttctctatggaatctatgtactttatgccctttgaacttttgaactccagtaattcatcaattgacataattgtaaccttaaatagatagctgggacgatgttatttggcattctcctatccaaatatgaccctgtgacctgcttaaagtttgctgccacactaatggtgggttctttgccaaccatggtaagtagcacctataaacttgtggttattcttctttcgtccaagctaaataagggaaacacaaagctgctgtgttgtacgaggctgaactatgtgtaatagaatcattcctgtttcctatgtttcaagtttcgaattcttttttcttcaattaaaaaggcagtctttctcgtttaggttttggataattggagcttagcctagatggagtattattagttcttttaactagataaataagctgtcatcaacattggagtgatactgttctgcttcagatcctagaagcaattccacttgcgctttaccaatttatatgggacttcttaccatcttgcacttctaatagaagaaatctgttttcttcagacagctcttatatggctgaccaacaagttctcctctggagttctggaccgtcctaaatgctccttgaacagctgttctgctgaaggatctcgtactaataccgacagtatttgtaaggaaaccttttactttatactacttggatacgcataatttatgatttgagcatgtagtagacatcacaaaataccatttgctttgttcatcagttgatattggcatggaaactatcaagctcggatggaaagaatatattcaacagccagttcttcctgctagcctcgcatatgtccttctctactttaacatcgtcctcaccccaggcagcttgatgactgcatttctaacacaacgatgtatgctacttcgactcggtcccttacttttctttagtgcttggatgaaaatcgtaattaatcttgcgagagtctttgtgctattacctattactctttcaaattagtcaccaatctgtcttttttcaacaggtgtgaatccatcagttattggtggtttcagtggattatgcgctgttatgggcgtcgccgcaaccttcttatcagcaaacttggtcaaacgagttggcattttaaaggtgaaatgttttcccgccatttgttatcttgagcttgtattgcgttcaagctgattaatgttattgcgtttgcgttttaaaacgatgcaggcgggtgcagtaggattgtttttccaagcttcactccttgccgttgctgttgctgtgtattgtagctcttctctatcccataaaagcccactcttcttcttcttgtccatgatcgtaagttgtttcttcactctctctctcgaccagtaatatgcggttttggtgttgactaaaaggtaacaaacaaatgcaggtattatcaaggctaggtcacatgtcttacggcgttgtgggagctcaaatacttcaaaccggcattccatcatccaaggctaatctcatcggcgcaacggagatctcagtggcaagtctagctgaatcgcttatgctcggagtagccatagcggcgaatgacgcttcccatttcgggtttctcgcggttctgtctcttttatcagttgttgcggcctcattgatattctgcagattgctgagaaatcccactgatgaacaaagacgactcttctccttcgaccctctctcaaattgatttggagcttttacattgaaatatttgtatagtagtttcactttcagtgtataaattctttatataaagtaaagaaaaaaattgactttggtgtgaaaaattcaagaagtattccacttccaccattactactctaaacaaaaagtactaaactggctaaaccttagttatttttctaaaccgagaattaacgagataatttaacaatcgatttcaaaaaccagcaaaccgaaatcacccaatttttggtcggtttggttcgattttgttttctttcacccctgacgaagaaaaaaaaaaccctagtcacactcagataacataaacctttgacaacaaattttgatgctccttcgtcttacggctcgctctattcgtcgtttcacaacttcttcttcgtctctaccattgctctcatcgtcttcgttttgtactgttccaacaatggcagctaatcatcctaaggatgaagcgtatctctccgccgtcatccccaaacgtatcaagcttttcgagcagatccaagcgaatcaactcgagaatcttaagtctcttccacacgatccgatcaagtaaatacgatgccgatgttcttatgtatcagtgtgatttgtagtttataaggttttactttgtttccttgaagattgacttcgattttctggtgttgtgtgtgtttagggttacgttaccagatggaaatgtgaaagaaggaaagaagtgggagacaactccgatggatatcgctgctcagatttctaagggtttggctaattctgcgttgatttcggctgttgatgatgttctttgggatatgaataggccattggaaggtgattgtaagcttgagcttttcaaatttgatagcgataaaggtcgtgatactctttggcattctagtgcgcacattcttggtcaggtaaaggagttttgatcttatctgatttgtgaaagttttggttgtggtgaacgaacgagttgtttactgtggttgtgggttgatcttggtgcaggctctcgagcaggagtatgggtgtcagctgtgcattggaccatgcacaacgagaggagaggtaagaggagcttgtttgtgctaattgttacttgtttgtatatcatgttccatcatttgtgaagtttggtttctctgtttgggtgtttcttggtattttaatgaagtgttgtgtgtaaataagctatcgctgatgttagtaatggatttgttattgcagggtttctactatgatggattttatggtgaattgggcctgagtgacaaccactttcctagcatcgaagcaggtgctgcaaaagctgctaaggtgttgtttcttctttttgattcgattacttttaaggtttcttacaatgtatgttataaaatatttgcttattttgtcaaacctttttagtgaaaaatgattgatatatgtctcccaactcttagccatagtttctattggtttgattcgcttctatttgcatctcaggaagcacaaccatttgaaaggattgaagtgacgaaggatcaggcactcgagatgttttctgagaataattttaaggtgggttaagctgtgtataaatatcattggattgtgttatgctcacctaaccttacattcatttctgtcctctatgaagttgttgtttggactcattattctgctgttaatcatgtaggttgaactcatcaatggtttgcctgcagacatgaccattactgtctacagatgtggccctttggtggatttgtgtcgtggaccgcacataccaaatacttcctttgtgaaagcgttcaagtgtttgagggtgatttgctactgtatctctaggagctacatctctacagattctagtttgttttcttatgctgaccaatatatttttctcaggcctcatcagcttactggaagggtgacaaagaccgtgagagcttgcagagagtttatgggatatcttatcctgatcagaagcagctgaaggtactcaaaatatcttaattatttatggcagctacgctgtgtcataagtatgcataatatctatcatttggtcgacagaaatatctccaatttctagaagaagccaaaaagtatgaccacagactattgggccaaaagcaggaactcttctttagtcatcaactcaggtatttcattgctaatatactgtggtttcctctttgtgtttcactttactaatatctattctccatccttgagcttcagccctgggagttatttcttccttccactcggcactcgtgtatataacaggttgatggacttcattaagaaccaatactggcacaggggttacacagaggtttttctttgctctaatctcatatttaatatatttgatgcgtggggatcgctaaataaccttgcacttgcaggttattacaccaaatatgtacaacatggagttgtggcaaacatccggacatgctgacaattacaaggataatatgtttacgtttaatgtgagtctccttgactatgttattttagcaagcagctctctaagttatattctacgtatgaatgacttatcagaatgttccttatgtagattgagaagcaagagttcgggctcaaacctatgaattgtcctggtcactgcttgatattccagcatagggttcgctcatatagaggtgtgactctgttcctgttgtgctgttcgatatcatcaaaaacagatctatgaatgatattagttgtagaaattaaagttcactccataacagactatcaaaactcttttgtgaaatactaggtgctgattttttcaatgacaggagacttgctccaaagtgtaacttgtgatttgtaacctatcaccgtggacaatatgactactgtttctcctttatgaatcttactaaagaaattgtctatcatgtatcttgactgacaccattgttttgcttatataatctgatctgtagagttacctatgagactggccgactttggagtgttacaccgcaatgaggcaagtggagcacttagtggattgactcgtgtccgacggttccagcaggtagattttgtatcctagtattacttaattatcattttaccctttccatgatgcatatttgttacttaatataatgttcgcatactttttcaggatgatgcacacatattctgtacaacggaacaggtttgtgatatatgtttcttttctggcaatgtcggagctccctgtctcccagtttttggttataagtaatgttatatatttgcaggttaagggagaagtgcagggtgtgttggagttcattgactacgtgtacaaagttttcgggtttacctatgagctaaaactttcaacggtaccatatttgatgatttcttcaccagtgcatctaccagatcttatagtcttgacatgacatgtttctttgcccattatttgcatgttaatttaaatttcagaggccagagaagtaccttggagatttggaaacatgggataaagctgaagcggatctcaaagaagctatagaagcttttggaaagccattagtggtattgtcacttgttgttgaatactcgagtttattcacaaagtctgcattcattctaatgtaagctgttttggcagttgaacgaaggagatggtgcattttatggtccaaagatagacatcacagtttctgatgcaatgaataggaaattccagtgtgctactttacaggttatactcccaaattctttttagtttttcttgtctatgcatttctcttgctgttatcagtgcaggagttgattttatgtttcttgtggcctcaaatcagcttgattttcaacttccgattcgcttcaacttggaatacgcagctgaggatgaagcgaaaaagagtagacctgtaatgatacatagagccgtgttgggatctgtggaacgtatgtttgccatattgttggagcattacaaaggaaaatggcccttctggattagtccgcgacaggccatagtttgtcctatatcagagaaatctcagcaatatgcagaaaaggttacttttgtggctgttgctgtactcttttactgagcacatgtggttcttatcgacttatttgcagtgtctaatctctggtttttcttttgacacaacaggttcaaaagcaaattaaagatgctgggttctatgttgatgctgacttaacagacagaaagatagataaaaaggtaaacgatttcggttcatgttccaagttttgttctgtggttggctggtgattcctaagattaacttgagtgatgatgattgtggtgtgtttgtaggtgcgagaagctcagcttgctcagtacaactacattctggtcgtgggtgaaacagaagctgctacaggacaggttagactgccgatccttatcttgagtctctcgagcttaatttaattttgattttaagaccatttgtatgttgcactttcacattttcaggtgagtgttcgtgtgagagacaatgcagcccactccgtgaagagcattgaggatttgctggaagaattcaaggccaagactgccgaatttgtatgagatccgactcatgaaattcaagttctgatatgatgttttttttttttttttcaaattagggtcgacccagatttaagtgttcatctgtttcattaaaccatattaggcctcaactatattaaagtttcgattacattctgcgaaaactctatgtttggtccccttttagtatcattttatggaagaaaaaaatctgggccatgattgttagaatgctgtccgaggaggccataattgagcaccctgagtattatattttgtgtggaacttaacttgttcacacgcatagccttgaatcctgactacgaagctctacgcgatggaatcaatttctttgtgaaaactaatatggcaatttagggggaaattcaggaaagccaaagaaggtcttagtaatgcagaagaattgctttgtgattctgttgccaaaagtttgcaacatttgtccttagagacagtggcaacatccttcagttattatatatagacaatgtgtgagcttcggcatcaatgagaaactgtttcaggtatcatcttatctgtagaaaaatcaatttctattttctttcaagagatcataggagaaaagatataagaaatttggatttataacctacaattttttttataaattaacaaactaacctataaaaaaaaccttcgaatacaacagatatataatatatattattacaattttacctttaccactatcaccactaaccaccaccacaaccaccgctgccggaactattaccactaaccaccaccacaactaccgctgctggaactatcaccaccatcggatccactgccaccgctatcagagcagccgcactgttttgggtgctaccgccattgtcagagtagccgcagtcgccatgccactaccatcactggatccgcccctgttgccggaccaccaccatcttcagcgctaccgttgttgccgttgttgggccgccgcagtcgtcataacccctaccgtcgtcaggactgccgcggtcgccggaagtacgaccacctcctttgatcattttacataccctttaatttacttaattaattgatatcttattatataaagtatggttttcaaagttagtaactcataagattgtgtcatatgtcaaatttatctatcagatgttgacatgtgtcagaaaacatttatttttattttcttaaaaaaatagaaaaactagaaaaggaaacaaatctaaatatactaatttctatgtcagttttgtttcgttaaccaaaaagaaaattaataaatttatttttacatgtgttattggtcaattaaatttagcatgtcttaataattttttaaaaatcatttattatggagaataatactaaattaaaaaaggtcactgaagtttaaaataataatataatttatttaacattaatttaatgagagaacattgtatttagcatgtattaatttgttttttaaagtcatttactatgggtaataatactcattaaaaaggccattgaagtttaaaataacaatataatttatttaacattaatttaattgaataaaattgcatttatcgttgtaatatagtgttttcattcattcgttacatcaaattaaaaattttgggcttataagacttaatttttgaatacttatgttatattctaagaatcttaacgcacacgttgaatacttatgttatattctaagaattttaacgcacacgtgtcacgtttattgttcagttgttgacatgtatcagatattttgtaattttttccaaaatgaaataggaaactaaaaaataaaacatatttacatattcaaatttatatgtcaacatctacaatatttaacttataattttcttaactagaaaggaaactaataataatataaagtgtataaaattaaattgtatttgtattgcaaaatcaaattgtatttgtattgcaaaatcaaattgtatttgaattttatacgatcaaattaaattttatttgtattattataaagtatatatttaaattatactacaaaatcaaatttgtaagattgaaatttggtttaagaaaatattaaattaaatattaaaagtatatcagttactatttaaactttaaatatcgtcaataagatggagtgtatagaattaaaaggcattttattatggggaaatatatagttaaaatgggtagtaaaattgaatgtgtatgattaaattttatttaatacataaattactaagttaaatattagaaaaagtgtgtggatctctatttactatatcaaattaaaatattatttataaatattttaataattttttaatattttatatccagctatttaggtcggccttatctggtatgtatatattgtaaaaactataaatttatcatgtacgatctttttgaaaaataatattggattttagagacaaacgaattatattttcaacagaaatcctgatttagttaaaaaaaagagaccaaaaacccctaatgtcgattgggaaaaaactgacctacatgatacatgataatcaacactacatattttttctttcgtcttttgaaaattggtttttaaaagaaagatgcaaattcaataataatttgtttgtggttttaatagtattagaaaaagcatattcttttaagttttgcgtacactgttggttcaagtccattagttacatttttttatattacattttttttttagttaactttgttactagatcttatgatacaaagctgaattttaaaaattcaatgacttttctaatgaatttaaatatatttcaatgattttttttaattatataaaaaattacattatttaaatatgcattaggccaccaaaattaaaaaatcggtcatgcaagaaagtctacatcaatgagtacgtcttgcgtctgatccccaactttccttctatatatggtaacaacaaaaatcgatggaatctttagacctaatatccaccaccggcaaatggcaagtggtcaaattagcctcaaatctcaacccgatgaaacctaccgtcaatgtgccacaaggtcattatgggttccaacatatattttgtcaacaagaaaggcatgggctgcaaagtgttggacttggacacaacaacacttaaaatggagagaaattatgatgcagctatgaaaaacaatgattatgccacctccctgtgttataaacaagcgtttatatatatttatatatattgttatattcttaattttggtatgaaaatgtgttattttttcaaatcacccaaaaaaacattccatcagaaaaataaagaaggctaatggaaaaaacacaaacaattggaacaaatccaaaggatgtcatcaataagccatatccaccatgtaaaatgtatacaatggaataactaaaacacaaatccaaaaaattaaactttaaataaaaaaaaactgattagaatctaggttaaaatttagtttttgatcaaggtatgaagaatgtatctcttcttcacaactttatcatcttcgtatagatcacatttaaactttcaaagtaaaaacataaagaaatttacaagatttggataacttcgaagccaacttttaatgagttcagaacctaaaaattgtgggaaggacaacaaccaaattgttagcctttggacattaatcgatggagcatcgattagcctctggacattaatcgatggagcattctgacacaagacaggactatagcctagttctgctttttctagtgagaaaagaaaagaaaaaaacattaaaatctgtgacatctcacgtgctctctctctctcttctatctctaattgtagtttgtatccaaatccacgcgcctttttccactctctgtctccacttttctttctagattaatcaaattctttgaaaccagtttctcacttcgcctctctcttcagatccgtcctctgtagctctgtatgtctcttctaatctctcctctcttacggtttctcgagattcttgtgttctgtttactcaattaccttggaaattaagctaaattttttgttagggtttgttttagaaatcgggtaaggcacatttgtgtttgatcttgttcctctgtctccaaaagcattgattcatacccagtttcgttaggttttgatgtttgaaccttaacatttgaattttgaatttcaaaaagtatagatgaggtctggtttctaagttcccccactcagaaagtaatgatttttttggtacttttcctttgtttgtcttggtttagtaactttttgtcttttagggtttacaaaagattgaagctttatgttctcttcttttgattttccaacacttatctcttgttctgtgaagggttgcagagaacaatggggtttatctctaggaatgtgtttccggcatgcgagagtatgtgcatttgctgtcctgctctcaggtcgagatctcgtcagcctgtcaagcgttacaagaaattgctcggcgagatcttccctaaatcccctgtaagtgtctccttttagctcattccttaaagtttccacttttagcttgtaatttgttattatctttgcttctgagtaactatttcactgtaacaacttaaaatgccaacgtgagattgatttgtgaagttgaaaacatgcttcggtatatattaaacttattttcatgaattttctgtaggatggtggaccaaatgagagaaagattgtcaaattgtgtgagtatgctgcaaagaacccaatccgtatccctaaggtatagttttggtttttgaatcttactagtaggtgaggagtagtcttgtgtgtgtaagttcagcatattgtgttgtatggctgttacagattgctaagtttcttgaagagaggtgttacaaggaccttcgatctgaacagatgaagttcatcaatattgtcactgaagcttacaacaaaatgctttgccactgcaaggatcagatgtaagatttataatatcataaattagcaatgcaaaatcatagcaacattattgcagtattaatttgatgattcttaacttctcactaacatttacatgttctcttatttaagggcttatttcgctacaagtttgctgaatgtggttacggaactacttgacaattcaaagcaggacacaccgaccattcttggatgccaaacactgacgaggttcatttacagccaggtaaaatgcatacctaagttggaggctttgactgatttaacaattaataaagtgcatggcttctacacatatgctagtccatgttgaaaatgtgaaatctctcactcttcatctgttatggacaggttgatggaacttatacacacagcattgaaaaatttgcgctcaaagtttgctcattggctcgtgaagaaggtgaggaacatcaaaaacagtgtctgagagcatctggcctgcaatgcctgtcagcgatggtactagaactagttcttttaatcttccaaattcagtcaatcttactcccaaaagtttctgtccggttttaattagtgtttcttgtgtttgcttcttcatcaggtgtggtatatgggagagttttcacatatcttcgctactgttgatgagattgtacatgccattcttgataattacgaggcagacatgattgttcagacaaatgaagacagagaagagcaaaattgtaactgggtaaatgaagtgattagatgtgaaggccgaggaacaacaatttgtaatagccctagctacatgattgtccgaccgagaactgcaagaaaagatccgactctattgactaagtaactgacctaatcctctaattgttgctgtgatttcttttctttttttctattgtcagccccctcattctcagttttcttaattgtttattgttttagagaagagactgagatgcccaaagtttgggcacagatttgtctccagagaatggttgacctggctaaagaaagcacaactctgcggcaaatcttggatcctatgttcagctattttaattctagacgccaatggactcccccaaatggcctggccatgatagttctgtctgatgcagtatacttgatggaaacctctggtatgtcttgtcttttttgttagagtattgctttttgtctgtacgtttactcatagttatgtttctttatatattagggagtcagcagttggtgttgtcgactgttgtacgccatctggacaataagcatgttgccaatgaccctgagctcaaggcttatatcatacaagttgctggttgtctagcaaagctgatcaggaccagctcgtatcttagggacataagttttgttaatgacttgtgtcgccacctgaggaaaagctttcaggcgacagctagatcaattggagatgaggaactcaacttgaacgtgatgattcaaaactctattgaagattgtctgcgggagatagccaaaggaattgttaatacacagcccctgttcgatatgatggctgtttcagtcgagggtcttccttcttcaggaattgtttcacgcgcagccgttggatcactgttgatacttgcacatgcaatgtcttcagcattatcgccatctatgcgttcacaacaggtgaactaaagtttgtttggtctcttctgagtgtttagcattatctataaagtttatttaattcttcttaattttcgtacaggtcttccctgacacacttcttgatgcacttctaaaagcaatgctgcatccaaatgtggaaacccgtgtaggagcgcatgaaatattctctgtaattctcttgcaaagttctggtcaatctcaggctggacttgcatcagtgagagcttctggctatcttaatgaatcaagaaactggaggagtgatacaacctctgcgttcacatctgtcactgctcgtttagacaagctcaggaaggagaaggatggcgtcaagattgagaagaatggttacaataatactcacgaggatcttaagaactacaaatcgtccccaaagtttcacaagttgaattccataattgataggactgctgggtttatcaatctagctgatatggtaacatttttccttgcttacaattggatgttgtgtgctaaaggaccatcatatgtttatgcaattgtctgatactgtttggtgatgcagttaccatcgatgatgaagtttacggaagatcaaatcgggcaactgttatctgcattttggatacaatcagcacttcctgatatcttaccttcaaacattgaagctattgctcattcttttagcttggtgcttctgtccttgcgactaaaggtcaacataaaagtttctcctcttttctggctctcttaatatttctctttcatagaggaagttttcactttcatgacgctatacttaaagcttctcatgattattttaattacagaatcctgatgacgggcttgttgttcgagccttccagcttctcttctcattgaggactctttcgttggaccttaataacggtactgattgatgaaactctcttaaactgatcaaagtttaagaaatcgcttatgtgcagtcaaactttctctttttcaggcacattaccctcagtttgcaagcggttgatccttgctttatccacaagtatgctgatgttcgctgccaaaatatatcagattcctcatatttgtgaaatgttgaaggcccaacttcctggtgatgtgagttcccaatgtgttgtttcagttattacttttattttatccatggagattgtgtatcacttgattatatactcaaaattttcaggtggatccttatcttttcattggagatgacttacaacttcacgtaagaccacaggcaaatatgaaagattttgggtcctcaagcgatagccagatggctacttcaatgctgtttgagatgcgaagcaaagtagaactgtccaacactattataaccgatattgtcgcaaaaaatctacctaaactttcgaaggtaaatcttatattttctgtttcttagtgaacaataccttttaagccccaatgttcgattctcttgtactgatttgattttatgtactctcttgttaagctcgaggaagctgatgtgaagatgcaaatcttggagcaatttacacctgatgatgcttttatgtttggatcaaggccaaacattgaacctcaaccaaaccaaagtatctctaaggaatcgctgtccttcgatgaggtaaactattctctgaagttccatattccattgggattttgataatattcagaactgttaacacttatgtttctttattacaggacatacctgccggttcaatggttgaggacgaagtgacgagtgaactctctgtgcgtttccccccaagaggatctccctcaccatctattcctcaagttatcagcattggacagctcatggaatctgtaagcatagaccacattcgacataaagaagaaactggctgatatatatatttgtgtcttcttataattggtttgtgatatgttatctaggcgcttgaggtcgctggtcaagtggttgggtcatctgtctctacttctccgcttccttatgacacaatgactaaccgctgtgaaacctttgggactggtactagagagaagctctcaaggtggttggccactgagaaccgtcagatgaatgggctctatggaaattcacttgaggaatcatctgcacttgagaaggtacgtaacagctgagttggtaaacacattagaactacaaactgttaaaatctgctatggtccttagtaatagtgagaaagatcataactttgtgataccaaatgggctggttaagagaaaggtagaaactttatcatacgaggcttacacgttgagacacgttgttacaggtagtagaagatgggaacatctatgggagagaatctggaatgttgcaggattcatggtccatgatgagactacctccagctagtccctttgacaatttcctcaaagcagcaggagctggaagatgattcaactaacttgatcatatcaatctctgtagaaagtgtgtaatcttgttgttcttattggatttgtagagaactaacttatctagggccaatcacgatgcttctcgtagtaatctagaatcagtagtaagtaatgcttgtttcgttaggacaagaatctctgttagtgttgtcgttataatcagtagagaaccaatgctatctagatttgtatcaaattctcttcattacctttaaacgcatcatcaaaacaaaatcgaagataaagttcacaactttaaaggccacatcttttactaatggcggtgaagcaaacggctttagttggccggaccggtttggttttctgataaccggaaaattcaatgaaccgactccaaaacgacgtcgtgttattgtgaaggcaaaatggtgttgttctctctgctgcctttaaaattggggttttgcttcgtcggggtttatgaagggctttgatactaatcttcgtctacaggcttcttctccagaattctccaatggtttcttgcctaaaaggcaaaactttataaaactcaatcgcagaaattgttaccccagatcttctttctctcccaccatgttaaagctcttcacttcctccgcctctcgagtccaccatttgactccggtaagtagggtcgtcgggtcttctccagtggagtctccattgttcaaagcgttgagtcaaatcactgggtggaatcggcgatctacttcgttgggtcatcgtgctttcttctgctctgagcctaccaatggagaggcggcggctgaagctgaaactaaggcggtggagtccgattctgaagtgtctgactccaaatcttcgtctgcgattgtgcccactaaccctaggcctgaagattgtttaacggtttgtgtaactatggctttttgttcctttctctgtggaagatttgttagtgcatttgtatatgcgttattggatcgttggcaatctaattgtataggaaaatttcaattcttgttggaattattacaaagttgtaaactttggtaataactgagtggatgatgcttatgaggtgctttacatctttgttgttctattagtggagaaagttgaagcttctgatattgtatgttgttctatggtgtttgcttagagcatttttgaatctgtatttagtggtttgttgttaacagtcaagcaaagactaattggattttgtgaacattttacatttgatcattttcattttagcggagttatgtttctcctgatggagttttccgttgtttaattgcaggttctagcattgccggtgccacataggccgctttttcctggtttttacatgccaatctatgtcaaggtatgtcaattcatcattttctggcctttaaacactctccaaaacttggccttgtttggttctcaaaatctcattcgattctctttaaatggagctgaatctagccttagaactagtaccgatatcttcttattttgttctcagtagagcatggatcattgattacctagtttacaatcaaaagtgaagagaacttacatatcagctgacaccttctttgaaatatctgctgtttgggtttcgacatatagatcaattttagccgcatttgatgcaatttttttgataatttaccccattgtttattaattgtaatcttccccgcctgggacaaaatagctaaaaactatttccgttaaaccacagcgatgacacgatctttatagtttgggagatgtcaggttttgcttctctgaccagcatgtgcgttttctggtgtgcaggatcctaaagtactcgcagccttacaagagagcagaagacgacaagctccatatgcaggagctttccttctgaaggatgacccatcagctgattcatcttcaagcactgacgcagaaaaaaacataaatgagctgaaagggaaagagttgcttaaccggcttcacgaagttggcacacttgctcaggtattgtgttgctgcatttgttcaaattaaaaagcatgactagcattacgatttccttattgattttccagatttcaagtatccaaggagaccaagttatccttgttggtcacaggcgacttcgcataaaagagatggtaagtcggtataacagcgttcgtactttgtagaattttcaaccatgaaagttccaaatcctcgaaagtacatcttcacatctgttctttggttgatcaagacacttttggtttaagggagaaatttttcctttatacaggtgagcgaagaaccacttaccgtcaaagtcgatcatcttaaggtacatttttctgcttttaggcttttcctcttataatatgagactactttgattttgctttttctatttgaaactctgaagtcaggaaccttttcttactctctgtgcaggataatccgtttgacatggacgatgatgtcgtcaaggcaacatcttttgaagttatttcaactcttagggatgtactgaagacaagttcactatggagagatcacgttcagacatatacccaggcatgttcttgtcataatttcacctgttctggtaaaaaggtctcagggtacaagtgtcttagtagatgtctttcaacttgtgtagcatataggtgatttcacttatccacgactagctgattttggagcggcgatatgtggcgcaaataggcatcaagctcaagaagttcttgaagaactggatgtaaggagcttcattattgttgtaattgtatgattcttggtcaatctctcatctctgtttttattgacccaggttcacaaacgtctgcggttgacgctggaattgatgaaaaaagaaatggaaattagcaagatacaggtacttcattcccttattcttgtgtctttcccactaagggactacttatccggtaactgtttgaatgggataagattcttatcttctgagccttttataggaaaccatagcaaaagcaattgaagaaaaaattagcggtgagcaacgtcgttacttgctaaatgagcagctcaaggctataaagaaggtattactcagcccgcttcacaaaatatgcttgctattttcatccacataccatgtctgtgtaatatatatacatatttggtttgattcatttaagtcatccaatgcaggagcttggtgtggagacagatgacaaatctgcactttctggtcagtacgaacttaaagtcttaaactatcttcaattacatgtagtcagtttatatcctagttagaaatttagaatttcactgcctcatggatcacaatgcattcatgagacgtcagtgtctttggtatgagtttggagagccgtgcactgttaattgtatgacaaccacaacttatagtctgttctttactgcagcaaagtttaaggaaaggattgagcctaacaaggaaaaaattccagcgcatgtattacaagtcatagaagaagagcttacaaagctgcagctgttagaggcgagttcaagcgagtttaacgtgacgcgtaactaccttgattggttgaccatattgccttggggaaattacaggttttttacttttcatatatctttttttttttttctgtttaagtaaagcagtaagtcttttggtatgagagactgatatagagacggatgagctctcatctcatggcaccatttgtttttgtgttcactgatttgaggaatctattttgttaaatttgcagtaatgaaaactttgatgttgcacgggcgcaaacaattcttgacgaggatcactatggcttatctgacgtaaaggaaagaatactggaatttattgcagtgggaagacttagaggcacttcacaaggtttgatacttatccagtaattgtgatttgatcttgttgaaaaaaacttgtccccttaaatttgagtaaatgtgtccccagggaaaatcatctgcctctccggccctcctggagtaggcaaaactagtattgggcggtctattgcacgtgctcttaatcgcaaatttttccggttctctgttggagggttagcagatgtcgctgagatcaaggtataatacctttgttttggtatacttgcaaatattagtcaaacatttgtgactgaattctttcctagaaacaaaaaaccattcttgtaattacatgtttaggggcatcgtcggacatatgttggcgccatgccaggaaagatggtgcaatgtctaaagagtgtggggacagcaaatcctcttgttctaatcgatgagattgataaggtaatatattttttgttttgatatttgtcatcatatggtagcttcttttattcatcagtacaatactgtttcaatctctagttaccaaagacaaatttctctgcaataaattgctatattgttcctttgcagctggggagaggccatgctggtgacccggccagtgctttgttggagcttctggatccagagcaaaacgcaaattttctggaccactatctcgacgttactatagatctatcaaaggtaattaaatgtggtcaaggaccaaattttgtatttcttttcttcatgatgttctgtccaccaatagatggatatgaataccattttgtttcatgtgatactaggccgattgaatttaattgctgatccatttccctacaggttttatttgtgtgcacagcaaatgtgatagacatgattccaaatcctttgctagacagaatggaggtgatttctattgctgggtatatcactgatgaaaaagttcatatcgcaagagactatttggaaaaaactgcacgtggagattgtggtgtcaagcctgaacaggtctcactttcatcctattctccaattgtctcttcttttaactctcggtaaattaaaatgagtgagtgattatcaatgaatcacatacttctaagatttcgtcaatttgttcgtactatgcaggttgaggtgagtgatgcagcgcttctttccttgatagaaaattactgcagagaagcaggtgttaggaatctccagaaacagatcgagaagatttaccgtaaggtaagttttgctacaagactccgaattgattcctcaagccctcaatgtcgaacaccatttacttttctgttgtagattgcacttaaattagtgcgtgaaggagcagtccccgaagagcctgcagttgcaagtgatcctgaagaagctgaaatcgtggctgatgttggcgaatccatagagaatcatactgtcgaagaaaacactgtgtcctctgctgaagaaccaaaggaagaggcccaaaccgagaagatagctattgaaacggttatgattgatgagtcaaaccttgcggattatgtaggaaaaccggtattccatgcagagaagctctatgagcagacaccggtaggtgttgtgatgggtctagcttggacatcaatgggtggttcaacattgtacatagagacgactgttgtggaggaaggggaaggtaaaggtggcctgaatataacgggtcagctcggtgatgtgatgaaagaaagtgcacaaattgctcacacagtcgccagaaagatcatgctagagaaagaaccagagaatcagttctttgcaaactccaagcttcatctccatgttcctgcaggagccactcccaaggatggtccaagtgcaggctgcaccatgatcacatctttactatcacttgccacgaagaaacccgttaggaaggaccttgcaatgactggagaagtcacactaaccggaagaattcttcctattggtggggtaagtaactccggacttctctcactctattctattagagcctctctttttttttccttttttgacaatgtacacaaaaatgttacaggtgaaagagaaaactatagcggcgaggcggagtcagattaaaacaataatatttccagaggcaaaccggagagactttgatgagctggcagagaatgtgaaagaagggcttaatgttcacttcgtggatgactatggaaagatcttcgagcttgcctttggctatgacaaacaagaagactgagaacacacataagccacgttgaccttttgtcatctgttgttgtctccatttaaacaacactaccattcttgattctctttgatctttttcttccttcaagaagaaagttattctgtaactttttttttatgattagggtaatttattggtggttggattttattattttggtatataaccaaagccaaatatcataataagacatcagaacaaagtaaaaaaaacaaagttgtttctcattttgtgcttgtaatttcatcaacatattcgcgtattactttcactgttgctatgtgttcgatcacacttcataacagactagtaacttgttggcataattttctgttttatattcctttctactggattagatgatgggtaatttgactattaaactatgtaatgaaatgtatatatattcttagttcgtactcagacaaaaataggattgagaagatagcattcatacttaggaaaaacatacaattcaacacaaactcttcatcagacaattaacctcatataatctgatatctgaagtagaaacagaggcacggacttgatagaagctacagttgtcatggttatagagaaagactgaaaatttgctctgatgttgactcaatggtgacgtcgataggtcttgctctgtgtttgacacaccgatattcaccaatggttctgtccattgttgatgacggggatctgacctaactcggtctggtttttctcgggttgtagtaacagaagcttatcttgtagtacccgtagaccactttctaatgaatccttcatctctaagactttctccgagagcttactgttgtcgaggatcttcttacgtagaaacagagaaaggttggttcttttcttgcgtcgctctctctcgtgtagtttgctaaacctctctgccatgtctcgaaccttggattgatcctccggccatgtcttgatgagttctccgtcacgactataaagtatgacacagacttcgatatcgcacagagttgaaagctcgagggctttcttaaacattgtatcttctctcatagacaagtttggtttcttctcacagaaaatttggttttcttcttgacatcgaagaatctattgtgatgttttgtttacacagagataggaaaaaaattaagcttttagcttgttctcaaagagaaaataaactctgaaggagagaattgggatacagatacaatagggtttagggtagtgactccttcaagatgaatatgaatgcttaccaaccaccaatggctatgcctctacgtctccgtcttcctttttgcaaccatccaatgtatcaagcaaagatatcctctgtcaacaatggttcttcaccattcacacagccttgaggtgcacactcgatttgctcatagttaagttgtctggacgcttcatacagagcaatccctacactcaccgaaagattcagacatctcacatacgtttctaccatgggaatacgtagggtcccccctccatatggttcgtgattgcagtctgacagcgcttcaggaggtagaccgcttgtctctgacccgaacaagaggtaatcgcctgatcggtaagaaaaatcctgcatcaagttgtaaccattgttttcagctacccaattgctagtgattgttgctatttctggttggtaaacaataaactagaggtggaaggacaagcaagcaacttactgaatgtatccttgttcctctttttgtaaaagctatcattcgtttttctccctcctaaaccaaagagaaatatcagacaccacacacacatagggactttagctactcaaggacaagtggtaaacctgaagcctgaaatattcttgaaactcagcccatgagctatgcgctttgacaaccacaaagctatgctttaagttaagaagaagaagagctaatgacagcgactaaaccttaacacaaaaacagtggggtaaactctcatttctcaattcctatgtagtagacaaattaggtaggatacggccaataatccaaaccagctcgcttaactctggcgtcatccacttgaaaacctaatggctgaagcaggaacaaatgacagattaagtcatcaacactggaaataatgaacaagtcgtgtttggttactttaccccgactaaatgcagaccaacagctgaggcagcacatgttcttgcaatgcaacctgtattcccaggaatctgtcaaggagagtataagttgtttagatccatcaacatgtactaagaagaccaaaggtagcagtgagagtgcaaacctgaggagagaccaaaactacatgaagcagcttactcctcgcatcttccttgactccttctccggcccctcgcggcaggggatttttcttatctgactcgcctataccaactcctcggagagcatgagactgaatcttggaggaaaacgagttgatggagagagatagcttgcccttgagatgagttaagctaagagagggaaatagacggccacttgaccgcagatgaaacgtccttgaagctatgacgctccgacagcaactctccattccctcgcctcccttctccgccgcccgcagattccacgacgtcaaataagatattaatcaattgggccggatacttttaggcccattcaatactatatctaatcgctaaagatgaattgggttaagggtactacttcaacttaagtagtgaaagttgacatgttaaattcgatttccatattttacattttgaagaaaacatacaatcgggttatatagaattttttaaattcgatcgatttccatatttcatactgatttccatatcttttcttcatttaatgatgaaatctaaaattagatcctatttctaaccgtcgtaaggtaattattaattaattaattaaggtaagcaaaaacccttaattattgtcttcacattgaagaacccattgtgttgtttacacacaaaaaaataataaaaaaatatagctcatcaaagagaaaataaactctgataattatgtaacacggttctgatattaatctaaccgttggggtttttcaataattgtagtaaaaactcctaatttttttttgagtcacggagaaattaaatttaaaagagttctacaattttttttgtctatataacctttttttgctaaatttcaatttgaaccaaaatacccctactttatattttaagcatttttgaaaaagtttgaccttaataacatgtagatctacaagaatatagttgatttgtaaaaaaaaaaattgttatttagttaaacaaaaattgattttttgatagataaaattttgtctaaattttttagaaaacgatttctagtaatctattaagtttagaatttctattctaatattttgtacatattttacaatatttagactatttttctttctaacaatcttagaaaataggatattcaatatctaaaaattgtagaacatgtattctaaaattccttcatgttctaaactatgtgtgaaattgtattctaagaatttctatagtttctgaaaacactagaacacgttttcttagaaattttcacttttagaatttatattttaacccaaattagttttttgtttctaaactatttagaatagatataaaaagtgaatctttgaaaaaagaaaataaatatttattagatttgaattattaaatctacatgcaactaaaattaacagctcaacatgcaaattgcaattgacacttcatgagacacaaaattgagagaaaagactaagaaccaaccaagtgattctaagaacttaacaaatcgaaacagttcttagagatgagacctgtgagggaagagagcggcggcgacaccgttctgaaggcggactttggcggttttggtggcggagaaggaagggaggttgagatgagtggtcacgacggtgatgaagaagattcaggtgactttggacacgacgacgccgaccacagagaaggcaaagaaatcgccggcgacgacgacaacagagatggcaaagaaatcgcctgcgacatgtggagagtaagttcgcccgaaaaaaaattatagagctgaatgcttttttttttaatcgagtaaaggaggaagagagacaaaagatagggtttgtgaaagagtctaatacatttagaggatttaggttctcaaaattttactttaaactagtatttcttttgtataaatagattaggaaattttaattataaaataaaatgagggtaaataagacttatttttttttgaaaaacctatttgattaatttataagaaaaagaaatagatggacaatttatttttagatatcctctagatttaatttccctcataaaaatgctttgtatgtttgatatcatagagaaaatctaaattagatccgattttacaaatatcaatctaaccgttgtagtaaatgtaattactgataattaatttaaggacagcaacaaaaaagaaagggaatgtgacattattaggcattttgtgagaatctttttacgtttgaggcacttatgagggagaagacactttgccatctttttgagaggagattggactaatttgcccctgaagtggtgaaaacacaataatttttaaacttatttttaataagatcgtgtgggtgagaaactttttttttatatcatctatcccttccatattcttttgttttcatcattttcaatccctctttcaaatcatagtcgttctcaataatttttacaaaattatgaaaattctgaggttatctcaaaattcacaatcacaatctatgtttaccctaaatttcctttattttttcagttttgtatttttttttctccattctccgtcatcaaatccatttcattatctgcagcctccatcaatgaacgactgtgaccaacaaaaaaaagtaacatcatcgatttctccttttcgagatgaagaagaaggagatccttactctctgctacaaagctccctcttcccttaatctccctctttttctggttccatgttcttctctcttgtcttacttatggtttctggtttcgttgtttttttttgggtaaaaggtttctttggttttgaatcataaaggccaatgttacatgttattcgttgattctagattaggctttagattgtaaatcttaaaactttttttttatgttatgtgttcttaattttatgattttatccttcaatttaaatttatatttgttagatctgttgaatttgttgcctttgtttttgaattgaaaaatgtttggatgtcatttgcgtagacggaaagtgattggacgcataaggctgggtatgtggtggttatgcaagaagattggttgatgtttatgagctttttttgaaactttggtccatgaggctgcgctggccgccgtgagttccagtgtcttgtctggcaactccatacttatgtcgactcatggatgtcaagaaaagtttatgagaaaacacgaaaatgtatatccatttgttcggcgctaggtggatacaccttcatttcttacactatatccatttggtctatgtttcatggatacaactctacttctaaaaatcatatatgaacacgtacttgccgattgtcagctaaaggaatccgtccattactcttcgaagatatgttatccaactaatgaagtgttcttttatttgattttggtgaacaatgtttagatttggtgttattcatctttcgtgtatttgtttgtgcagataaaacatttcaacgtaagagctgtaaaatataggatcattcctatggtgatattcatatgattatattcaaaaatggttcatacgagtgtgtaaaccctctacgctttacattaaatcctaatttacttaccctaaaattaaactcaaaccctcccatgatccttctccactaaatctaaaaccataaaacaaaactctaaaccatacaaaaaatgataattttaccaatcaataaaatacatttgcagcaaatcaaagacatagttgtccattgatgactatccaagcggtttagtccatgtggtaatctagtgactcatgaggtcgtttcatttcaatacacaagtttatacatgaatgataatcaccaattcaaacaccaattcaaagtacatcgtccattttatctctctttctctcaagctaaaatctgaaaccaccgatatagaataaatgagaaatcgtttactcttaggaaataaaaatcaattgaaaattgagaaaagtgctatataagagaacgtaacattaattagagaagcccaagatttgtactctcgccgctgtgattatcagagaagtgggagaacaacgactgatgatttgccaccaaaaacaagagaaacgagatcgcggcttctactgctacacgagatccttcactcggtcgctcgttcacttattctttcttttttgtgacatcggcttctttgttctccatattttatggtctctgaaattctaagatctaacaagcgaataactgaaagaaaaaaaccctgcaaactttaaggttttgaagcaattgaatgaactttaggtagaacgcatgaaactacaattacatgaataaacacatagacaacaaaattatcagggtatagatccttaaatcaagtcgtaattctagcaaacacatcaaccatcatcttccgctggattttgtgtttctcgagaaaaaaaaaatagaaaaaggagagagacaaaaagattgtaacctatgtaattaaagggtaaataagtcaaattgcccatacaaaatacctattccttgaaaagtgtataatcgcgtaaatactttttaaaaagtgtcctctacactgtaatatagaaaccctaaattgctcccactattttctatttcattcgctttcctctcagcgacaaaacaaaactcttcgctctctgtcttctctctgtctctgctcgaatatatttgattagtcggtcgtctttttctctaacttgtttaccaacgcttacttctcttccccgcaggctttatttgattagtcccctttctctaatttcgtttaatctttgatcatctgtttccttctgtttcgttgtgttttgttgtaatggattcgggtatgagagctacgtgtacagttccagaacactttcttccgaggaaactttccaagcaaaacttggacagattcatcccaaacagatccgccaaggatttcgattttgctaactacgctcttacccaaggaagcaaacgtaacctcgatgaggtaacttcagcatcaagaaaagcctacatgacgcaattggctgtggttatgaatcagaatcgcacccgtattctcgctttcagaaacaaacctaaatctctgctttctaccaatcactctgactctcctcaccaaaaccctaaacccgtaaagcctcgtagatacattcctcagaatagtgagagagtcttggatgcacctggacttagggatgacttctcccttaacttgttggactggggcagtgctaacgtcttagccatagctttgggagacactgtttacttgtgggatgcttccagtggctctacgtctgagcttgtgactattgatgaagacaagggacctgtcacaagtattaactggacacaagatggtcttgatctggcagttggtcttgacaacagtgaagtccagctttgggattgtgtttccaatcgtcaagtgagaacattgagaggtggtcacgagtcaagagtaggatcactggcatgggacaatcacattctaacaactggaggaatggatggaaagatcgtcaacaatgatgtgaggatcagatcatctattgttgaaacttacttgggtcacactgaagaggtttgtggtcttaagtggtcagaatctggaaataaacaagcaagtggtggtaacgacaatgtagtacacatatgggatcgttctctcgcttcctcaaaacaaactaggcaatggctgcataggtttgaggaacatacagctgcagtgagagctcttgcgtggtgccctttccaagcaagtttgcttgcaactggtggtggtgtaggagatgggaagattaagttctggaatacacacactggggcttgcttgaattcagtagaaactggctctcaagtttgttcattattatggagccaaagtgaaagagagttgcttagctcacatgggtttacacagaaccagcttacactttggaagtacccatctatgtcgaaaatggctgaactcaatggtcatacatcaagagttctgtttatggcacagagtccgaatggttgtaccgtggcttctgcagcaggtgacgagaatcttaggctttggaatgtttttggagaaccaccaaagaccaccaaaaaagctgcttcaaaaaaatatccggagctattttctcatgtgaatagtcttaggtgaaacagagaagactaacaaaaagaaaaccttgtgtgaattggtggtgttgaggcggagctgtgtgtttaccgaagatggtgtcttgtttctctttagcttttgactgcatgttttattttctgttgcaggttttagttttcgaaatttgcaggtttttgtttttgaatttgcaagtttgggttttctaagctctgcagttttagtgaattttcaggtttttggtttaagaaatttgcatgttttggaagttttggttatctaagtagcatgttttggtttgagaaatttcaaggtttgtttttctaagctgcagttttgagtttctaagtggcaagttttggtttttgaacatcgttaggttgttgtttgtatacttgtatagttgtatccacgtttcaggtttgagtctgcattcagttttaggtttgaacctgagtttcaggtttctcttcttagcctgagtttagtttcagtttcaagatttgagtttaacttggttaaatttatgttttagtttggtttcaggattgagttcatgtaatcaatgctattgtttcaatttaagtaaattgttcccgtttgatttctcatgtatcttgtgtttttagtgagattgtacaacttactgaagcttcgattacagattcacaattcacaacttgtaaaaaggtaatagagacaacacattgtaccaaattagcttgtaacttgtgtaatacatgaatcaaaagctttcaatcaaacttgtttttatgtaaaagtctgtgattttgatgcttattgaagctttatttgttgttgagaaagaacaactcttttcgattcaaaaagattcgaaattttccccatcaaaggctctgttttggattttcttgcagaaccaaagtcttacatatgcttgaggaccactagttacatcagaacgaatgaaagaaaatgatcatattatttgcattttcaatagaagtagaaacataaaataaggaattctcgtgaattacattgtgagaaaattctcctcgatgttggctactttcactttatctcaattctcatgtcagagaaactattagaagaagcatctagaatgccgagagaagatgaggctcaactaaagcagaaactaccccttccctttgcctcaatgttcttctttgagtacctgagacaagatcattaactaaatcatctaccaacgtagagactatctctccctcaatgtcaatgccttcttcatacgtctctctctcgaaatcaagccatctcccttcgaaactgctcatctctttgtcaacaagctcgtccatcatcatctctctcatcttcttcaacccatgaatctctctgttcagttcttctgctaaccaatctctttgctcaaacaaaaacccgcctttccccaatagccctctgcagctacccataaacatctgctcgcatctgagcgctaagcacttattcacaaaatcaaacagtgtctttctcttgattttggctgctgttacttctcctcggccttccatttcatcaaagaggctcgcaggtaatacgtcagtggccatccccaaagcatattctttcaccatcagttggtcagacccgaggatctcggatatgtactcgaactcccagtcgagcctttcttcggcttctgagtaactcagtgttaccacagattctgagagctcggactcgtcttgtgcttggtgcgactcatttaatgaaacccaggtgagttcttgatctgatgaggactgtattgtccctgtaaagcccaaagcgttagacaggataaaagtagttgcaaatcaagcttctgtttaagccattagatctacgccttgtacaaatagagtgcaaacagcgttttggcacattacatgtatcttaaggattcaagtttttgcaggatgaatgttgagtttcagtggagtattcataaattaaaaccgtgggagaatgaaaaatataaaactttgtgaagtattaagaaaacgaaccatattctgcggtctgtctgcaatctgagaaacccttgctgcaagagcttcttagatcatctgcttccgtcacagtgctaatgctgctaacttcgtgctcttctgcttgtatctttattttcagaagaaataacgcaaaacataattagttagaaaccctttaataatgtaatatatttacatgtagaaactgtaccaaggttactaaaattacagaatgcaaaatatgacaaattagaaattgcatatagattggatacttcatctcttagctacattaggaaggaactaacctggaatttttgtttgtcatagaatgaggtgcagtcagaaacagattcactctctgataaaactttacgcagaccgttttgggttgacttttcatattctgatgaaaatgaaatcatcccgttcatctcatccattggaatggaatatgaaggctcttcttgggtcaggctacagctagaagactcaagcttagaagtcagctctctgagcttttgctccaacagagcatttaaggaatcgccgccaatattgaaactaactgcagagtctgtgtcttgaccaattccttgagtagaggataatgaatcagaagataaacctttgatgggagatgagaatgtgaatgaaatcacatccatttcctttttccgatcatctttacctttgttcaagccaccatcaatggtgatgttacatttgatcatattttcgctccttttggtccgtttatcatcagagattccagatttttgcatcccatttgggagctttttgctccggggaagagtctttttgcgtgacaaagataaagaagtattcttttccgccgaggccgttgataaacccaactgctttgatatcgatccactttccactggaaccttgtttacaactttgttatttactttgctgcttttttggttcaaaacagaggtcatcgaaggttggttgtctctgcagttctgtttctggttattctgcttaaacatattctttcccatgctaatgggagctcctctgagagcattctggcttttgactacgcactttttagcgtctgccttctccttttggtttgcagagtttctggtgacacttaagggcgttgtaccggcctttgcttgtgcggatacataagatggcttcactttacccttcaaaccatcagtactgcttttccccatgaacttactagttgacggtgtcgtgagtgatgttgtaattctcttctcgttgtgctttccacttgggtacttaaggttgaaggtatcattggagttttgacggctagacactttctgtgcagcttctaatttctctcttaaatcttgaatcctcataggaactgatgaaggagaattcgatggcgaaaaccgtgttctagcaaccatcctaggacttggttcaatcattcttgaagccgcttccataacataaatagggttcctggatgggacaaacccaggactccggataggagacaggtgtctattgttggtaacacatatcggtttagctgacctgggaggaaaagtctcagactgaaaccgttcaatcggttggttgcgcccattattcgttctagaatccaaatggtcccaagaaataccatcatagtcactacggagatttacataaccaagattctcatatgcatcccatctgttagtgttttgtgaaggtctgagtaagaacggatcaagatcgggattaagtcgaggttcctggacatttggtaccggtagagactctaaacccataagcctcgcaaccacactcggggctcttgtcccctgtccatcatcactggttactgaagatgcacaacagctcgagtcacttctctggttgttacttgaactctttccaatctcatcaacctcaatctgtacaaaagacaacaacaaacaaagttggttcctctcatccgctaaactaagacgaaagcaacttgacataaacaagggaatagtatgaagacaactcacaagagaaaccctcgacttcaagaggttttgtgcaggctgctttgattcttctggtacaaaaacaagaagaagatcgaacttgagcttactgattaaattccaaccaagatagtaaacagactttcttatatacacaacattatgaatcaaagatacaaaacgtattatataaacaaaatcttgagaacaagaacagcatagtcttctaaaccaataacgaaatccttcaaacaagtacattgtcttagacttctacatggcacagagttcacaagaactgaaccaaacatttcttaactatttgtgagcaatactgcaaacaaacctgagagttctgaggtgctgccggagaagagcttcttgcgggattttccatgccaatcaaataaatttaaaaaccctcctctggatcgtttcctctcaacaacctccatttttagttcatctacagataacacaatcactgaatcactgtcctggactgcaagatgcagcgaaaaataatcttgattccaaaacaaaccggaccaaaaattgcataaacctcaataaattaacccaacttctagctgaactaaatggagattaagacaggttaatttgaattcacattcagaagagaccaccaccacaggataatacagaagagagctgtgaaagaccaaaacttgaatcggtttaagaaattcaaagaaatcagatcacacatgaacccaaatttacctaaaggttacaaagacctcaactttaacttatgagctcattccaattttgggttaactccagagacccttgtgaagaaaccaatcaaattctcgaattcgacacgttaccaacaaaatgtagcaacgggaacaaaaacccagaaatgctgcggactgtttacgcacaaaatcgattaaagacctaaactttcgcgttcccagaagatctagccctagaagcgagcaacactaggggaagggggggtcttgtgttcctcaaacagacaacaattgagaattggaatcgatgaaaaggttaaaacaccaatgaattaagaagaaagagagattcttgagaaatgggtcagatcagagaaagaggttaaatcaaaagaggacgaagtaaggttagatgatactagatttgggatttgggatttgggatttaggtagagaagacagaccaatagtagcagcagagaacttgaaaaactaaaaaaaaaaaaaaacagatacttcacagtgtggattgatgtgacgagagaagagaacgaagagtgagaggagagagagaaacagagtgttttgaattttcccagtttctcactccaccacctctgccaaaattattaattaatgtattattccctttttattttattttgttgtctcgaattaattgtttgtaggtttcagtaaattataaatttcttctgcaaattaataatccaaatatagatatgagatttgaatggccacgatggacaaaaccgttatggattagatcataaatcccaatccgtagtactatatagatcaagtatggaccattttacgtaaagaaaatttagtttatgccaaattattgtttgttttgaaaattaaatgatatactctgctaatagtatagtctgtttcgtatatgatatctatttaaagtatagtgtttttatgaaataaagaatttattaaattgtacgtttccaactcaaattaattaataattagtaaaaataattatattatatatatatatatattatttaatttgtaatgtgaaaaataattttctaaaacgttttttgagatgatggtttttcaacctattgattttgatatgttcggatatggattgacgagttaatattaggtcagaccaatgtaaattgaattgaatatgtgcaaattggactttaatactatattagattgtggatttttaattcaaaaccaattcacaatcaataaagagatatatagtttgtgttaataagaggtatatattaagattttattcaactttcaatataagataatattcttaataaaatttgtgttaaattttaaaatgaaataaataataataataagtgaataatagtccgtccaaacagctatagatagagagatatgtagagcaaattgggagatggaaatacaaatacaaaggtataaacttttcagttatagaagaaggcaaaaaaactttatagtaaacagtgcaaaggtctaatatgccaaatcgtaatagttattttccatgtattttgggaaccacaaaatgggttttcgggctccactttctcatatatctcagttttcataagccttatagaaatcataactattgcacaaataattagtgttaccatttcgcaattctttttgtttctgtcgacggtcgaccaccgtttagtattttgtcgaccactttctaatattgtaaatgtatgtgtttgttaatgttattgccaaaaatagacacttgtttgtgcacagttcccagatatcttttgggtttactttcttttgttgattacacggtaactttattgtccacacaaaaaatgtaacatttcacatatatagaaggaatgttgatatattgtatttttggtgtctttggtctttttgatgtgtttgtcgtgctaacgtcagtcttttctaattttttttttttttatgtttcgagtcttttacaaattctaagtaatgttgatttgaaaggtttcatatctgttcgggttaagaataaatgagagaaaaagaaagggttaaaagaccggtcgatccaaacattagtctgatgggtctaaattttgtactttaaaattcatttttccctaaagacttaaaagatcggttgattcaagacttgaactgatcggtccaaatcccagatgtcgacgttgaatatcccggaagctcatggactaattgatacgagaagtgcatggatcgatcggtccaatcttcacatgtcgaaacaaataaagacacatatgttgggattgatcggtccaaccctcgacaactagatttatttcttattatttttttattttctattttctatattttggtagaacatccaatagatttaattatttttttatactttattttttatatttttttgagaaagtaaatttctatgtaaacaaacatttgagattagagattcatcttcttataatttttttgagaaatttttcaaaccttatctcggtatgccaaccgtctaaatatagggttgaccagtgttgatcggtattgatgaacaaaaacattcaaaatatttttatttctttttcatatattaataacaaaaataatgacattttgtaaagcattaaaatttgaaaatattaataacaatagtttggaaggttttaaaattttataataacaatagtttggaaggttttaattcaaaaaaactaaaaaatatttgtcaccatctattacataaatatttgagtgtaatattatatatattaatttttatatccatcgtatctaactaattgcgatcatgatgaacattttcatatgaaaaattatattatatataactctgtccacaatatacaaattcatgactgactgtattacatccaactcactagaatactcgacccgaatacccgaacgcccaagactactagtatttccggtaaatttgacatttacaatctacatacatttattccttcagaaaatcaaacctatacaaaatgtaaaaacgctaaaatctttatcatgtggaccaaaatatttccagaaattttgaaaattagttttgctattttttcgtcatttttttgggatgaattttcccctttttaaggcttaattttcctaatactttgatttatataatcacacgtatgtcgtgctatactaaggaagttcttgtgcaataagattcaaagttagtatctaaaagaaaatctcagttcagaaacttcctggatgcttggttcactaatattaaattgcttaaaaacaagaaaatctaaatatagatctacaatcacacatatcctgactcatacatgacacgtacatacattcgaagaaaaaacatttcttgaacgatatgacaattatcaaggtatctttcaaaaaagaaaattctctgcaacacgtccgcgattgaagagttcaatatttttacgtggagaaggaaaaatgcacaacaaaaagagaaagaacaaacatttaccatttaaacaaaacaaaaaaaaaaagttcaggagaacaaataagtaaacattcaaaatctgtttaaaaaaaaaacctccaagactcacttagacttaagttttgattagtagtatgagttaagttgagttacatgtctaattcataaatgttaccaaacatagagtaaatttgaagtagaattactttttgtaagtttgatttattcgagttatgtcttttgtaattcttaaactcaaaacttaattcataatctcatgtggtagtctggtagaggtagagttagtttttttagcatttgtaagttctgtttttgttttacaaaaactattataaaagtattacaagagtagcgtatagtgattggttaatgaaatggctcgatcaaacttagatatcaatcaacatttagtttgactattcggcctctctttagtttccttacgattttcctcgaatttggaaggaaatgttctctcaacataaaaccatcaattatttcttttaagttttaacgccaatttttaattgccatctagaaaaatatcttatacaccagaaaatgatcatgtccgcactactataggatacttctatctgattaattttattagacttatcataatgaatgttttgaataaatttgataatcatatgtattaattagaattatacactactaatctcgtgttttaaaacatgaaaaagaccaaaaagggattaaaaaaaaaattatttgtttgagtacacgaacaaaataggctaacgacaatccaacctcaaaaggacatgattcgatacattaccaaaagatagttgtcaacggtttttctgaaacaatcatattaaagtatgattagttcttttaaaaaccaaaaattatattataaaagataaaatatttttacaaaaacaaacaatagattttgaacctttaaattattgttctaattgaccggtgaacataactactcaacatatataatattatttcctctagtatagttattttttaaaaaatctattttattttaatttctagaaaatatttattatttttaatctattttattttaatttctataaattctgaaccttgaaaactacattgtttattggcaaaaaaaaaaaaatcgacgtgtacacttctcccacatgaaatatctacctgttaaaaattatatacaaatattaatactatatttgtcctttcagttttttttttcctcttagataaccgtttgtgtcgttttgtttggtagattatcaaagaagaagattgtccatcagcagaccgcgtcgatgtagaaaaacatgttactttagttttctgaatatctccttccaattttgaaaccattatgttgaatcttaatattttgatcatatcaattactgaaaaacgcgttaacggcatcacctaagcgtggcttttttgggggtcaatgtacttctagttgacgatctagccatgtcaacgcttatgtcaacggctgttttggctagtttatggaatttcaaataattctgtatttgaaatgttcataattcattcacctaattagaccaagataatgtcatataggtaaaaatctaattatagttttaattataactagatttggaagtttttatctttactgttattctatattttagatgttatgaacaaaaatttggtgaattatccaattaaattctcttattgtatataaaaatacatagtaatctgaaaaacatatattttcatttgaaaacactttaaaatatttaaaccctggtatgttttgcaaaaaaaaatataaaataagatactgatttaaaacaaatcaccaaatcttcattaccaaaacataaaaatgtattcatcagatttaaaataaagttgcaacacatgcagttaatataatctcatatgatctctccaatactagattccatcgttgatataaaccggtacttgttcttcagcaaagaaaaactgagaatactgctaatggtatacccaatatcacaacatgttaccaactagaaccagttttaatacaacgatccttactttaagttacataaacaaaaaattaatacactgaaattatttaatctctccactatatccgacttttccaatatgagaggaagctaattaaaatacatgtagaggtttagtttgatcgagtaatatattcttctatattattacaagctaattttagtttgtacgaaatgatccaaacagcaattaaataacgaactaatatatgacacaacacaacacaacacaagtgtctttatttttgattttaattagttaactaaataactaactctagcgtggttaatgaatagcacttataaactccgagcacgaatcttcctggaagtttcactgctgcttcgtcaatactcattgcctttatattttcctcattcactctcttcccattctcatctctctctctctacctttctctcacacaaagagttttttcttttaagacaaaaactctttcaaggttttaaatctttgaaaaaattctctaaacctaaaagtgatcaatgaagattcggaacagccctagttttcatgggggtagtggttacagtgtctttagagctcgtaacttaacattcaagaagtgagttcttgatcttataccgaacaaatccttcattatttttttccggtttattttcggataagttttctaattttctagtttcattttctcatttaaaccacagagttgtgaagaaagtgatgagagaccagtcaaataatcaattcatgattcagatggagaacatgataagaagaattgtgagtttcttttctttctaattttccaatcgtctttacttaacaacttactctgcttaatcttaattaatcacggattgtttttaattaacatgttcctaatattgagccaccaagtttgaccgactacttctcttcttgttttaaactttgtgggctcctcgatctacaatggtccctaagtctagtaactatatagtatataacaaaatagtcacaagtctagtaattatagtatatatcaaattatgaaagtataacgaaatcattaatatgtttcggtggacttgtgactaatacaatttgtaccgttttaacggttaccaatcatgaaaaaattatgaaaactttgatttgcccatgtcttatgattacttaccgctaaatatttgtgagctgtttatgttacgtaaccataccatatgtttaataatattcgttgttacatgcaaattagttaatgatattctcaactcttttggtttaggtccgagaggagatacagcgtagtcttcaaccttttctctcttcatcatgcgtctcaatggagcgatctcgctcagaaacgccatcgtctcgctcacgattgaagctgtgcttcataaactcgccgccatcatcgatattcacggggtccaagatcgaagctgaggatggttctccgcttgtgatcgagctcgtggacgccaccacaaacactctagttagtacgggaccgttctcgtcttctcgggtcgagctcgtgccgctgaacgctgatttcacggaagaaagctggaccgttgagggatttaatcggaatattctcacgcaacgtgaagggaaacgtccgttgctcactggagacctaacggtgatgcttaaaaacggtgttggagttataaccggagatatagctttctcggataactcgagctggactaggagtcggaagttccggttaggtgctaagttgaccggagatggagccgtggaggcgagaagtgaagcttttggatgtagagaccaacgaggagaatgtaagtagcggttactgcgtttggttagccgttgcaatcgcggttaaaacgtttagaatgaattatatattaatccgtttgtttatttccatttgcttatgcagcttataaaaaacatcatcctccgtgccccagtgatgaggtttggagactagagaaaatcgcgaaagatggagtttcggcaacgcgtttggctgaacgcaagattttaaccgtcaaggattttcgccgtttgtatactgtaaatcgaaatgagttacacaacgtaagattatcattgatagctaaatagctaaaatgaatcttgatgtctataatcttcttaaccattgacaaaattgtttcgttttttatttaacagataattggtgcaggggtctcaaagaaaacatggaacacaattgtatcacatgccatggattgcgttttggacgaaacagagtgttacatttacaatgcaaacactccgggcgtaacacttctcttcaactctgtttatgagttgataagagtgtcattcaatggcaacgatatccaaaaccttgatcagccaattctagaccaattaaaggccgaagcttatcaaaaccttaaccgcattacagcggttaacgataggacctttgtgggtcatccacaaaggtccttacagtgcccgcaagatcctggatttgtcgtaacatgttctggatcgcagcacatcgactttcaaggtatacaatatgtaatggtcatggtgttaagtcttttgatatatctatatcttactatagactaattaataaaaaaattgatgtaccttttttcgaaaatataggaagtttggatccatcaagctcttcgatggctctttgccacaaagcttcaagctcaacggtccaccctgatgtcctgatgagttttgataactcatcaaccgcgaggtttcatatcgacaaaaagttcttaccgactttcggaaacagcttcaaagtaagtgaactcgatcaagtacacggaaaatcacaaactgttgtgacaaaaggttgtatagagaataacgaggaggatgagaacgcgttttcttatcatcaccatgatgacatgacctcaagctggtcacctggtacgcaccaagccgttgaaacgatgtttcttaccgtgtctgagacggaagaagctggaatgttcgatgttcattttgcaaacgttaatttgggatctccaagagccaggtggtgtaaggttaaggcagctttcaaggttagggcagcttttaaggaagtccggagacacacaactgccagaaatccgagggaaggcttgtaagaactcttgcctacctattaaaatcagcggtttcttgcgttgcacgataaatgtgtatatatatttgtgaatagggttagataaatggatcccggccattgagttacggggattagcctttgcgtatatcaaagtatttttttccctgggtaagtatagctgtggcacagggtttgtaagttgtaaccatatgccgtataagaatcagaggtttcttgttgtacacgaaagctatgtataaataaaagctatgtatatatgtttttttctaccataacttttcaataatggatctcggctattgattgttctagaccaatatgatacatgaataatctttgcgtacacctaaattttatagtgaaaaatacataattttaaaactttacttttgtagagatgcctaaaaaaaaatggtttaccacatggacattgttatttgttcagatctccaacgtatagcaatatttgtgatttatagatatgtaatttggtgttcaaagaatgtgtagaacaattattcttatgggtatgccaagaaaagttatataactttattctatactgctttcacgttaaataatgtaacattattaatgttgtccttttacttttccttgaattgatttgggaagaagactattggcttccttatcacatcaaaaagtctatgagtaagtgaaacattggctggcttttgcttcattcctttgtctctgtcttcatgtgaacaagtttgcagaaatttgtggtttctttttttactttcttttgtctaatacacacactctcaccactattataaagaaaatccatagatcccggtcgtgcgtactgccactttgctttccacccgacaatgatttgggagatgttttgttttgtgtcatacatctaccaaaaaagtcttaatcattgttcatcaaaagagcgcccaagggctctttcgtcttcttaccacacgcacactagttcgagagggtttttaaggagctcttaagcctttcttgatgactcataccacgaacaagaaccaatcttgtcacccatataatctccgtattcagagaattgaagagttcttgatcactactgttgtatcaaaaaggaactctaagaactaagattgtttttttttatttgatggatccaaggaagctactatcttgttcatcctcttacgtgtcagtgagaatgaaagaagagaaggggacaattaggtgttgcagtgagtgtaagaccaccaagacaccaatgtggagaggtggaccaactggtcctaaggtctcttcttctacctttaattactatattcataactttgtttgatcttaagataattcatcaagtgttcttaagttgtttattttgatttgtggtgggatttgcagtcactttgcaatgcatgtggaattagacacagaaaacagagacgatcagagttattgggtattcatattattcgcagccacaaaagcttagcctccaagaagataaacctattatcatcatcacacggtggcgtggcggtgaagaaacgaaggagtctaaaggaggaagaacaagctgctttgtgtctattgttattgtcttgtagctctgttttggcctaagtcaaaaaacagaatatctctcgctagaaagttaaaaaaacacagttttgtcctctcctttgttgacgttctatatctattttgggtcactcttttgaatatgaataatttaagatttaatgaaataagttgggcctaactttgtgtcgaaaggccacaaatgaattttaaatagattggagtatttctgtttgggctttacattgacttggttggagatggtcttagagtaacttgaataagatcttcacgtagatcatcactgcgagacgaaatcgggtatggactgatctgggtgatcatgcttctcggagtgcaacatttcaaccgaaatcagatcgtgctcgaatacttttcataatgtaccaaactataaagtagggtgatgaaatttgccaaaagtggaaacatgtcgacccttcttacttcaagccacgtagatccgtatttgtcggatcgggtcacagatccgaataaaacgggtctctctctctctcccactctccctctcacgcgacctgtttacttcaatctcaattatgctctctccctctctctattaaacagtcgatttcttacaaaaattctcacttccgtgcaagcaaatgcagtcttgtttcgagtttgattcacacaaggcaagtatcttctcctctccgattcattttctccttctgggtcatttcgattctctgtaattaaagacaaagttcgtctctttttaggtctcctcgttgaaaaaaactcagattttgtttgattcccttcttcatttctgcaattcctcacttgttttcgaattaaaatcaaaaattcgtttcttttgaatttgacttatcgttttctttaccctgtttgatttgtctggatgcttacacaattaggtgaaagttatgatttttattgcttcctagatttctaaaccaaggaaaagatttgaaattcaaagtctctgtaacgatttcaaaatctgttttatttatgtttctgtttggaatataagaattgtttcctctgccttgctttcttctctcttatgctgagattatagagtatgttgtgttctattgtctttgtagcttgttcccttctatatctgtatagaaaagaactcaaattttgagtcaaagattaaattttccatagggttttgaagaaattttgtaatgatgttgtgaaactactcgtctttaggatcagaagggaactatagaaatgaaactgttaagaagttgtatccactgtgggtttatatgtgcctagttctaattttcattctctggatctacagattggaatagaggagacattgtctctttgattcttgagcttatttgggggagagaaagagagagcgagaggatctgatgtgtatctcaatctcgcaagtctctagattgagaatccattcatttggaagttcttgctgtgagcgtgttcatggatggatcaagaacagctctagcttgaagctgcttgatgttagagcttcttctgttgatggtaaagcaagatggatcagacgtaacgtgagtacaactacacaaggtagtagaagcaacactaagagcagtgtgttgggaggaacagttcctgtaaccaggattatagatgaagagagtagaaccaaggtacagccttttggtaatcttcagcaacggcttgcgcaagataaagatctgtctaagctcctcacggttatagtctctgatcttgagacaactggtttgcatcggaaaaatgagcggataattgaaattgcagctcaggatatagctggtggtgggtacagcacatttcagactcttgtcaacccgggtgttgttcctataactaacgcacatatccatggaatcaggaatgatatggtctgtcgacccgaggttccaaggtatacatagtctttagataaaattgtatcatgtagagttcttttgaatttctgtgattagtttgtaacaaatgatggttgtttatgattgtgtggcttccattggatcaaactaatgatggttttgtgttggtggtaggatggaagagctgataccgatatttctgcggtatgttgagagtcgacagaagcctggaggttatgtgatgttagttgcacacaacggcaaatcatttgacttccagtttttgatcaacgagtttaaccgttgttcttatgagattcctcataattggttgttactcgactcgctcccactcgctagagagaacatgaagtctgtaggtaacatactaaaatccatcagcttctatttcactgagatgcaaattaagcctgtatggtctcgctttgtatcaccatgatcttagttggctaaactagaaatgcgttattcttcttctaattttgcagagccaacggttaagctaagttcatcgttggaagcgcttgcggactactatagtcttacaagggagggtgatgctcacagagccttgtcagatgtgttactcttatctaaggtgttccagaaactcaccattgatctcaagctctcactctctgatctcgtccttcgctgtcacactgcatctgatatcagtgctgccatggccaagaacaagaaggcctgaagcattttagacatagctataagcttcttttgggatattcttctctcattctattgtttaatgtatctaactctgcaattaatgtaaccgattatttaatttgatcctacattaatcaagacaaaatacagagccagagtttttccacctcttggacaaaacacaattacacaacaacatcttttgttggaagctgctacaagagcatctgacacatcaaagtgccaagtaatttgcttgtcacaatcgctgctcttacaaaaagctttcctccattgagaaaatttcacagaaccttgctcaattactcaattagttggctaatctgcataaattatggacatctaacattcaattaatgttaagactttgaatataacaggttttagaactcagatataagaaaaatagaagaagccaagactgtttttagaaacttgagaaaatagcattcatacttgggaaaacatacaattcagtacaaactcgtaatcaggcaagagaagagacagttaaactcataatctaaatgaagaatacatatataatagaccataataaaacgtacaccaagtcaaagatcagagtttggaacaacaagaactaattataagggaacatcattggatctgcaaacgacggtgcttgattccatggcgcaaactgatcaaaggggacaagtggggtttgtgtctgcatctgaggaggaaaaaccatgggaagatcaaagctacttcccagaccagatccttgttccccaagtaaaccagtactcgtcaaactgtcaaagctagaaacagagtcaggtacttgatagaagctacagttgtcatggttatagagaaagacagaaaatttgctctgattttgactcaatgatgacgtcgataggtcttgctctgtgtttgacacaccactcatcaatggttctgtccgttgttgatgacgatgatcctcaattagcgaaggaggaggagacaatggattcgttgtggaagaaaccgcacgggtctgaccaaactcggtctggtttttctcgggttggagtaacagaagcttatcttgtagtactcgtagaccactttctaacgaatcctccatctctaagactttctccgacaatttagtgtcgtcgaggatcttcttacgtagaaacagagaaaggttggttcttttcttgcatcgctctctctcgtgtaatctgctaaacctctcagccatgtctcgaacttttgattgatcatccggccatgtcttgatgagttttccgtcacgaccatagtatatgacacagacatcgatgttgcacagagtcgaaagctcgagggctttcttaaacatggtctgttctctcatagacaaattcgtggtcttttttgcagtggaagaagaagacagggacgatttcttgaaacaagtttggtttctcacagacaatttggttttcttcttcgtcgacattgaagaatccattgttgttgtttacccacagaaaaagaagaagaagatacctagtttcttatcagagagaaacctagaaaataaactcttagaataatagtgtaactaacacacggttcagggttatatagaattgtgaaattatagtatttccatataatatttgatattgattttactaaaccaagagagacaaattgagctgtgggttttatttcctttttctttagagtatcttttcttcattatatgatgatgatattaattaatctaaccgttggcatttttcagtaattgtaataaaaatcttcttttttttttcctgatcacgtgtaataaaatccattttatgattgatatcagagaggaaatctaatttagatctgattttcatttaccaatatcaatctaaccgttgtaaaaaaaaaattctacatattttactaatattttaattaaggtcagcaaaaaaatcttggttgtctgcactattttttataaataattgtttatagtttattagtatagaaaaatataaattagatcctatttccatttcactaatatcaatctaaccgttgtagtaaatattttcttatataataattactgataagatttgattgggaaataaaaatagccaataaggttacgagctcaagaagacgctattgcttttcatacagtaaacatgtgcaccaatcataatgatattgtttttgcccactttaatatatcctgcgtacgttggcatcttccaacttctcgtacccataatcctgcgccgtggtctccactcttaccactccacacacgcacaggcggcgcgtgtaatcatctcaggtaaatccgccgctctcctccactctccctccgtcgtatcatacagcaacacaaggctttctctaatccctctctcacccctcccactccgccgaagcaaatcgtcaatgcatcccaccacctgaaccaccgccactttatcttccactccgacgcagctaaacctcaccgttccatctaaccgcacctgtgccggtaacggcggacttttcagcctctgccattctccaaacccgctgtttccaccacgacgacgcgcatcaaatcgccaaaacgaaagctccaccgcgtgactggttagcacatacacatatccaaccgccgcacacgccgccactacacatccaccaccaggaaccgaacgactccttaaccactgacgcgactccacatcgaaaagatccatagagctcgcataagcacgcgccgccaccgcgcgtgaggtctcattcccaattttcaatccaccgatcacataaaaaactccgtcaacggctgctccgatgcaaccgtatctcttcctcgccgattgagtcacaacttcccaccgattcaactccggatcatactcttccaccgccgccgcaacctccgaaccaccaccacctccagcaacgtagatcttaccagaaacaaccgcgattgcgaatttcttccgagggaaaatcatcggagatctcaaattaagcgttcccatccacgaatcgtatctcaaaacagcatttctactaacaacataaaccctaggtccaatcgccgccgcgcgagcatgagataaacttccataactaccgtcaacgccaacagacctactcgaaaccgcaagagacactttccacgacgcaatctcggactgaaactgcaaatccgcggcgaaaagtcctgaatcgacggtggatatcgcgaagagagaatgtcggagcaaacctaaacgacgacggagatggagaaagtaaggagagtggaggagacgagaccaacggcgacaaacgacggcgagagaaggaattgaagaggaagggactcttgagatacattcgaggagtaaatcgtcaggtagagaagcgattgtagctgaagaattcgccgccgtggacgacggttggtggatctggactagtgatttggcgtcggagggatttggtaaacaagatttcatgagccatgagaaatggcgagaattgcagttttctgacatcagaattatcttcagagaacaaatttaattctaagatatgaaaataaaataaattattatatctgtgggagttacggagttgagagggaagtgtgatttaagaaagtaaaaagactatgcactaaataaataaatagtacatactgctttatactccatatacgtacacatgcaaattcaactacttagctttcgtttatgggttatctactaaagtactaatcctcttttaatataattaatgaagtaatcttaactataactttgtatagtttaacttatattaggtactaactagatccggccatgcagaaaattatacagctaagactaaaaaggatatgaatttcacttgtttttcaatttttgatagtaactcatactccattggcaataaaactacaaggccttaaatgattgtggtttttcaaaaacatttctccaaaaaaaaacaggaaatctagttttttgagtggttttaagtatgtttccaagacaaattacaatccatttccatatttttttggttttaagtatgtttccaagacaaactaaaatcatcaattaattacttaaataattaattaagtaccaaagttttttctctctcttctctttctaaattctttcagagagagagaaacctcaaactcactttgccgtccgaatttttttccggctaccgtcttctctgatagggattatcgtctggcaattaccagttctttccggtgttggccagctcttgtccggtatcattcagctttcacagtgatgatggtcggctatgccgtcagcgttcttttgctgctttttgttttttcataaattagctttgctttcaataaatctcatttgagatgtgttggtgataatgatagagcggttttcgctttttgttacttattatctaacctgtttttctttttgagtttagaattgcaggaaacaaatcagagatttgagttggaaaaaaaagtgatttccgttgcatattaacattaccttgagctgttgtttctctaattagggcttcgattatttttaccggtgaaaacccataagattccatgtttgatttgttaatcgacgttgaatcttcaccggagtcgatgtttgacggcgaaggatgaagtcgggaaaactttggattctcatccagtacgtgtattggtttctctccagcagaagacacgtggctttggatagagacaaaagataatatttcttcttccatagacggtttctctgttgggctttagttgggcctaatatgtttctgtagcttttttgttctggggtatttcataatccatgtaatatttgacttaaacaataaaattatccctattgcgaaaaaaagactaaaaccatcaactactttttttcattttatttttgtaaataaatatataaccaataattggtaaacatccattgtaaataagataactatattttaaatgataattggtaaacatccatgcacatgttgtttgaggtttttttttggttatacatgttcaaggattttattgaagcactatatataatataagttttaaatttattatatacatgctacatttaaaaaagataaaatattatcataaattttaaaaaattcttagatatgtaatttattatatttaaaggtaatttaaagaatcattagaaacagataaaaaaaataatgtgctatccaggataatactatcttttttaagcgctgatataatcattatttaattttttttttatatttttcttttaaaaaccctccagctaattatctacaaaaataataacacaaatttaatattaaaattataatttttgtcaacagtatgattataatatgggtttgaaccatgataatgacacaataacaatacaagttcaattaggctatttggcatgaccaatttcaaactagagttgagaacttgagatgtaatttaattcatattaactcatcacaaaaacgtgtataaagttttcattgtttcaagtgaaaaatatttatacatttgtaaatgatatatgtttttaaaagaactagaatgttgagaatttgtaatttatgcgaagatacaataaccggaaagtaaaagatttcaaacaaactcgttttcacatttgaatactccaccatgtagtgctcgcagctacgattccatcttgcccgaaatctggtcactccaatgaacgtcttcaccggaaaatccacaagttacaatggtcaaaaccattttgtcaaaaacaagttccaacaactatgactggaatcttatacattttaaaagaacacttgactttagcgtgaagagagtattttggcgttggtgcacagatctctcaactcctcagacatcgacctctgactatctatggtcttcttctacacaataatattacgtactaactactctgcaaaggatcttagtattgttaaatgcaaagaagttgaaaccaaaagccctgaaggaaaacatgcgatgttcggggctaaagaatgaaatagttaaggatcgaacttttcttattgatctaaccagggattatagtatccgatcacaagaatatttccttgaggattaagagtagcagcatgatgaaacagaggatgacaagcacggatgcgcacttcaccatacctccatgtctctgcgttcgctctgcctgtgaagtttttttatgcgatccacttcatttagaattgggacaaacaaatagttggacattaatgttgaagagagaacactatttttaccttctgtagttgtttgagaccatcttcaacagtagtagcgacgttttcgatattatagtctatccgatcaactattgtaccctgcaattaaacgggttgctttgagtttgtttttcgaaaggaagaagactcaaaagctagacaaagagaatatgggattaaataagtttaacctgatctatcacaagtgcagaaagatccttcataatttgagcaagatcgtttactgattctacaacctggacaatgacacagacaacgaagaagaaaaaagattatgattgattgcaaaagaaaaaaaaaaacgttggtgagctacaaacaactaagaacaaagacgtagtgcaagcacttgcctgttgtatctctttctccctctctacagatacttcttcactcttttttatctttgacatctgatgctcgtttaactaaaaaggaatcgagaaaaaattccatcaataaagaagacataagacgaatgattgctttaaatcgatagaatgaaacaggtataggagtcaaaccatatcgccaaagtcatcctcttcaggtctatatctgtttctgctcagattcatctctaaatccatcccatcctgataaatgataatacatttcaagtcaaagcttcttgagaggacagaataatatactctgaaaaaacaagtactaaaagaatctatcatctatgaaatcgatgtaaagaagtttcatttgaggcggaggagcagaaagcaaacaaaaacttcaaagaatgagacactgcaacatcacatagtttccggtataagaaatgccaattacactaaaatagataatagtttcatacctctttttgctgcctcaagcgtttcaaatatgttgactgttttttgcgaagctccatagaaagaagttggaggtcagtggcaagagaccgctgttattaaacacacatgataaatcttagatagcaatggcaaatgcagcaaaaagaaaggaaatgtgttaagagcagcttccatcaagtcaaaactacctgcacatttttcctaacatttgaatcttcagaaggccctgaagcagaaagcctctgaagttgcttctcagacttcttcaatagaaaagttatctcctgtgtcaaagactcaatattatgttgatcttctttaccatccccaaacgatggcattaacgccttggcatgagcctttcccaactcagccattttagtccttgcacgctgtatattcacagatatctcctcagagacatcaacccaagctggtggtaagcccactgttatcgcacctttactaaaacatgaccaaaaatatctcagtaactactaactctcagcttaacgtagctcacagacatttacttcaactacactatcaatgatgtattatcattctcattgctaagctaatcatttccagttaaccctaattgatcaaattgttcaccattttcactgataaagagagagaagagtacctagaagttccaggatcttcggtactaataggagcgtaagagcgattcggattcaataacgaagtactcgccatctcgatcaccggaccaacgccgccggatcgtgttcccgtcaatgaagatgacgacaatggagctctgacgcttctcagagagtttctgtacttcctaaacagcaacgtacgattcctcgtcgccatgatcgtcaaaatttgaaatccctagaatctcaatttcacatccaaattcgaaatcagctccgatctgaacacaatcgcggcttcatcatcgaccgagaataaaaccgaacacaaaaattgggactccgacaaggaagtgctcggagagcggcgagatcaaaactttttccgatgaggaaagtaaactctcagatttgcaaattgaggttttcacttttcactatttccccaaaacttaaaactttggaaacagtaaaaaaaaaagttaaaaaacagttgcgcggctaactttgtcctgtttcaccagcttaccaaatacaaaccaataatatttcgacacgtaagcgtcgtactaacagcatgacgttttgatattccaaaagggaaaaacacggcgggtaaaaggtttaaacggcatgcattcgtgcgggctgttaaaaaacaatttaatacatgtaatagaactcatctcttctatgtctttcactctctctctctctctatatccaaagaattaaaaaccataataaaaaaagaagataaaaagacgaattccagaaaaaaaagacgcaaaatcgtcgtcgtcgtcttcgtctttgcatttcgtcggaatcttttgattcttgaatcggaatatctctgtttttgttttatccggactcaagatcaattcggattcttggaatttatttgattttttgttgttgttgttgaaaaagtggattctttggtttcgatttgtaataatcttcgtagaaaaaatggattctgattcttggagtgatcgtctcgcatcggcttcaagaagatatcagctcgatttcttgtctcgatctggtgagtttgataaaaattataacttggatttgttctttcttaatttgagatttgattggttttgtcttaaatttaatcttgattctattgcaaaaatatcaatgatatttagacctcaaatttgttttcttttgaattgatcaaggatcgagattgactgtaagagattgacatttttgttactgttctggttttccgaacaaaatgggacaagacattgattgtgtcttgttctgaatatttgaaatggtgattgttcaaatgtttgttttgctgatattgaatttaaggaaaatggaggaaataaattctgtcttttgaggcattttactaatgtgaggctttagggattgattaagcgtgtgtgttttgtttctaggttttggtatgaacttaatgtcaaaagctggaatcttgatgattcttgtttgacttacaagtaaatacaaaacttcttgttggtaaaaacgtttttaaaagctttagtttcatctcaaacttagacgtctttgccagggaaggttttatgatctactagtttccattcgtttatttagatatctttgatgtttcttctgaaacccatttgtattggaacttcgagaatggaacgcgtttttagtatttcccattttattttctaggcttttgttttgtagttgtcattttattttctaggcttttgttttgtagttgtcacattttcgaatgttctcttggccgtgtttgactagtttcttcatttttgaaaaacgcagacaatttcttggggtttgaggagatagaaggagaagatgacttcagggaggagtatgcttgcccgttctgttcagactattttgatatcgtctctctatgctgtcacattgatgaagatcatcctatggatgcaaaaaatggggtagatatttcctcaatgttacctttctctcgttttgaatcaaaatctatttattgtttcatcatatcattcttggtaagagcactgttctatgtttagtagttactggtcttggatataaagaaagtgaaagtaacctaatgaaatgcgtcgaaatagtatttggaattgccactcagtgttcctcagagaagaaatcaactctaggacacttgtttattgctacaatagcaagatttgttttcaattctgcgttttgacattgttaatcttgtaggtatgtcccatttgtgcggtgaaagtgagctctgatatgattgctcatataaccctacaacatgcaaatatgttcaagatatcctttttgctctctctaccagttatatttttaacgatcatgtacttatctgattcttccaatgagttgtgttaatgatatgaatacttcctgatttatgatttaggaaatagtttaggatttacttttcctagagtcttttatttatgttctgttagaagtaagggttaggttttgtttgtgaaacctaaccaagcaattgagagctttggaggattctattgagtttatactcttgttgctttattgttctatcttttctactatcataataaagattttatctctaacagttacattccttaacaaaatattacgtgacgcggaaaaggaaatcaagaagaggcggggctcaatccatgctatcgatcttgaagagagagtttcctgatggaaattttcagagcctatttgaaggaacatcacgtgctgtatcctcttcttctgccagtatagctgctgatcctttactgtcttcattcatttcaccaatggctgatgactttttcatttctgagtcaagtctatgtgcagacacaagttctgccaagaaaacattgaatcagagtttgcctgaaaggtatgcttccacattctcatttggattacacttctggatgatatcctcattgatttcttgatcattcttgttaagtcatcgcatattactcatccttagtttttatgagccttaatggaatttagttgatcccttgttttaccaataacctaaaagctcttgtgatctgagtgttttttttgttgttgttgtagaaatgcaaattgcagagtttgttatgatggttcttgtcttgatctgtcttatacaggaatgttgagaagcagtctctttcagcagaggatcacagagaaaagttgaaacagagcgagttcgttcaagggatattgagctctatgattcttgaagacggcttataaaggagaaacatattccggtaacttgtctacggttagatgattcagcgattggaaaatgtaacggctttgttgtgttaaacgcaacaattgatttgggaaagggtttgggaataagcagaataatgtaaaagagagacatgataatgagtattatttttaacttatgaactacatatttgctttaatgaacactcgaattgtctgtacaccgtaggtcttacaaaaagaaaccaaaaaaaggtatgtatttgatcatatatttgcactgagttttctggtcttactatggtgttttgtatcaaaagtttgatgaaactatttggggttagaaagatcgcagagttttaattttcggttttgacaaattaaaaatgtgtaaaccaaccaactagacaaggacataacctaaaggataaaaattgaactaagaattgtagagctttacccggaagggagctcttccagaaattctcgaaggcccaagacaagcttaggcctaggagggggtttggaaatagttttcaaccagcaatagacgcgcctcggttaagacctcattagctgcgtcattgccccaagcgcaaagatgactttctacagagtgagagcctcttaatttatagccaagcaaaacctatgaagccaatatatgcttccgatgtgggactttttggtgtaccaaacaatataatgtacacgtcgtcacttgagttcctgatatttctgttttgtccatattgaaaacaggtttctaacctaaggcataacagattgagactaattgaatggtaggggctgcgcgaacgcaaaccccttctgccacaaataatgacgtaggatcctcctcaagggaagaccttaggcatagcaccccaacggtatgtgcaatgcggtcactagcctaggccactcgtcttgttgatcgcgagtagaccccgtccaggtaagtaatttgctcgaaacgtctgcttctctatatatactctgcgtccccttgtcattattttggatctaagcgatgtgggactatttttgtcaacacatcgtcgttttttaagctcctggtttccaacaacgtactacatgagttttttttgttgtacacatgggccggatgttctaggcccagtcaatgtctgcgttagttgtttagttgttgttacttcaatattgatgaccacagaataaattcagaatcggaagagtgacaacacaatatattttcgtattgactactattgttctttctgtctttgttgatctcctgacctctacgaagacaaaacatctagtagaactttaagcaatgtatttgcattgaagtcttaatactaaattatcccccaaaacgttatgccaaaaaaagaagaagaagaggcaaccttatatttctagcccatatccataaatatgagaattaagagagttgtatagatttgttgattgattgatataagaatttgttcagagaatatgaaagagtagtgtgtacattttgcctattgcctcaaacacttctttgagccggatattaatagtgagaactatattattttttagtatgtgcattttgtttttgtaaccaagatgtttcgagttttgggttggagaccataacatgttaattagtcttttctccgctaacaaaactcgaacttgataccttgaggcgcactttgtttggaagctccactcgaacttgagaacttaatagaccattttctttcaagcattgtgtcatccaattgatttttaaagatccagcaatcgttttaaagtgttggaaataccaaaatttacaatccaaggaactataatcttactagtattgatctaaaactataaataattatatagtcaattagatagacacttagttgctatcacaacattcgctgttatgttaccacaacaatctattcaaggccaaagtgtttacgtcgggagagacagtagaccttgtttactattcttaatgttccattcccaaagataaagtagacacttgaggaccctttccaaagccctaaacaaatcaaaagtgttttccaagtacatcaaatcattatcatcttaacctcttttgtcgtcttgtgtccaatctttaataattatgctaagcattgttattatctatttatgtatatcgtaactaagtaacacccttagatatctaaacagagataaacatgtcattagtgaaagtgatgtttggtctgtgtctcctactaattaggaagcaaatgaaatgatttcttccacttagcaatttaattaacttgattaaattctcccccaaaagagctaataactgcctcaacttaaaactatgcacttaagggtcttaattgttacaaaattagtaataaacggtcccatttcggatgcaataatccatttattattaagatccattgaattggaccactaaaacgtatacatacacacacacataatcataaatatatcaaaagaaactatctatctaagcaaagctatacttttacaggttggtgtgttcactgtgtttggcaaaaagggtcatgttcatttttaaaagttggtacttagatttctgtattttcaatgtcaataaagagacattcttgattttttttcttctaaaagatatgataataatacatgcaatgtagatattattatccccactagctaaaatcttataacagcatatttatagatcatggaaaataattcaatatttttgtctatttatgggggagatgacatgtagttaaatagtgcaaaactaattttagtgtaaaagttgaaagaagagaagaaaaaagtggaggttcagaaattgatgtgtgctttttatgaactgaaaactttatgtgcctaatcctcactttagccagcatgtttctgggctgccttttttagtgggccatttgatttcggcccgagtatttattttaatgtaatccttaatctaaaccattgattttataattagccacgtcgatcgaaaatacgcgcctattttttctttcctatggttaggatccgaagcttgggtttgaatatatttttatactagttttcaaaaactactgaaatatgcatgcccaaagttataaatgactgcaaaaattttgttatatcaaagtttcacccaataataagttatgtatagtaataaataggatgaaatcattaaaaagattttatgatataaaatgagataaatttgtggaatctacaaatcatgcatgtacttatattttatagatggataggggatactaatgtttgtgatatgcagagagttaattctcagctatagaattataaatgttttagattggattttgtaatcatgtttttttcaagtattaacattaattaaggataatataaatgtaacaacataaatttaacttcttcatatgcactaataattgtattgaatcattatttaatgtcaatatgttacgaagtaaaagttattgggaaaaaatcgactagtagattcatacattggaaaacaggtattatgcgaatgtgactacgaaacaaacttatagtttggaaacagtggattgatttgatgaaaaaatatatataaatcccgtatgcgaagtatataaatttattagaatttatatacttcacataagttagtttgaaattctcctaaatgataaaagtatgtattcaaaaatatttatatagttttaatgtccatgtttcataatccgattagtcagtacctaatgatcaaaatttattgaaaatattttattgaaatcacacactactctacacaaatattcttaggatccattacataaatggaaaatagttgtaacttttatagaataaaagaaaaagataaattattttattccactcattaatataaaatagtttatggaatattttttccttacaatatcctcagctgtgttgttaatagaataagtatccatatttgtccagattttcagcataaatggtataaaatacttctcaatattttatttccctaacatttactcctcttattgtataatcatttgcacccttacatatatttttatccaacctaatcaaaattttctcttctctgatccataaaactatacaaaaaaaaatagtaattaagagattaaaactatactaaaattttccttcttttaaattttgttttgtttttaagtttataaggacaaattacacatattgccacgaacggtaacaaagaaaaggaaacgaacctgggacgtttggagtcaggttcggagcgtatttcgccatctttcttcttctcccctaaattttatcttttagagagagaaaaaaagtgagagccgagaaagtgagggaaaattttcatttcaaaacaccttttcttcttcttcttcttcgtcttcttctccctttataaacaccgcaattttctctgcatctcataatttcaccagaatctcagatggcgacgacatcggagatcaacaatgatctttcgttttccgttgtatcgattgttgaagatgttcttcaacaacatagtagccgatcaagcgacgtcggtttggtttccagaaaagttgaagaatcttgtgagtctcttgttgcttttgtattttcttagatccgttcttcaattctgggtttcaaagaaattagggacgaactttgtgatttttgttgacgaaatctaaagatagcttgagaaaaattcgaattctggttcacgatgatattgaaattatcgatgtaggaattgttctggtcacggatttatgattgataattgttatgtagctttgagaagatatgaagctgctgggtggcttagagatatgatcggagtttccaatggtaaagattttccaggagagccttctgaagaagagtttaggcttggattgcgaagtgggatcgttctttgtaatgttcttaacaaagttaatcctggatcagtctcaaaggtaaaatatctgttgatgtcaaccttatgtgatccatgtggagaattaacatctcttttacaggtcgttgaagcgccggacgatgttgcagatggagctgcactttcagcttttcaatactttgaaaacataaggaattttttagtagctatagaggaaatggggttgccatcatttgaagcttcagatatggagaaggtagaaaaaacttaaggtttttaaggaaggatagagaggtgttggtttttatttgattgatttgttgaatatgtttttatcagggaggcaagtctataaggatagtgaactgcattcttgcccttaagtcttatagtgagtggaaactgaaaggtgaaaatggtccatggaggtatggatctaacatgaaacataactttggatcgagaaaactatttctgagaaaaagttcagagccatttgttagttctatatcgagaactcagtcgacggatatgttatcaactgatcaacctctgagttctgatgtaagtgaaaaattcctgcatagtggaaatgtttgtttctatggcatggattggggttgttgatcaaagtgtttacttttcagggagattctagatccataaatgggcttgttcggtcattcattgcagacagaaagcatgaagatattccaaatgtaataattctgctcttaatagttttttggcagttcacttgtttaatgaaagcgctgcaaattgatctgtataagctcaccattcgtaggctcaggaattgttagcaagactagtagacaccatttcgcagattcttattgagaaatctgatttctttttatacttaaaattcccaggttgtagagtctgtgttgaacaaagttatggaagaagtccagcagcgtttatcaatccacaatgaaatggtgaggggcaaatgatgtcaactatgatgtcaatttcttttggagtgaatacaatcagtctgaggttttgaccgatcgatctttcaatttttttcagatgaaatcaagttcaaagcctattccagaagatgattcatcctgtgagacagtggtccggtctcagctgtgtgatgcaagacaacatgaggaagcagaagaaaatagtccgccccaggttgtggaaaaaaagtttcaaaggacaaattttgaacatcacgaagaacaaaagattcttctgaatcaacaaaaacacatccaggtaagttccattttgtatggcgttggaggatctagcaaccatattatgaaaggggtttctgattcttttttccattctctttatagcaatcacaaattagatgggactttaaacattgttttattgcttacaggagttgaagcaaaccttatacactacaaaagcaggaatgaaattgctgcagatgaagtatcaagaagatttctttcatctaggtgccaactcagatcacgttcttgttgaggcctcaatgctcaatcagtgaatatttaatctgtcattcttttgtgtttggtcacacaggcaagcatttaaatggtttagcttatgcggctacgggatacaaaagggttcttgaagaaaaccgtaaactgtacaatctagtgcaggatctaaaaggtaacttgacataagaaattgatttgtgtcagtcatacttcgaggatcttgaatcactaagacagctcctttaatctgcgtaatgacctcatacttggtaatgtttaggaaacatacgggtgtactgtcgagttaggccgttcttgcctgggcaagaaagtggtggtttgagtgccgtggaagacatagacgaagggaccatcacgatcagagttccatcaaagtatgggaaagcaggacaaaaaccatttatgttcaacaaagtctttggtccttctgcaacacaaggttagaaggctttgattttttttgcccctgtaatgtttagtttgttgcgctgtgaataacataagggaatgaatccattgttcttcagaggaagtgttttcagacatgcagcctttggtacggtcggttctcgatggctacaatgtctgcatcttcgcttatggccaaaccgggtcagggaaaacttttaccatggtaagaactactactatacttgtcttccaatctatttttagatgattagattgtttttgattcaatatactatggttttaatttatctttatactctagacagggcctaaggaactgactgaagagagcctaggtgtgaactacagggcactggcagatctgtttcttctatcaaatcaaagaaaagacacgaccagctacgaaatctcagttcagatgttggaaatttacaacgagcaagtcagagatctacttgcccaagatggccagactaaaagatatcctttgggttaataaaagtttgactgtgtcttggtcatttaaaatctctgagatacttaggttttgtttgttccttaactcttgattacgttagagatcagaaacaactctcacaatggaatcaatgtaccggaagcaagtctagtgcctgtctcatcgacggatgacgttatacagctaatggatttgggacacatgaatcgtgcagtgagctctacagccatgaatgacagaagtagtcgatctcacaggtttgtttttccttatattcttctattctgacatgagtactctcttgcataactcggtctaacctcaattcttcatatctttggcagttgtgtaactgttcatgttcaaggcagagacctcacatctggctctatcctccatggttctatgcatctggttgatcttgcaggaagcgagagagtggacaagtctgaggtgactggagacagactgaaggaggctcaacacatcaacaagtccctctcggctcttggagatgtcatctcctcgctttcccagaagacttctcatgtgccttacagaaacagtaaactcactcagctgctgcaggactccctcggtgaaattctcaaaaccctcttaacttattgcatttgggtatagccacgcacttgaatcttatacaacagttttccacattatcaggaggatcagccaagacacttatgtttgtccacataagtccagaacctgacactctcggagaaactattagtactctgaagtttgctgaacgagtggggagtgttgagctaggcgctgctcgtgtgaacaaagataactcagaggttaaggagcttaaagagcaggttcgtaaacattacaccttgactagactttggttgttctgcatactcatttgctgttttcgttcattcttgccataagtatatcatatcagtaatctgatactgtcttgtggttttcagattgctaatcttaagatggctctagtgaggaaaggaaatggtaatgatgtacaaccaacagctataccaatcaaccgtgagagaatatcgagaagaagatcactcgaaactcctactattcgacccaaattacctaccatgggaaacacatcaaacaacagtaggccccagatcatggatctaagtggaccagaggtatgctttggcttctttaaggagcaaccaaagttgctgatttaaactaactagaatctataagtttatgtcattatgtgtagatatgtaatacatataggctttgaaacggttgcaggcttttaacgacagtactgcatcttcaagaagacacagcttagatatccatgagctaatgaaatcttcttctccggcttggccgaggcagccactcaatggaaaagacgaggacagagaatctaagtcgggcgagtggatcgataagcatgaagaattaattcaaaatcagaatccaaattctcccgagcaattctaccagtcaatggtccctcaacaacaatcactgtatgtaatacattttataatttacatgtatctctctacatatgcttagtcttgatctttactatctttcaaatgacagatatggtgggaaacaagatttcgaagtgcagagtattacagataacgaatctgatgaagccgcaacaagcgattgctcagattccgatttgctgtggcgattgagcgttcaagtgaatgttcccaaagtttctaatatccaaaactcagcaaaccccaaaccaaagaaaattcagcccagaactgctaaactctcagaaactaggtaacaaatatatacttttttacaagtctttgcagctaatgtactgatataatcgggaacttttgtctatttcttgtggcagaagtttaattccatcgctgatcccagcaccaagcaagagacctcctaacacagtaaattcacagccgcagcgaccaacgagagatggaaaacgcagactgagtttaggcacatgaacacaccagttttgtaaagagtttaaaaaggaaggagacaaatatttgttgttttgtatattgtgagagaaagctttctctgttgtggccgctcttattgtgccattaaggtaaaaatctcaaatttgctgttttgagtgtacaaaaaatgattccttattatacaatcttcttttggattcttaacttatataattatttgagcaatccatatgcttttgatcaagtaaagtggcacatgtaagtctacaaaattttccatcaaaattgttgctttcccaaacaagcaaagaaaagtcatatcttcttagcatccttgttaaagagtgcacaaatcattctatgtcacagttgtgtaacttattatgcgagtaagctattggatgcaatgctaagtcgctctgctgcaattttcatcatatgctttccttctacagtcaagctcgtgcttcgtgaggactgcacatttacgaggtaaaactcatcagcacgtggttttgcggtttgcgataacgttaagagggtagaaaatgatacctgcaatgtgtaaacgttctgcagaatcaaatcaatctctgacttggatgatgatattatcttcctaactttgacatcgttgtgcatcagcaggatcacagagacaatgcattgtatcaaattcaatgagtctcgaccactctccctgtcttgaaccgattccaatgcttttacattttcactaaccatagatcgcattcttttcagaacctgttctgtgagtttggagctccggtcgaacaggaagtagcaaggtaataaatagtacagacatgtttgcatataaaggtaagatctctctttatcttctggtatacactgcaagaagaagagcggagagagatgtgtcaatcgatcacattgactatatcgatcaaatatcccggtaaagtatttaaaagggaagtgctcacattgactatatcgatcaaatatcccggtaagaattcacttagagtggttacactgatttcagaaagtcttgtaggtttagagtctaacgcgcagatcatcctgagtatagcacacccattgtccaacgcaggcttcaaaatctgcaaccaagaggaaacatctcattaagtatttaccatcctattatataagaatgttaatatgtcttcacaaacttactatttgttcgacaaaaactttctctagaatctggaggacaagagagctatcacccatttctgacaaatatgagcacacaaggtttgtaagtgttttaaatgtgccacaatttgccttcctctcatcacactcaatcgccgagttcagtttctctgcatgaatatataggcataaggtaagctatcacaaagcctaaaagcatgatcatctctcaaataagctcataaccaaaagttcaatagaaaacttgcagattccagacaagacctgggacaactttgaaacgtgaaatcaaggtaatgaagaagctaaaatgatctgtaatctgaatatatccacctctataggcagtttgaagaatttccactatccgatacaacacagctggttcaagttgttcatctgcattatacggtatttggtcatcattctgtcatcaacttttataaagttgagtcatcaagaaatgtgagatactcacataaacagcatgaaactattgctttcagcataggggagctgaaattgtctatgatgaagtagtaaaggaaacagagagccacttcttgtacttccctagggagacttacaaaaggtccacctggcacctcacctgtaggattttaaaagatgaaaaaacgacaagacctatattagtttagtgacactaagaatctcataacatgtttttttttgcaacaagaattccaccttctccatgaaaagggatgaagaagcttcttatctcttcttcaaatgttggagaagcattcagacatccaactcgcgcaaggtcgagcaaaagttgcaaaacaacctgtaaataaattacaaaaacggtaaaaatgagaggttactggattgacaaagaattgtatgagttatgtgttagcaccttggtagatacatgatgcttatcacccaactggttaagcagtgatggaagtttgttgacccaagcgcgctggtagttatttacggttggatcattgggataaaggatatctccattctgcgaagattacaagaaacagatttagatttcaatgcgcacggaaagttagactcggtttaaacatatcatgtaaaaacattacttacagggataatcaaatctttaacaactgaaatgcaggctaatttaagtgaagactctggtttgcaattgttgaaggtaatagtaaatgcctgaaaattataaacgtaatatcaacaatcatatatacatgaagttagtgctagctatcaaaggaactaagaacatatatcctcctgacaaacctgcataagattatctctccgatcacggtccaccctcagaagaagttttggaacaaagggcaagagtgcaagtaaagtcttatcaagactattgcttctggtgatctggaaaatagatacaatatcagatgaaaactaataagcttgagttattcattaatgtgaagtaatgagagctaacctttcctagtaaggcattctcaataaattctagaaatctattggaaagatcacaaggaaggtggctccattcacttacttccaaaaagatttctgtcaatacaccattgttctgtcaacaaacaatcgactagagttaggaagaatacaaatacaaacaaagagcagaaagagtaaagagttgtgattcattacctctacagaaaaattgttttcgtgattaagtggaaaagaaccaagtaactttttcgataacattgatgcaatgtcacgatccagtatcatcagagtattttcttcaggtgaaggtagccatttagtgtgtctttgagtgtgcctacgaatggaaaacttgattgcataacctatgctacgaagtatatggcggatgcaatcaaatgattctttattgattctttgcgaagcatgaattaatggaaggaaatcttggaaacaattgattaagactgcaacaatctccttcagtatcccagagacatgggcaaaacctataagaaccagtagaaaaatagtcagactactgtaaacttcatcatgaaaaatcataaattattgatgagaaaagaagacagatggaatatacgaacacattctttcgcagcatcttgctcacaggcgagtagcgtttcatactgtaaaagtccctacaaaagatcaaaaagggcacaaaatgtaaaaacaaacagtgacaatagggaaacagaacagaacaatatacattgctatgctacttcgtggcatgtgtgaagcaagaactttgaagtcatctggagtgaaaatgattagatacctttttctttgattcattgtcgctctgatcacatggcaacagcgacaagcaatctgccaaccccaaaagaactaccttaagcttctttttatcttgtatataaaaatggttattatgaataacatccttgtagttttcgagaatctgcatcaagtaacagatagaaatttcagggaacgtctttgcaagaatactacaggaaaaagttggagatctaagtagagaccttttcagcatataaggagaaggtaggcgagtaaaactccaaaacaaggcggaaaaatttgaaagccatcaaacgaacttcaatagatgacttagtcatagcggtaaatatgtatggcatcaaacttgaaaccataagacccttgttaatatcctacatagattcacacagagaaatcagctgttagattcataagcaccagctcatacatcatatataagaaggataacttaacacaacaaagtaagagaaaccaatgtaagcagaaacagtaagaagaagaaaggaacacatacctctttacaagcaagaaagatcccagtcaatagtgtataaaaatcgtctcttactaacttatcatcatcagtaatgagttctctaagtttatgtgtagtagcatatttatttgacagcagctctgcaggatgatgttttaaaagatctttgataccatgtaatgcatctacatagacaaaaccaaaactgatcacaaagtcgcaggtttcatattttcatcaaccaaaaacatgagaacacacccaaaaaaagtacctttgcgaactttagcattgggatgcccagttcggttcttaagctcaagcaaggtcaaacctttcttacttgtagcgaagccatctctttctgctgccacactttgctcatgaagtataattgctgcaatagaaaaaaaagcaatttctcataggaagaagttaaaaagtttgaagttgcaggagaaagcttatacctttggatttaatctctgtgttagttgcattatttggtggaggtaattttctcccgagctttctcttgattttctgaaaacagacaaagttacttaaagccctaaaaacagaatagtgttacttaaaaccataaagaaacagaaccttgaaatcgattcctttcttttgctgcttccttgcaggagccttggagcgagacatttattttgtatctttgtaaatcaaatcaaagcctaggagctggttacgaaggaagaagaaccaacccggagaactgagaattttgatggtgatgaagatgatgatgaatcgagagagaaattgaggtttaagaagatttttgattgattcttaaaataaatcaacatccaaaaccgggttaccgaaacgatttaactaaaccagagatatgaggaactgagaggagtaaaccatgttatcgatgaatcttcctcttacaatcttataccacaaggaacgataaattagggttttctgaaacggagaactgtgttagttggttaagtcgtttgattagaccggtttagatgctttaaagcaaattggctaaaacggggccggtttaatgggtgattgatttttattttctcacaagtcaacgtactgtaccactagaagaagtgtagttaaatcaaacccacgactctctccacaaacaccactaactctctctttaccattttcatcgaatcatatgacgatatcactatcttcatcaaactctaaaatcatccctgagacgagcaaagactcgccaagactcgtctgtgtcaacgtcgtagaagtttagggtttcaatggaacaaggaacgatcaagatcaaactacctaaaccatcagagataacgaggaggcacaagaaagaggccgatatgggcaagaagataaagaaagaagagaacatgaagagagatttcatcagacggagaatggtttttcgagttaagaagatgacttctgtgatttccggtgtcttcaaccgcaagaaaacactttcaggtgaaaacagagaacagagagatggttctgagggcgatgagaccgtgtttgttaaactcaagcaaaacccaattcagaagaaggggagtttctgggaaagcgcaagaattcgactgaagacactcatcttagggcaaagattgaagaggagaagaaaccgaagaagaagcttaagtgaaggaatggaagaagaggagctgtgcaagaagagaatactaatgggtgaaagatgcaaaccaatgaacggggttttgcagtatgatggtgacggaattctcctacccgagccatgacggttgatcggttttcgtcagtattagtcctagtgtagtttcagtttcttgttgattcactcattagagatttgcaggtagtttatacaaactttatttcttaccaattttcaatatcttgaaatcttgaaatcttgaaactaaggctacatttgaagatctaatgacactgcctataaataatcgagattagttacattgatggattatgaggaagccattctggtttgttcatctttgtaactgttctggagtttggttgcttgtggtggatggtgaattgatagcttcagagggtggaatcatcccccacttgccttcaccctctgtcggttccatcatcttcactgacccgtcattcaaacctaccgcaaactggtttgggtcttgcgggtgagccgccacaacaagaggagacaagccttgattcctgtgaaagcaaagagaatcaatgagaagagtttataactattttggcttatgaaaatataccaatttctcatgtttcagaagtcaatttaagtctattatacagattcatgtaccaaaccttacaaagtacagtgatttagaaataagaatctgatgaaatgttggataaacttacccttgaggcaagtaggcggatggagagatacgacatcttaatctgagactgtccgcgtcaaatactccaatgttaccatcgcggaaagtggtgtagatcagctggctgttgcatgcgtacaccgctgaagatataggagcagacagcgagtcttgtggaatccactgagacatgaaaacaagagaacataagtcattacaaatttcaaaataatgattaagaat

SEQ ID NO: 750 - DNA, 90019 bp, Arabidopsis thaliana
aagcttatcatcagaatctatatccacaagctgtttctctcgcaacatctccaacaatctcgtcgcttcatcatacttccctttcctacaactctcatcaacaagtgttctatagctaataaaatcaaccacacgaccattctcaatcatctcccacaaacatttcaccgcatcatcaatctcaccactaagcgcaaaagcattaaccagagagttataagatttcccattaggaacaaagccttttcctttcatctcactaagcaattctctagtattgatggtcctaccttgagcacataatccatgtattagataatcataagtaaacgaattcggttcacaaccgtaaaccacactcatctgatgactcgtgaagcgaaagcacgtaacctttaaccaaacagttcaaagcaaatacgtctggttcaataccactatccaccatttgtcgaaacaaagatcttactgtctccatatacagatggtttatgaaagagttgttacctctacccaacaatgctttgaagagaatatgatacgttctcatcgttggtctacattccaagttcctactattcaccatatgtctaaatatattcacagcacgtatcaacttcccagctttcgtgaaatagaagatgatcgaactgtaaagattctcgttaccaacatgacgaacagagagtacttggttcacaatatcatccatttctttatacatttcgcagcaccgagcttccttatcgcgatatggtaagagcaattctcatgcgtaaacctcggctgttgcgatgcccagttaaagagatggaaacacagaaacgggtcttcttcaagagttatagcatcagctagttcttcaggtgtgaatcttggtggaagctttgatatcgtttcttgaaactttgattcattaaggattggttttgtactcgatttctttctactgctgattctccttctaagtgaacgtgttgggactgaagttgagtattgtgtacacatggaaacagatgctaatcgacctacactttgattcaagagaaatgctctccattagaagacgtgaccaagttgatgcatcatcacagataaagagaaagaagtaccttgactagtggaagcaatcgcaatcacaccatggatgatgctcaggtcttgcagaagagaacttccggattcgaataaaaatcgaaactttgcatgagagtaagataaacccacaaacaaaaacatttaatttatcaatgatgtcatcgccaaacgtagattccgggaagatggaggattacctcgaaatggaaccttcgatttgagactgaggcagagaagaagaagtgtggaagcgagaggaagtgaaattagggtttgggagagagagtcttgtgatgggtgggatcaaaactcgtgctttaacggttctgaagatggagcctagaaatgtagacctagttgcagccattttacaatgagtcacctatttcaactaaaactatctgcatttctttgtgggagaagaacccttacctttcttcatcttcgtccttttttttaacctagattcacagtggaatctttccaaagcaatggctaaaatcattaacgtttaacaaactcaggtaaagtactctgatttcaaatttaaatatattcttatccagaacaagtggttgatattccctaatgctaaaatctccaatttttgttcccatttgctgaattcttaatctaagtcagtattactattgcaaatccattactgggtcagatttagtttcacaaaatcctttattgctgaatggttatgttgttacatagtgtgggactaattccatgttcaaaccaacaaaagtcttttctcttccatagttattaccgttacagatgcatagtttgttcatctgaaacaggtttgtccataagaagacaagctttggagcaagttgattctaagttgtctagtggagacgaaagagctgcattgtctcttgtcaaagatctccaaggaaaacctgatggccttcgatgttttggcgctgcaaggcaggtctgtcttctgttgtttatatcattattagttgttacaattgtgaattgaatctcgtaatgtcaatgtgatactcctttctctgtatctttgttggaactgattgatctatctctaagcttttgtgtcttaatgatcacagttttatgctttgataagtttagcttagatcttggtcctttctaatgtatcataatgtcaatgtgaatctccttctctggttctttgatggacttgattgatctaatgcatgttttggcctttgtgtcgtgatcatcatgatttgatactatgataggtttagtttagatcttggtgtccttgaaatgtagcatttaggttactaaaactgtaatttgtaatcagtggtctcatttcttgtctttatcctccttctttggctgtgttttgttataggtgcctcagagactctacacgttggaggaactgaaactgaatggtattaacgcagcttcacttctctcgccaacagatacaacgcttggctccatcgaaagaaaccttcagatcgcagctgtctcagggggaatagttgcttggaaagcctttgacttgagttctcaacagcttttctttcttactcttgggtttatgttcctgtggactttggatttggtaactcaaagctctgacttaagatgaaacacacacataaatagtctcttcatatgtccttaatgttgtaggtctcttttaatggcggaattgggagtttggttcttgatacaactggtcatacgtttagccaacgataccataacagagttgttcaggtaaaacctgcaacttcactctgcttcaatatatcactctttatgaaaaaatttagaaacactatatcatttttcattggacttactgtgaactgagatctcagcacgaagcgggtcatttcttggtggcctacttagtcgggattctaccacgcggatacacgctctctagccttgaagctttacagaaagaaggatctctcaacattcaagctggctcagcttttgtagactatgaattccttgaagaagtacataacctctctttcttctttcacatcctctgaagaagcagaaactcattcaaatccaagcttctaacacttttttcccaacttgacaatgcaggttaattctggaaaagtctccgctacggtatgttttcttatacttcccataaaaaagttctaaacctttttaaaatcttcagcctaacaagaaactgtgtttgctattccaaaaccagatgctgaacagattctcatgcattgctctggctggtgtagcaacagaatatctcctgtatggttatgctgaaggaggccttgacgatatcagcaaggtctcttttcttttaccccttaaaaactcttctgattatgtaaatatgctttatggttttgtggtgttgatggaacagttagatggtttggtgaagagtttggggttcacacagaagaaagcggactcgcaggtgaggtggtcagtccttaacaccatactgctactacgtcgccatgagatagctcgatcgaagctcgcgcaggctatgtccaaaggagaatctgtcggatcttgtatccaaatcatcgaagattctatcgatccttctgatatctagaaatacatgctctcatctattttctgtaaatccagcatatgaagaagcatttatataatacactaaaaagagctatctcagaaccaaatctaccttccccaagaaattcagaacatgagctatatgaccaatttattacttccaaatgttattcacaccaagatgatatgacaaggtagctatatacagatatataacaaagatattgtagaaaggttctttacaaaggaaagacatcattgctatcaccagcattatcatcatcctcatcatcgaaaagattcaagccgctaacatcccacttagcatcggtgtaatcgaagctcgagctgctcacataatacttaacctcatgaaacaagttgagattatcgaccagcttatgaaacacattacatccacaacactgcacgaagacagtgccatcagtgtaagcatgaggattaatagctcttgtagttctttgcccacatacgttacaagtgaaagcaacacgcattcgcctacgaggcgatttagtgaataatgaccatggaaatgtggaaaccgtgtctgtatcggttttagccggtagagacggtccttccataccggaaccggttgtccatcctttaaccgaagctgcactcaacaccagtcccattgcttcatcctaatacaatcacgaatttttgacctaattaacaatctcaattccaccaaaaatagagatcgaacaagatcgagatttacattggagagagttcgattccggaagaggcttgatgagttcgattcggaatgttgcggatcgtaatctttgtcttccttctctggatcaaagaagatgaaattgaaaacaaaaaatcacgatctggagattgatcggaagaaatggaaatagagaagtgtcgagttattgagtttttttcttactgttcgagagacggacgattctcgggggaggtgatgagtctgttcgcttctttggagagaatatggagagtggggaagatgaggaggagatgattgttgctgcagagcttagagaggtagcttccatggttgatcgaagaagaagaggcttcacacagaacgaaattttgtttttacttctctgagagagatatttgtttctatctatgagaaatttgcatatataacctttaaaagttataaattatgaaattatcaactaaaaaaaagaattgatattttatgtatcttcagtatatatgaaaaaataataagcaaacaaaataaatagtattataacaatccgttccgtgggactcagctggtgctgcaacgcatcaaccctaatctctttcctatgggtctggtaggttattggtgcgcttgacgttcctcgaacctaagtcattaccctttaacaacctttccacaagacaatctattaccaattaataaaagaaatgaatttcgatagaatatgttattttagaagatatataagaggcaaaaaatgaattgaagatatgtgatcattctaatagtggtttagagagtggtgaaatttaagagttacatgaagtgactaatcaatacaattgttagattttggtcaattaaaaattaattgttttagttgatttatatttttctgataatatgataatcatatatatgaaagttggccaactctctccatatgattgtcacatcatcacacaagaaaatgaaatatgtcattctacattatttaacaaaaaatttagcataactaattgaaggaaaatgaaaagtcttctattgtgttaaatcttccattaatatcacttttaactacctttttaaaactttaaaaaatacaaaatcatgctcaagtatcaaacactattttacaacttatcatatgacattttctttttttatttttgtgtctaatggtaaattggtaacaatgacatgcaagttcttttcatgtaatgaacttttgagacattagacataccaaaaagttgaaaatatgagactctttagctatatggaaagagagaaatctaaagtgtttaattaaatatgatatattttttttttttgtctaatggtaaattggtaacaatgacatgcaagtttttttcgtgtaatgaacctttgagacattagacataccaaaaagttaaaaatatgagactctttagctatatggaaagagaaatctaaagtgtttaattaaattactagcatatcatgatatggttggaacaaaattttttttgtttaatatcaagttagacaagttttaaaccacacaagtaatataattacatgctattgtatcaatatattctatattgttgttgtatgtatccatgatagtgaaaagattaggatcttaggtctataaataatcatatcattggttttttttattcattaatatagctgaacttttaaaaataattacaagtcatatttatgtttcaaaaataatgcattcaaatttatttatatgaaaaaatattatataaaatagtaacacataaaccggcacgtagtgcggatatttatctaatcttttactaataaaagatgttatttgaggcttctaaagctatcagcatcagcaaaacaaaaatactttaagagagtgccacatcagcgcatcaaattgtcccatctatttttaaaaattaagatgccatgtcaggtaaatatgtcaagaaactcatttacgagttcataaaacgcatcttccctcatgtgaacatacaactataaacctaaactcatcgtcttctctccttagcgtttaatggaccatcgatctccctttttgcgttctttaaatcagttaaagtgctgtcgattcaccaaaatctcagttctacattgctcaaatcgttcagcgaagatcaaaggccgtgatctgataccttttagtcggaaagaggaagtcgattccattaagtgtaagaaagtcgattctattattgctaagtttacaagttgattattcccaaaggaagaactcaatatcagtacgtagattatttcttgccgttcatgagctcacggtcaaagatgaataatgagatttgattgagaagaggatatttcagtctccaacatattccttcaactaggtagcttccatctctctttttctcattcacatattcttgctaaaatattaaaacaacgttagaagaattactccaatggcatatccattccatatgaggctgggaactattgcctcttacgtattcaaatgcgtcttattcgttaagtgagcaagggtttccacaaagtaaaattacaactcttgacttttagtttcaaacatatgactcagatttcaacagtgtcaaaaggcaatatgttgttatagaattgggacgtgaacgagaggtcatgaatccggacaagattgatagattagcaaagcacgaacttcccatcaagcttttttctgaactctgcttctctttttgattttggacattgacgtccattatttgttaatttcttctcatattatgtctaacaaaaattcataagtataatccctggttaatgattttgttaatgtcttctcatattatgtctaacacaaattcacgcatcaggttttgaaaccgagagtaaaggaacaacatcaaaacctgaagaaagatgtataagttaaagggcctagagacttgctaaatacctatcttgaaggtatatatattcttcatcgcctcctcttatttttcagaagaatcaagtttattgtttttgctcacttcgatctgtcggttaatttccacagaaacaatcggatattctcttagatgatatgatgatttggctgctatgtgggtttgtttgagagaatattgtatggttcttatcatgtagccacaagctagatagagggacttccctttctttgtttaactgacaccatcttcatagcaaaggctcaagaggtatattatttcaaaacaacaaaccgtaacaagtttggctatgcttaacgtagctcacattctaaaatcacactctacgagctacatatatatataccagttgttttatctcttttgtaaaatgtttgtaattatttgttgttttaaaatcatattttgaaaataaactaccataggttcgtttctctaaaactcttttccacaaagtcatctttagtatattcgtcttgattgcatgtttaaaatcacaaacgtcctctaacttgcattgatgtatatgtagatggcagtagcaaaagaatcataagcacttcataaaactaaagttgatgtttacgaattcgtttagtttttttttttttttttttttttgttgaattcgtttagttacgattgtcatctatgccaagtatatttcaggtttctctaaagttacgattggtaggtctcacatacaccaaatgatgtgcgttgaaactaatattatcgccaattctggtgaaaaaggaagcagaaacaaagcaagacgaaatatgatcgaccattctggtatggtttcgtaattggtgtttttaagttcatcaatatttgcatatatagtttattttattgtttgtttgtttgtgttaatatgttcaaagtattttttctaccagtgatttcttaatgacttatctatgatctctgtttggagttgtggttattagtttatacctctttgctttcttcttggacacatgcacgtattatgtgaatgtaagtgttcgtaaaaggtatataattaaaattgaatattgattactagatcgatgcaaagagaatttctttgtaagctcaagctttgttaccactttcatcataaatacgtatgttttgtttcatcattgctctcttttctatgtagattcatgttttgctcgatttccaaagcttagagttcgaggaaaatataatgtgtgctaaagttttgtctaccatctgtttgtcaaattgattcacgaaaattattttcttattttcttttaaaaccattttttttttaaaaccacttaattgataaactaataattctgtatttttgaatactttttgtttgttgtgtcgatcattaagttagaacattataatattactagatatataccgcggggtaagtttatattttagttaaactaaaatttcttttgaaagatgatttataaatatatgatattattttatttgattttcaatgtataatacactgcgagttgtatatgtctttgttgatattttttatattgtttagagtttaagattatatacttgtattttaattgttaattttagagtttcaactataatatatcatcttgtattaatatcgatctaaacccgtcaattctaggattttccagcttgtattaaaaattgaatcacatcatacacataaaaatatctaatatgttattaattattgtagtatataagattataaattttcaaaataatatgtatgaaattgaatataaatatttaaattatgacccgttactcagtcgaaagttttctttaatctatttttgacccgttataatatttgttcatgtattgaacagtttatattcgtttttaaaaattctaatcatggcatatgcgaaaaaattataaatttttttatataccgatgatatgatgacattatttgtttcgaaaaaatagaatcatataaagatgagaggtgaagtataataattaataaaaacattaatatgataatttagatatcaaatctaatatgttgattttgattggttacttttttggaaatttaataatgaatttcgtttttctaattaaattaaattaattaaaatttatatatcaaatcttatatgttgattttgattgtatagttttggaaattaataatgtatttcgtctttcttattaaattaaattagtatttgactttttaatccttaaagagatgaattaatttaatctttgaaattctatttctaatggcatacctatgtaattacttacaaaaaataaggttagtttttattatgtacttcccaaataatagtataggataagaataattgtttgcagaaaaattagaaaattgtaagattttctctgatttttttgtttgaaaatgagaaatatgaataattcttagaatattttgcaaacttattatatttggaataaatcttcaacaaaagaatatacctaacattttgttttctctatagcacattgatcccatcataaaaattatcatttacaaagcaatatctactagaattttctaaaaacaaaatgatgttcaatcacttagcacatctttgtcgttagccaagcaggagtcaccagtacctgtgtccgagtatctgagccatctgaagaaatgtcactctaaacatttcctcctcttgctgttataatgctccttaacaagtaattttcaatttttctttataaaatcactttttacatattatttgtagaataattggattgtatgccctaaatttaactagaaatttgatatgtacactacaattttttaaaatttgtgatatatctaattattatttttaaatgacatttttgctcataattaataataaaaaattctgaaaacgaatataaaataatttgatgaactagtttttacaaatattattaaaaatctaaaactatcaatttttgggttaatttagtaaatattttggataatgattcatttcgtattaactacgaattttagttatatataattcaaatttattttattaatttttttcatttaacaaatgttttgagagacaaatatatataaatacattatattgatttttaaattaattacaaatgtaaactcaataattataatttatttattgtaatataaattattaatttaaacgttatcacaaaaatatgtttgttttaaaaaaacaaattgacagtaaaaaagaatctagaatgtaaaaaatcagttaaccaaaatataaatcggttgttttaatagaagtcaacgtagatgaaaatttagtacaaaaataaaatataaatcaacagtttaacaaatcaatttttctcaacaaatcaatataaaattgaataaagtcaatagttataaaaaatcgactatgtaaatatcaataaaacaaaatataagttaactgtttcaaaataagtcgatataaaataaattaggtcgacaaaaattaaatatactaggattggacccgcactaatttagttttctgtatttacatacgtaagtatgtttttttaataacgggacgtattttacaattacggcaatgtagtatattttgatgtattttacttaaaaaatgttgtgattttgatttaggaggtgtatagtttaaaatcctatagacgatagaaaagtacatactgatattatgtaataatgtgtattatagtttcatatacttaaagtttaatcaaaatatagatgaaatgtttttatataaatggacaaagttgtgtagataatgaatgtttatatagtttagtttgctaatgcaattaaattgtaaattgtataatattgattcttaatttttatgtttgactcttttatatacagaattccaaaataagatcccagaaaatagatgcagctaaatgggtttatctttgacccacaatatttgatgatttgttttaataaaagaaaagcgatttaagaaaagaagacaaatcatcatatttctttatgatttagctgcaaattgaaattttgttttttggagtttgaaataactacctaacttagttaagataaaattttgctaaatgatcttaacgaatcttgaaaataattttaaagaaaaacaattcattttgagttaatatatttcggaaaggaaaaaaaattgtttatcaattttctacttttaactgtatttttgtttatatattaaaaatgttattaattattttcatatttaaaaagattagtcaaatttcgaaatatttatatagctttggaatctaatttatattgattgttccataatatgaaaatttacagaatatttttaaaaagagtatattttaataactatttttaataagattccaaagatttagatttgatttgttacttttttcaatgttatcggattttttgactgaatatgtgggattaaatgtttgggtcaaagtttattaaaactgggtctactttgcaccaacccgtttaaaataaataaatttaaccataatctactttaaataatatgggtaattttaactaccgtaataatgcttgtgaaaactttagttgatataatacatgaagtgactaatcaataaaacaattagattttggtcaataaaaaattaactattttaattgatttgtatttttttgataatatgataattgatataagacattaagtgactaatcaatacaacggttagaacttggtcaaaaagatttaaatggcttagattgattagtattttttattatgtgatatttgatattaaaaatcaaaagcttaaatcgatttgcaaacactataaaatggataccatgtttgaaaaattagatggatatcatcatctttcttttcttctcataaaaatgaatttcaactatggtagttcattttatataccgtctcagcaactcaaaccctattttaattctgagggttctcatggaaaaatatttttcgcaaccttttctacaattattttgcagataatcctttattttctaagaccatgttctgatgaagattttggatggatcatcctttgtttcagcgtattatgttgttatacaaatacataactactactttatccaacgaagagatggtgctgataaacttgagttacaaaaaataacgattgtattttaaatgttggcatacaataatttccagaacatttttcgagattggctacaacacaaatctttctagatagaaaagtcataaatgtgaaatacttttaggttttatgtcgtggaacaggtcttagatcaaaattctttattttatacatcttgttctttaccaacagctttatacagatcttcaactacactgctaacaaatctgtcatcttccacagagcttcttatcattttctcatagaacaagattcctttctctgcgtcaccacaagtcatatatccctttaggatcgtccgcttgcaagcactgtctggacttataccggcttcagacatcttgcagtatgtcctttcagcctcctccatcatcccagctttgacaagagcagagagcaatgaactgaaatggctgtgagatagcgggatgcctttctctttaacaagagttatcgttttctctgcttctgcaaactgtgaactctcagcatagacttgaatcagggtgaggtatgtggataagtcagtacagcgaccatttctctccattgcttgcaaaagttcatcaacctcgtgatggagtctactggttgcacatattttgaccatcatgttgtaactaggctgcaatattttcccagtattatagatttgttttcacccatagttagattttaagaaatatctcataatgttaagccactaaatagatgttacgaagaatttggctaagacctaccgttccaggtttaatccctttcttctgcatttcactaaacaaagacaatgcttcactcatctttcctgtaacagccagagaaagtttcatttgttaatgtaaccagaatcaagacaggtcaatgttacagaacattccatgtctgcgagaaactgtgattgataacatacacgtaacatatttataaatttcttgattagatacataccccccttgccataatgcataatcatgtttgtgtaaattttctcgtccagatacaaccctgatctgcgagcgttactaaaaatctcaattgctttgtccagctgcagacctcgcccatatacactgcatcaacccacaaagatagctggaatatataacacgacgaccaacttactggagtcttaaacataaggaagccggacggatgcgtttacctgatcattgtgttgtaggtctgaatcgaacaaggaacacctgaggtatgcatccgctcataaatttcagatgcacattgtagtttacctgtgacaacagaggtttgagtgttggttccatgtaccatataaacttcaactggaattgatagatcatatgttctgttgtacctgcttctagcattgccttgataagagtattatagccaacggtgtcaagctctatgtttttttcaaggcaggtccgtgatatatgttctgcttctcggtgtttccctgtgattatgataatacagtaacattgcaattaacttgaatacaatacgtatcatgtaacttaactctgcaagtagttgatggaaatgtaacagtcatatatcaattcataattttcaaacccattagaatatcttcagctcaaaaatttcaaatcttgtgctatagattagattatttggatccctgaatttcactgaagttttttgggatggaaggaaatgcaattttccacttgacatacctcgatttgttagagcattcacaagtatgctaatggtaacagctcctgggtcacagcccttttctgctgattccataaagagtccatatgcatcttcaagccagccacatctgacataagcatcaatcattgagcggataacagatttccccggagttttagattctcctgctgcaaggtaaagccgtttcgcttctttaagcttatgttgcctcccatatacagcaatcaaagtcgcgattgtttcctcctccatcctgagtcctagtctgataattatatcggcaatcatttctgctttagatacatcacctgcatacaaaatgaatgtaaatcttcaacaacataaccaaagcttgttaacatatacccatatctaaagaacaacgaaccagattaattttcctaccttctctcacaaagctacttatgactcgatttactgccgatgaaccaagatcagtcttgaacattaagttcaagattgctttagtctcattcaaatttccctctttcagtcgcaaattgagcatcagtccaagagccatgacatcaagttgactcacgtttaaaactgcttcatgtttatcgtgcttgttaacgatatgcatagactctgcaagtgtctgaacaaatctgttatccttaacccttgcctctctacccatttttactatcaaatcttgagcttctgctaccattccttccttgcaatacactctcatagccgtcttgtaaagctctatatcaaagtgcacttgatcaaccattatctgcttgataaaacccttagctttctctcctaaattgagtctggtatacaaattaagcatgtcgttacaagaactggcatcaggaagtccagtcttcgataaagcacgaaatgcttcctcagcacagtcaacattctgtatcttagcataacactgtaacatgacaatataggcaaatctggaaagaggaatatctcttgtcttcatcatttcaattacatctaatgctttgacaacatttcccgaattcaaatgaacttgagacattgccagatatgttttctcatcagccagtaaattcaggcgttcagtctcttcaaacatactctgtgcatcatggaaaagtccgagcttcccatatattctgatgatcaacccgcggatgacctcatcagctggaatcttatttctttccatgtctgcaaagagagagagcgctttcgggtagttctccgttttgtaatataaacttaacatagtagcacaagtatagttactcggaacgattccctgagatctcatatcctcatacaatccaatagccttctcccaatcaccagccttcacacttaaactaataaccgagctgtaagtcacttcctcggggacaaaccccaaactcttcatctcaccaaaagccttcaacgcctcctccttaaaaccctgtttagcataagagctcacaactaacgtatacgtgaattcattcggaggcacaccttcctccaccatttctaaccacaaatctatcactttaccatgaaaagatttcttctgaagagacgacagcatgaaattatacacagaagtcgacaaaagtatccgcctttcttgaacagctttgtaaaacgtcaacatagcactatgacgtccccatctagcataagtacacaacattgtaccacaagctacagcatctggttcacatccaacttcaagcatttctaaaaaagtctcctcagccatctttatcttcccaacttgtccatataaacgaagaacaatcgtatacacaaccacactcggacgataactcaactgtttaacacaaaaacctatcaccaaaacttcattaaacaacagaatcaagatcaagatcaaagctttaagaagagaatcaaacctgcaatttcatccaagagaaaaagtctctaacttgtctccaacctctctgttctttcaaaacaacacacatatctctaaaactcaacttcgctacaaagctactcatcacaaatctcatatcatcactaccttgtcttctctgtgacaaacctctcaccgtcttaatcgcagccaccacatgtttcccatacatctgaccattccgatcatcttccaaatactgaaccatttgctctggagttcgctttatccatttgggagtcattgcttgtgagccttggttccttcttaacgtgcttaagtattgtgctttcttctttatgattcgtcgagcgtcgtcgtctgataatggatgcttcggtctctcgtatctcggttttggtttttccgggttaccgtcgctgagtgaccacgggtcgggtcggactttggaagaagaagatgatgactttattgagatcctagagtttcttgagggtattttgggaaggaatattgaaggattgaagtgtgttgttgaagtgaggaagtcactcttcattgcttcttcctctcgaatttctccggccacaacctcgccgtatctacaaacttcagtgacagtctcattattttagaccttagattatccggttaaatcgatttaagtcggtttgattcggttaaatagctttatttccggtttatggtttatctcttaaagtttatattcggttatgaagtgatatcagaaacaatctttgtaaatttcgattggtttattcgatgtaatcttaatttttctcttgattttgtttcgtttattttcttgattaaaccataatttggtttaacgtggtttacgtttctcttccatccataattagctttgtttccggtttatgattatttttctgaattttataagtttaggtggtgttattggttagtgaagttgaagtcaactccattagagttgaagtttatcagattttaaaacatctgagttcatttaaactgaatcactattcattctgtcgtggaagtctattttcagtgatatatgatgtcatttggttttctaatagatatgaactctataacaaatgattttataatctaatcgaaatctaacaaaactttgaccagttttttatttttttatttcaagttttctagagttttgaagtttgggaataagataaagaatttattcataataattttggtgaatccaaattaaaaactttaaaaacaaagaaaataaaaattaagctcaaattattccataatggtttgaatccatcctagcctctcttccaccgacatgctcacgaaaacgtcttgtattcccaaatgataaattttcgtaagtgccttgtaacgaatacattcatccaagtcagaaatttcttttatagcatcccaaacgttattctttttctgtgccacttcattttgttgcctctcttctctttgttgtattatatccaaaattttactgctaacaaccatcataggactttcttctttttgtgaagtacttctctcagatcttgttcttttacgtgggggaagcttaggactttctgaagttccatgagacataaatggtgcgtagtgctccgatgactcatgatgagttgtagtatcatactcatacacgttgtcaaaatcatccacatattcttttcttggattctctccagctctgtacgtaagtccatccgtactatcacataatccaattgcattttttccagtagcaacaccttccccaaatatgatttgcaactcgtcaaaaaattcaaatgtatcataacgaagttgtttattgttcggatgtgcctacaaaaacaaagggacatattaataatatgtaagtacgaccatgttcacttaaaaaagaaaatgtgatacttacttttagatagtcgctccaaacttcatcagaagccgtaaatctttttgttaaaggatcccaaccaaaaccagaactaaaacgctgaagatcaagacaactttggtattgtatttttaaatacttcattctgcttaagtagtgattgtagttttttgaacgacaaaactctttgttgatctccggcataaacttcgtttccacggttaatttactgattgtgccattagaatcacgccaattattgttgatcccttccacaagaagttgcaccaacagcttagtctcctctggagaccacggattataatcccccttttttctttttttgggttgtgaatctcccatagtgatacctatgacaaattggaaaaacaaatatacgttaaaacatgaaaaagttgcaatattttaataaaaaataaccatacgtcaatgcaaaaaacaaggaaatagtgagacgggaaacaaaagttaactattcaaaagttaatcaatatcacacttccaacatatgattctgtaaataagaacaaaagaaaaaagtaagaacaagtgaacctttttctttgcagtcgaatgagcttgtatgcttagagaatgagaagagagatgtacgtgacatttatagagatagtgcgatcgtaaagatatacgttaatataacaaaaagattgtgatattattatgatgatcatggtaatatatattctaagtaatatgattctattctttagtagcaactagaatattatgatgatcaaagtaatattctaattgatatgatcctgtactttttattttaattgatatgatttgaataatgaacaatgttttacagtataactccaaaagcttagctgtaacatagatgatagaggtagaataactcgttcataattaatagtattaaacgtttacaaaagaatacatataaacccatacttcttaggtcaaggtataattattccaccaccgatatgagtagaacataatttaaaacgttatggtcaagtgtcatgctgacatcattgtcatttctgtatttgtatgtcttgtaccattttcccatggccaacttctcagtttctaattatgtcgatgagattagcccggaagcatgtcatatatcatttcacgacaagaactcgttcataataataataaaagaaagtgtaaagggttcaaaaataaatctttcagctcaaacacgggaaaagtgtctccatcaacaccaaagaaagacaaatacatgaactttataaaaagtgaattactatctttggctaccaatattagtagcatctctccacatatctgcagctatggtcgctcgccaatgtcttgcatgctctctttcttgctcttgggtttcaacattttcttcaccaccattttcttcagaattctgatttgcattgtcaacatctgtttcatcttcttcgtcacttgaaaattcatctgaccgacatttttgtcgaagaaagttatgtaaggcagcacatgaaagaactatctctgcttgggtcttaaaagaaaacggtggtgcagatttaaaaatcaagaacctagatttaaatataccaaaaattctctcgataacgtttcttaaagatgcatggcgaaggttaaacaattcattctgatttgttgggtcacgtccttcaccacgaaaatcttgtagatgataacgagtacttcgtagtggagctaagaaattacgtcggtttggaaacccacaatctgctaaataatattttcctgaaacatggaagcacactattagaaataaattatcatatgataaatcaccttttagaacttgtaatctattaccttctggaacttgcaatctattagttcttcttgttaaagcatcttgtagaacttttgaatcgtgagccgaaccttcccatccacttagaacatatatgaactcaagatcaaagttacaagcagctaatacgttttgtgaaatgactccttttcgattacgataactagccttttcaggaccttgtaccattgcatttatgtgtgtgccatcaatagctccaacacagtcctaacataaattaaaaactgtttatataagacttcaagaaatattattcacacaaaaagatatgtaccttgaagtaaggataaaatcttgtggttttgcttatttttgagggcactgtatttgtaaccttggccatcaatgttggtgcaagcatgtttaaagctctgagaaccttgtggaaattaatacttgttgaaaattttgatctcttgaaagtgtccattgtgtgacaatatcttgaattttggcccactgttatcaaaaaggtagcaaccatctcctcgacacatacatgtggtgtacctttcaaacctgttttcatttggagaagatgacataattccgcaaaaacctcaggattcatacgatatagttgacgaaaatgaataggatcatctttcaaagccttttgtatataagcgtgtcccttttttgtgatttgtcgtcgcatcggacgtgggatttgactttcataagcatcaacggatccaaccaccatcaataacataatatctacatctgaatcatcttcctcacaaagatttcgttccattataaaacctacaataaaaatatatataatagtatgatcaaaagtgataaaagtgactttgttctcaagcaaattcacgagccatgactactataatgatgaaaagagatagactttaccgtgaaagggaagaagaaagaagaaggagagaagaaagtccgagatgtaacgtgaacctagatgtggaaggaaaaagaaagtttttggcaaaggaacaaggcaatatgtaatattctcatgagactgtatgattgtgaaaatctcaagatacaaggcaatattttgattgctataatttacacatgaaatcagtttgagattcattcaaatcttttcaaataaaagtatttgtgaaaatctatcaaacatgaataacatgaaacttgaactaatcattgtgaatatgagaaccaataacattagaattaagactctagtaatataaacattagaaatatgaaaaccaataacacttaattttaaagtcttttaatgaagatattgtaagtataagaactaataacacttgatttaaataatggatttaaaatcaatgaatgaataacattagatttgggttagagtttaactctattaaaatccactaaccaataacacccccttaatctttcttttttaacttgattatattttcttaagacttgagagcaataatatttaccaacatgccaaaacttactaatgttgttgtctcggtatagtctgatcttccaaaaacactaactttagtgtcgcattccagagatgatgtcccaatatgtgcgattgacaaaagaggaagagacctatgggttctttaagttgagacccaaaactgctttaaggtcaagctcccagtattggccatctccaaaccgtgtcgctctactctcgtgtctaaacgcaggaatctgatgcgagaatcgacacacttcagtctttggaatgtcaataaaacttgcgtttgactcttcactccttctgtatagaggcttgttgttaaaccctttagcagtcaaagtcattgcttgtatcctctgctcgtcggtttccactacttctacaatctcaagttcttccgtctcagtataatctcttgtgttgcagttcttgtacagagcccagatctcacccttccctgggtatacttcgaatctgttcttcttagtcttgacagctttaacctgatgtgagaagctgctaggtacatatacttcggctttaccggttttcaacttgaagcggccacagcacactgggcgtggcatgtgtattggagggcgatacagctctagaggtgctacatgtaacttgaattcaggacttgtgtcgattttcttgatctgagcatactttctgggactccctttgtcattgctgtaaatagcccatatttgatcaatctggaatttgtcccatgatctctggttctcgaagttaaaagtgttttctttcacggttttgcaactagatggcacgcgagtctctggttctgagcttttcatattaccatttaactgagtcagcaaaccatcacccctggactgagacaatgactcatcatttcttccatgtttctttacgttcactgtcggtttgtgtatatcctgaggtgtttttctcattcttgtgatagtcttctcagacatcttctcaccagataaagacaatccacctggctttccacaggattcaccattgttagcactcttcttctcagctatttgtcggcctgaccttgaatttgcttgactgtttgtttcactcaaaagacgaggagattttcgcagattcaaggcatctactgctttgacactctttctggactccttcgctgagttcctttcatgattagtgcgtctaccatcagattctttggagaatgaaccatgattatcatggacttttggacgtttctttttaaatggactgctctctctggtagtgtttgcctgcatttcaaccttggaagcttcaggaaaaggaccaccagttttaccattcggcaattctctatccaacccaacatcaactttagaatcataaacctcgaacaattcttttggtaaagcagcgggatctaattcaaagcacccaggaggaacaccttctctctcttttccagtcattttgaatgatgggactttatgtgaaaacctgagcatctggcttggtggaatctgaagttggagaactccatcctgtgcatcttggcgaaagagggaaacaaacccttcaacttttcccagaaagcccactccaaggccattctcatcgttaaaattagacaaaacttccacaaaatcatattcataaggatgtttatgattttctgagctagcactccaactgatatcccagcctctgaaaattgcccaaatttctccctttcttggatatatgacaacgctattgttgcgagttaagtgaaacatctgacaagaaaattttaagtgatcgttctcttcctctgaacccccaccttgaaagattccacaagcaatggggatagagttatctttattatcctgaagcgggtcaatccacgtaatccacaacttgaactcaggaaccaacactttgtctatccgagcatacaaccgaggcataccatcaatcggatcgtacatggaccacacctggttgacaccaaaacagcttgttgtcagttcaaaattactgaactctggatcaggcaaatcctctgtaataagattttcattaggattgtggttattgtcaatctttgcttccataaccaccccttctccacttgctttacgtacttccctctctttgtctttgacagatgagatttcttgatatccagaatccacaaatttcttagcttttcttttaaacgcacatgaaggggcagatgaaccaccaccagaatcaaaacgtttagatgatccaacacctactaatccttttcttgtagtttgttcagatttcaatccgacatttgatcttaaccttttttttggagggcctagggaattatcactgattttctcctcctcagcgtaagaactttgttggcttctccttggagatttcctcttattattatcttttgaatacgctttatccttaataaaatcagaaccatcaacattaatactctcctcaacaccttttttcatcttgttcttgtccttgctcgtagagggtgcttcatcactccttgaaactgactcatcaggtacagattttgatgcgcctatttcaggttctgtaacctcaggatgtggcttgtgtagtttagctgcactcttcatcttttcctcatcatcattcctcacgaattcagtctctattttggagttttttacttcagtttttttgctctcacctccaccattcctcttgttgaatttcttgttgaaagttcctttcttatccacctcagctgctacacttcctggttgagcaccaatagactccccatttgtattcaaggatgtgttacagggaccctgattttgaacttctttttgaccagtgtttgatttagatggtgcttcattaaatccagtgtcgtaggccatgtaggatctttgacaaatgttacagttcagaagaatgttcacatactttctcaaatatttatacctatagccacaatgctcacaacatgtccaaaatgtatcagtggcactgtttgtagcagcacattgtagaccagagtttgcattcaactggttagtagccaaccgtaaatagattctgcgccttatatcatactgagaccgtttatccttgtcagcgagaaatctgctagcatcccaaaccagcttgaaagcagcctcagcaccggggaactggtttttgtcaggatggagaagcaacgcgagcttcctgacctgcttcttgattgtagcatcgtcagcaaaatgcataacttgaagaataccgtaccagttttcaagacagttgattttcttctcggcagaattatggacatcacatacagctaacatttgtggtaaactctcaagacctgaaaagagactctgagccttcaacaaaagcttctgagccccaacaaaatcaccttccttcatcttatcctctgctaatgtttttgccctacatgcctcttctttattccagtccattttcaaccaagaaacctcttgaatcagctaaatttcggatatcagaacaacaaagacatcaaagacccaatatctcattcctgcaaacacagaagtccatggcagatacattgttaatatatcacttcccaatcccaaaaatagctggcagtgaaaacagaaaactcagcttaccataaaaaagacaagaaaagccaaatcattaacacaaatgtaattcatccttcatcacaagcctctctacccacaggacacattggaaatgtaggctatgagtagtaaagttcaatagtatagacctgcaaatacaaagaaggaagcataaagtcatgtcgatgtaaaacacaatatcaatgctgacaacttaaaatcaagtttcaatttttaaacacaatagcaattatgtaaaagcaccgatttttcttctcccccttttctcggaagcaaaattctaaacaaaaatcaaaactaaaacttctaatcggccaaaaaaagtacgacggtgatacacaacaacaacaacaagtgttaaaaaacgagataatttccaatgttaatatacaaaattgggatcacgagtcgtacaagggagaaagtaaaagcctagaagaaggacaaaaaatacaaacccagaagcttgaatctcgaaagcgaggaaggtgaggagacgttcagaagaaactgagaaaccctaaatttggagtgaagagggaactgagaattttgattttagagaggaagacctcagctgagaaagtgagtggtggatcttttttttagtaatttcttatgtgttgttttttgtttctactttagtccatgtttttacttatattattctttttaccaaaatttggcgattcgatcaaaattatctcacttgtactacttttcagttttcacaatacaataaaacagattttgaatttctggcatagtctggcttctatctgtcttcaatagtatagacctgcaaatgataatcaacatctgaataaattaagtgaaccttcaatttacatatttaagtaattcaacaacatttctgtaaatttacaaggcatgtcttgaatatttttattttatggtgtttataatatgcttaagcttcaatctcgtctagtagcttaacaaaaaagaaaaataattatagtttatatactgactagataagacctgtctcaatagaccgacataaaatataaatataatttttatcgatgatatttgaattctaaatagtaatctatatttatcctaatatttcattagtaatattatttttaatcaaattttcaatcttgtacatttcatattgatatacactttaactatgtatttaataataataaataaattttaattctacacactttattttattaatgatatttgaattctacgtagtaacgcacacacattttctatatttaatttaatattttttaaaaaaaccaaagtttaatcttacacattctatttttaaaacttaaccatctattttatcataataaactgaatttgattctgcactcttcatcttaatcgataagtgttaaattgtttgtatcaaaataaaatgtatacataccaaatctatatcatagttaatactaaaataattatctatatgttgtaatctcaaaagttaattttagttcatgtcaaactaattttaaatgacttaaaattaatgagtaaactataaaaaaaaattaactaacattctcgtcgagtcatcaaaaataatttctatcaaccattttctaaatttatggtgttttcacttatgaatatacgcgttaaaattcttagaagaagacataagtataactatactaatattctctttaaatattcaaaaattctttcttagaagctcataacttcttcaataatttttcttttctttttttttactgcaacttcgtcaataattttgtgttttcatttaacgaataaaaacattatacaatgataaatatattagtccaattaaattaattttaataacttatattgttattttgaacttcaatagtcattgtttattaattaatatccatgctaaatattttttttttaaaacttaatacataccaaatgtagtacaccaataacacatatgaatattgtttgagaaataggtaacccaaaaaaagctttatcaataaaacaccaataacacatatgaatattgtttgagaaataggtaacccaaaaaaagctttatcaataaaatgactttgaagcaatgatggtgattttgaagagtttctttgtttggtgagaatatatgagactatttctttgtttatgtagaggtgagtatttaaaatctctatctttctaggattgatggtaagaaaaattcttatttattgtattttatataataatattatataatttcttaaatccttattaaaatttgaagaaaaaagtaatcatttttcttttagaataagtagtttcaaattaaataattggtaaatgatttttaatttccatttttatttaataagataaaaataattatcttctagacattttttattttatttaagatatacacttgtattttcaatttttatttaataagatacataaaatttattataattatcttctttacattttaaaaattgtttatataagatatatatatatatatatttcacttataaagtttaactaaaaagttaattctaattattttattatattttcaacactgtttaattttctaatatttttctttttatattttaaaaatagataatatgattacatgtgtcaaaaatcaatagacatgacacgtggcaaaatcttatgagttactaacttcaaaaaattatattttatatataacaagattggtaagtatatattatcttaagaatggactaagtaaactttacaatatcaataagaaaattaatggtattttaagagtcaacatttacattaactctacaaactaaatgggtcaaagatttgtttttttatttgagtcataaacttatgttgactacctaatttaccttattaaatatggaaagatattaattcaaaatataatatatttaaactttttggttcaattatttttgaaacatatacaaaaagtcaaaaactaaagaaaaaaaatctttgaaattatgaataatctgttcgttttggtcattattattgttttgagtgcgggatcgaacaatggtagcaaactctttccaaaaaaccaattatactttagaaactcttttaacaggaattatgatattcttacggttcattgcaagtcagataaagatgatctcggtattcacacagtggctcgttcatacgtatatttttttaagtttggggatagcatttttggtgatactgagattgtatgtacactaaatcatggggttagtgctaccaaatataaagtaacatttactgcatataaagagagtcgttttgttataagatttggcgccataaaaatctgggaggctagagatgatgggatatatctcacagatgaagatcacgatgcagtaaaaatgtatggttggtaaaatcttagttttcaagctatatgttgtctttaattttgatatcaatagattgcaagatataaattttaagaaaataaaatttaatatattgaattttcaaaattgtatgcaaaagcctaaaaaaatttgttggtaatctatgtgatatgacaaatcccaattcacaatacatcacataacaaacacaattatttgatacactgtgaattgcctataacatagattttttagtctaccaaaaaaaaaaataacatagattttttaattaaactgaattaatttatagccaactaaattttatatagatagtagataaagccctcctaaataggcggaagttagaaataaatattattatgtatccataatatttgaaatctaaataataataataataataataatatatgtttttcttaagatttaatttagtaatttttcaaactaaatttcaatcttatccattctgttttgacaaattgctaagaatgtcctttcaacagtattccttttcaattatgctccttcttgttgatcactttcatttatacactcttttaattttttatgaccatttaataattatatcaatcaattgatgagatttccacacatgtacatatataacaacttctcccaattaaaatttgacatatgcatgctaacataaaaaaatgaatcattataaagtctttaaatacacatgtaaataatttaaaaccccttttaaaacctttgtaaatattttcaaattttaaaggattttaaaaacctttctaactccttttaaaactcttataaactctttaaaatattagtaaatcatttttttactcttaaaatactgtttttaaatattcgaaaatatttgtaaatctttttgaaccattttaaaactctttcttacccttacaaatggttttaaaaagatttaaaagagtttttaaagggttttaaaaggaattataaaggttttaaaatcttttaaaacctttataaattttttaaaactcttaaaaaatcttcgtaaataattttaaagtcatttaagtttttttgtaaagtttttaaaaacactcgtaaatcatttttaaaacctcttgaaatccttacaaagcctttaaatacatatgtagatactttaaaacctcttaaaaacctttgttaatattttaaaggttttaaaatgatttacaagagttttaaaaagatttacaaggattctcaaaaaaacctttgtaaatccttttaaaacccttataaagtctttcaatacattagtaaatcattttttaaacctttgtaaatagtttaaaacatttgcaactcgttttgaaccattttaatagctggaaattaattgttgtaagtttgtagctgtagatgtgttagctgtagcggtaaatgttttagttgtaggattttacttctaactttaaaaagaaaactagattttaacctgcggtataccgcgggatgatttattttttaaaagtaatatatattaaaacttgtaaattttatttttataaaatatttatatttttacagtttataattattattaagtatttatatatattaattgttattaaaaaataataaattaaagatttaacccgtattgaaacggtggattaattatattttactttttattaatgttgattcaaaaactcgtcccttcaaatccgtcttgccaaaaagccatttattttattaatattaattttatttatgatatgactctgaattataatctaaacattttagctaataacataggagtgaaccatatttatttaataggggaatgtaccatatgacccgaatgtacttttacccaaatccaccaaaaaagtcttgcaaaactactatagacccgaatgtaccatattttttgtgctaatttttatgtgattaaaatttaattgatttcgtatataaaatattaaattgttttacgaacttatttgtttataatttggtaacagatatagatttgaatattcagtatattttgcttcagtttaggaaatctttgatgacccgtctttaaatccaataagccctataattaagagatgaatattgtcgttaaatgattttggtaatcttaatgatgtcattaaaagattttgtttttgattaaatttttctaatggcattgtcatataattaattacaaaaattaaggttacatttaaaatgtacttcccaaataatatagtaggacgatatgcacttttatccaaatccaccaaaaaagtcttgcaaatatactatagagataagaaacgatagtcggttttgataggtataagattagcaaatatattagttcgtttaaattagttaaagaatacaaattgaaatggaatattacactttattcgaatatagtatcaaaacttatatagagatttgataattttttaattgttgaatacttttttttgtgctaattttatgtgattaagatttagttgatttcgtatataaaatattaaattgttttacgaacttatttgtttataatttggtaacagatagagatttgaatattcagtatattttgcttcagtttaggaaatctttcatgacttgtctttagatccaataagccctgtaatctatatattaacctacaatataccgtaagtaggcttatattttagttcaactaaaaacttttattgtaaagatgatttaaaaatatatgatattattttatttgattttaaatgtatagtaaactgtgagttgtatatgttttgttaatattatctatattgtttagtgtttaagattatacacttgtattttgattgttaatttaagagtttcacctgtagtataccatcttgtattaatatcgatctaaacccgtcaattttaggattttccagcttgtattaaaaattgaatcacatctaatatgttattaattattgtagaatataagattataaattttcaatataatatgtatgaaaatgaatataaatatttcaaattatgatctgttactcagtagaaagttttcttaaatctattttcacctgttataatattttttcatgtattgaacagtttatattcgtttttaaaaattcaaattatggcatatgcgaaaaaactctaattatttttctataatgatgatattatttttcggcaaaaatagaatcatataaagatgagaagtgaactataataattaataaaaaattaatatgataatttagatatcaaatctaatttgttgattttaattggttacttttttgggaattaataatgtattttgtttttctaattaaattaaattaattaaaatttagatatcaaatcttatatgttgattttgattggttattatttttggaaattaataatgtattttgttttttaattaaatttaattaattaaattagtatttgactttttaattctcaaagagataaattaatttactctttaaaattttatttctaatggcatacctatgtaattacttacaaaaattaaggttacatttaaaatgtacttcccaaataatatagtaggatgaaaatgagtagtatttaatattaaatatatgtaattattgtataattttaaaaaatattatttcaaatagttatattaaatcagtaataaaaattatatttagtttttaatataatatatattataaaattgatataaacattcaaaatattacttgtaactagggcgaaacccgagccaagccgcatgcttttttttaatgtaattttgttaagttgtatgtaggtattgaatgttatttgtcataattaatgatatatgtagaacaaaagaattcattaaaaatgattgggaacgcaatgcatttgttgattttttttagaaagatctatatagcttttataagttttggaagttaattttttgctttacgaacatctatttagaagagtcattaaaaacaaaagtgaaaagaattaaaaatcaccgggcgctaatttttgtgaggttaaagtcattttagattcttaagaatatgttatatggagttatcatatttgattttaatgttccacatgcatacttgattcataggttgaataggcataaaaagctaaaagatatgtttgtttgtttttcagaagttgaaagttgaaacttttttttataagagtatagaacgtactcaaatgattgttagttattgattaagatccataatgacgttaagtaaatttgataagatttttgaatattttgaggaagaaactcaaaaatctttaatgttttttctttaagtttcttcttccattgaccttcttcctcgatatttcctttttgctaagacttcattcagttcggaaataagctcttgaaccaaaaaaatggataatagatgcacgttaaagaacaaaaaaacagagacaagaataaaattgatcattggagatttgagagtaaccatacctcatagataaatttaattagatcttaaagaacaaacatgacatctatgtcgtaacaaatttttgcttgtttacacattacatcaacaatgtcacctgtaacattttttcagcgtaagattcttttccaaaactttcatatatgttagtgatttctattcttaatacgctagtttttttctctatcaaatttatagcgtcaaaccaaactgaagaatgataaaatactaactaagtattgtaataatatttttaatccggaagatccaaaaattgatttttttttaagtttgacatattcttttcttttttttgtaatttgcatattacttaatgatgttttttatgaactaaatgcatatttgagtataaaatttaattagtttgaataattaggaagaattttattttattataagttatatttaaatttcataatttatcataatagtataatattgttttggtatttttatactttgtataattatatattatattttttagttatttttaatttaaccgtagtaccacatgttagttaaccagtcataaaactcttgcaaacgctttaacttttaaccattaaaccagtggttcaaaatgtttcattaagcttgaaatcgcaaccgcccgcttccataaactcatgcattaataaccgcaaacgatgtgtttaaatcagacagacccttaatcattcattttggttgggcctatgcccatagatttgttctcaagattatttttttatttatttggttagattttataattataattataatctatatttgtcaatatcctttatatattaattgacaaacattttgttaagataactttatcctcgtaggtgattaacgaaaatgtcatgcttatgcgtcgttctaacagaacttctcatttccatttaattaaagatccaaattttgttaggatatttacagattttgccattagttttacttatgatttttttctccaattaatttatgcttttgaatttactcacttatattaaaacaaaaatatgattaatatatgcaattaaaatatataaatctatacaaaaggaagtacttaacattttgtgtatctattaatataacaagatatatatatatatatatatagcataacaaacataaatattagtaatacataaaataaatttttctctaatcttgataatcattaatacattatcgtttatctaacaatataaaaatcgaacacctttattatcatcaatacactaaacttatttaataattgttttatcccatatatagtgcgggttgtttatcaatttaataagttattagctcaatggttagatgaatcaaatgtttttttaaatgtctgccactaattttgttttcaagtacgagataaaggttttgttttgttcaaactaaagttactaaacacacaagacaaggaagacgacccaaacaaaaacaaaacccaaaagattaaaatgaacgtacaaaagttactatttacatgtgtttttatcacatctagtttcacactatataaccatgacatttgattatgactaaaatagcggaggtgaatcaaatctagcaatcctacaaaaaaaaagaaaaaaaatcaagagactttaatcctccatgaaccctaatagtaaagtagcggctagtagttcctgtagcgaggatctagcggttgataaagatggtaaaattgaggtccctctggttgtccccattggttattattgtagtcggggttaggaaatccggtgaaacctctgtcgtagttgtcgaccggccacgttagtctttgattcagggaatagtcatggctgggatagtgattgcttgtgtgcgaagcaatgtgtcctgagctctgattgtttcctgacatgctgcgttttttccctctcttattcttctttgaaaacggtttgctcgcagaggaggatgcagcttctgttgaaggttccaaaggtatgttgctagtaacaggagcaacctctgctacagttggtggttttgccgtctgagattgtttgattgtcgaatcgggtttggacgatgcggatccggatccagatccattagaagtgtttcttctgagcttcaaaagcgacttgatttgttcttcaaggtctccgagttggaactctgattcgagtttatgacacgatatgcatttaatggcggctcttagtgctctaacctgtctgtctatggctgcaacctgtaaagtacgctttgtattacaacaatctctatttgagttttattgtgatacaagaagttaagaacaaagaaaaggcttaaattttacctgcgttgtagattcgttcttggcttctctatacgacttctctgcagattcctttgtaatcctcaaggaatcgtttatgatagcggatacaggttggaatctatggaccataccaaatgagtatatgtagtctattgccttgatacgatgtccagtttttatgagattttgaatgaaacctgtcgaaacaaagcccatatgaacaagccgtcttcagtaaaatggcatatgttaaaaggattaaacaagctcacagagttcagacatttttaacagaagacatcttgttcaacaattgaatctataggcctagcggttagcaatagcaggagaatagagaaaagggaataacctggaatggcgtcgtccaacccgagaaactggcaaagatcaggagacacagtttgccaataagaattatccagtagaccaagaaggtcatcagccttgaactctgacacaattccaaagataccaagaaactgtaggaagcagatgacttctaattgatctcttttgctctttgcaattttatctttccagtaaacggcaagtttcttcgcatcgcctttcacaggatgtccaattttaggcaggagcttcttcagctgattcaacaataaggagcagctagctgaagtaatcagcatcttgaactcgtatcctccttcggtgtttgtaggacacaaagccatggatgtgtctagaaaaagctttgctggatctggtgtgcatttgagagcatttgagagatcctcactctccttcagaggttgcttttctactagctcccttaacatgtccgccttaatggaaccagagagaatgttaagcttggtttcggtacctgatggatgagttgctatggtgtctggctgatgatctgcgccggattctttaacttgcttcccagtaggaacgcacacaacctcgggctgcttcactggatgatttaaaggcataagcaaactttaaggtcgatcacacatatcttaaacaaaagaaaaatgttctgattgaatttatgtctcaaagtttccccaaagacaaaaatagaaagattcattacagaggtaagctctttgtgcattttattgaagcaaactaagccacagaaaacagacactcaaaagtgttacatgagtgcaagccacaggaaagcgaatggcgtagaaatgtagggcctagctgctaattcactagtaaggttgatacatacctgttaaattctgagaaggagctgttggttcagttaatcttggacgtttgattacatgcttctgttcatatggaatactagatttagcttcagatttctctacccctttggtcgtactctgtcttttttcataacttttttgaactggttccattgctctctgagctgattcatcgttcttcactacagccaaccttttaagaattttagcaggaaacatagtctcggctttggcctctttgatgtacttaatggccatggctgcatcagcttttttcttctccctccttgctttctacaacaagtcaacaagcttaataacctcacatcgacataaacacacatcataagccagattgaatagagcacagagagagagagagagagagagagagagagatattagcttacctgcgcctccattgaagttccagtcccagcaatcactcgggcagctttatctgaggaatcaaagaattcaatcaaaagttctcctggtcttcctcctggacaaagcttgtataaccggaattcacagataaatttcagtgttgcaagatactcttcctttttctttagcgtttcaaccgcacctgcagagcaattcacatgaagttacagatttttgggcaacaactactgatacttagtctaaaaacaagaagcaggccttaccagaaaccttctcttctaaccccagaagccgaaacagttttggggcatgatcatacaaaaggaaccgctctacaagggttaagagcaccccatgagtagtcagagagcccaaaccgtaagcagccagaaacaacgcacaaccaaaaacctgcggggggtcattcttcatattggctttagccttgcctaaccaagcaatcccaagtggagtcgcttcctgtttcacctgcggtgtgattttcagattcatctttatcagattctctaacagaacaatccaactattaactactctatcatcagcttctcctaaatctttcttccagtattccttaaaagacccttctatagcatccaaaaccacctttgcaggatccaaatacggaaccattctcgccaaggctgtgtttttcttaaccatctcatctgcattctcgttcaggtataaagtcgaacactttacaggcattgtcacacttaagcccatgttcttagccaacaacgaaaccaatggctcaaactcacctctcaacttatctccagcgacaatccgttctctatgcttctctacttcttccatcttcaattcaagctctgttgctctcaaaccaagttccatcaacttctcatcagaaaccctctccaccgattccatcctcgtcgtaaacttctccaactgttcaacttctcttttcctcttctcaacctctgccttctgttccaaatcaaaatccttctccttcttctcaaactcgctctgtttcgctttcatcgactcatcaatcaaacaaagctccttctctttcttctccaattccaaagctttaacctttatcgattcctccaacgcttctagctccttggctcgttcctcgaggacgcttctcgtggaatcgaaatacgattcgatctctttccattgaattgtaagtagaagaagcgaatgagcaccttcttggagagattctagggttttgcggaagttacgcttgcttatatcaacaagctctaagccactcgttaccttctccatcaagctactcgttaacaataaaaccctaataaattcaccacaaaaacaaaaatcaaaatcaaaattctcttaaacagaagcagcgaactttgaattcttcactttctgcgttcactgttctctctcggcgcctgaatgttgataatatttagagaattagggtaatttcttttatatcaattttatttcctttttatatataattaaaatagcaaaataggaataatatataagatttaatcggaaaatactcatcagtgctcagcgaggggaaattaagaaggaatgattatatttgaaagtgttttttagtatatgaccctgttcatttgtacatctgtataatgcatcgagatccaaatgatccatttagatgatctactttagatggaaaaagcaattcgataattttttattttaaatcgtgatttaatagttttggagggaaaatatgattacggtttttgctggaaaacgtaattccacaatttttctgctacattgtgatttttctagttttggtgggaaaatataattttacggtgttagcgagaaagcataattccgcaattttcattctaaatcgtgaatttatagttttggcgggaaaatatgattttactgttttggtgggaaaacgcagtatcatgattttatagttgtggcggaacatatgattttacggtttcgcgagaaaacgtaattatgtaaatttctcgctaagtcgtgattttataggtttggcggaaaaatattgttttgcgaaaaaatgtaattttatgattttggcggaaagttaattctcttattttttgtgggaaaacacattccataattttcccgccaaaatcgtaattgtccgttttgttgaaagttgttatttgtggttttacaatttttagagatttttaaaatataaaatgagaaaactataaaaagatattaacattctttgatttctgatgtaattctttagtttaatagaggtattttaataatttgcaatttttgactaaggctgatggattcatcatctaaactcatctgaatgcatcttataaaataggctttttcggatgaatttgtcaaacgcatctggatgctccatccaacttatctgcaaaaatgtacttaaacgaacatcagtttgcatctacagctaaatgcatcagtcagatgaggaaactaacaatctagaccaaagctactacttattcactttttagctactagctaggctatctttaaccctagataactagaatctgccatagcttgatggattggagcagattgagatataaggtcttgaagatcgagtttggagaaactataaaaaaaactaatcattctgaaacaaggatgttccctctgcatatactttttacattagactgtagaaggagattaagagctactattaaccataaaaccaatctagaccaaaactactacttatttactttttaactactagctaggctatctttgaccctagaacactagtatctgccatagcttgatggattgaagcacggtctaatcacaggtctagaaaccgaaggatccatccttgttcgtttgtaacctgtatggtgtgaagattgagcttggaacgcgattgaaccaccggcttgatatgtttccaagtctaggacctgttgatttggtgatgtaccaaggcttgttggaaaggtcgggtttgagccatgagatgcctgcatatgaacctgcggagattgaactgggacaaatgatgagacgacatattggttctcattttgattttcccgcggaaccatgaacttgacgataagttccacaggaagatcaatatccagcttgaagtcttcaataagttctataatgtctttcagttttgcagcatctctgtcttcagcctagaagtcaacatagaatacaacaaatataaaccatcaacgacaattgaatatacagtttgggaagagattgtcaaaagcaagctttaacctgtgaatcaagtcttctcttttccttggtagagactctaagagtgatgatctcgtctttcaataattccaggggagaaaagttgaacttcagcttgaagtaaaagataaaccggattgccataaagtaatggcgttcatctaggagttttttaaccagatctgcaaagacaaaaacgagtaaaatatacttcattatttgagaatcactactgcaaggaagaactgttaaaaagaacagacaactatgtcttgcaaaattaaaacttacttggcatggcataactgagaccaagagattcaaagagtttcggagcttgtttaaagtgagcaacatatgaggcaaatcgtaaagtattatcttgactggttgcatgcaccaatccatatgccacaataagttggagaaaaccccaagcctcaagcggtgacatttgagtactatttcccatcatccagctccatcgagttgccacttgtagtgcatctgaaagaagatgtttgctagattttacaacacgtggtagctcctccaaaaggggaatcaaagtcttaattacaggctctgctaaacccaactctcctctctgttgagcacccaagagttcatcgttgacaacatttagaacatacgaggctggatctatcataccttgaagtccagtaaagacctcattgggtgaaaaggaagttgagccctcagggtccaaaagaacatctacattacccaaatgagatgatgctatggtttcttggacattcgtgctgcgagaatcactgctatttatgattggtgcttcagggggctgctgttcaggcttatcgtccaatgatagtacattgttgactgggaagagaaaaaaaacttcaataagcatcacaagactatatagtagaacttgactgttatttcttaacggtctacaattttagtattggtttgcttatagcagaattagaaatctagactatatgggatccgggtttaaatgaaactttaaatggcagaacaaaaaaaaattatgaaaagaatctttatgccacttgaagagaaagagacgagggaataactgaatctttttactgagaaaacttaccaggtgctagagatgatactcctagagcctcacatagactcggagcgtattggcgaagaaaggcggcatcaaacagattttggactttgtcggcatcaaaagtgtaggccaaactgaatgcagatagaaagtggagaaaacccaaaacctccactggattctctgccttaaccaatgttgtgttcttccattcagtgactgatttgatagcttctacttgtacttcagtcttgggctctggtgacatatccattaaacattccagcaagcaaatactaccccttcttacactatctggatcaagctttgttactgccatcttttcgtgaagacgttgtattgtgtttaacacaagctttgccgggtcagaagatgcttttagagcacgcagaacatcgaggtgaagctgatcacatttcttcagatgcccacgtaagagtaactgcaaagttttctcgtcacatacactagcgtctcgcaccaagtcaacttgttgatccgggttgttttgttgacaaaagctggccaatttctttgcattcagctcatattccttaacacatttagccaacttttgttctgcggatttcagttgctcatcttttttatccaacctttcctcccgagcatcaagcttcttatctttcaattcaatcttttctgagcgaacatgaatttgcttcttcttcagtccaagttctttctcatgttccgtcaatgattcttttaatttgacaagctccgcctctttagattgaaagtctttcaagctgtcttgaatctttttaacctcttcttggaaggactttaactccttctctttgatttcccagttttggaggcactctcgatatgtatctttcacagagcaaagttcattttcctttgaaaccaattctgcagtggtttcttctaaacatttttctgtcgaatccagttttgtctgttttgaatgttgtttctcagagagttgctggatagttttctctttagagacaatctccaaggatagtttacgaacagcctccgctatctcattgtgtctctcttctttaatagcaagttcttcactgtgttcctcgagtagtaacttgattgattcattgtgaccactccgttcctgaatcagcctttccatgtcctccaactccttaccttttgattcaatccgttgaactgtctccttcaactcgttatttagtgagttaaccaactcaaggtccaaactaagtccgtccaactctttctttttagaaacaagttccgaggaccgtatatcaagcagcttctgctgcaaagctagttcttcttccaccaactcaatcgtcttcccatactctgcagttttatcgagaaccgctgtaagctctttcctctttctttctatttcctctgccaattctctactgcgagtttgactcttttccagatgctccatcactacgttgacctcaccacgatgcctctcaagatcaatatccatctgctctaattgtttccccttcaattccacctcaccctgagtctttattagttctaaggaccgtctctcaaacagcttctcacattctgcaattttatccataaccaatgtgagatctttagtctttctctctatttcctcttccaattttctcctgtgagtttgagtcctacccaaattcttcttctctgcgttgacatcaacacaatatttctcaagatcaatcttcatctggtctaactgcttctcttttaattcaacttcaccctgagtctttataagttccaaggaccgtgtctcaatccgcttatcacaatcaacaattttattcataaccaatgtgagatctttcgtctttctctctatctcttcttccaactctctcctgccattgtcagtcctacgcaaatgctccttctcttccttaacctcaacgcgatatctctcaagatgagtcaccatctgtcttaactcttcccccttcaaatcaagatcaacctgactctttctcaacaactccacaatctcactaagttgacctctctttgacctttcctctacactacactcttccaaagacttcctaagacaacccaattcctctcttttctcttcaacttcactcctaaaaccactagctttcatttctaaatcacccatctcagcttccgctgcttcaaccactttagccctttcttcaagagcaaagcttcgattctgtaactcaacctccttcaacactagttccctaaacctcaactctaacttctcactcgctgatttcagatgttcctcaaaatcacaccattggagattcaagataagtacatcagaggcttgagacttaatcatatccattgtcttacgaatattatttgccttcacatcacaaagccttatctcgttttccaacttaatttcctccattccgttcaatttcttcaactccacggaacagagagtctataaaagagacaaacccaacaaagcaaaatcagttaatcaccttttaaatcgataaagctttctcctttttacaaattccaagccggagaaaacccacaaacagagaaagaccaaagaaagtaacagaaaaaaacaaaaaagaaaaacagtacctttgtcgtctccgtacagaaccagagactgaacagagaaaacagtaagaaaattagggttttgaaacaacaagacgagaaagacaggttctttttcgcaattggcagaaattaaggagtggtggagaaggaagaatcaaaccctaaagcgaaggagaagaaaaaagaaaaaaggaacctttgtacgacgagtgcttcaacggtgtgtcttccttatttcgcagcttttgacagagacttgttttcaattttcgttaaattaatatctttatttaattactggcgaaaatgtggttaaaacacagataaatctctgcttaaattcgttcggttccaattttaactaccaaatctttgctaatcattactatttcgtttaatatagtaatttagaaaactaattattttgttctcttggagtctaagtaaaaaaaacatagtattactttttgttctgacatgtcatatgggataacatgctttgtctttctgaatgtcaaatcaagagcattatgtcaatgttcaacatttagctttcaagtttgaatcaattatgaatttgtcttttttggatgatattttttggattttgccttctttagaatagtttgtggattttgtcctttttctcgttacaaaaatgtgatttaacataccttttattcgttatgtttgggtttactcagttatttttaggatttaatattttatataaaatatatatttttacaaaaaaatcttaaatacaaacatttttaaaaataatatatccgtcaaattttagtaaaatacctatttcaaaatatttcgaaaaaaaatggcgacatcaacaacaatcccttcaaatttttctttgttttcaattatatatcaacaaaacaaaagttcaaagtagagactaatgagtaatagttgcaaatagttctttgtcaaaaaaaaaaatgcaaatagttatggttttgattggtacacacaataacgcccataaccactaaagttaacttttattttgtactgttacatcttttctaatcatttatggcttaccatttttctatactgctaaaagaaccacttttagttgttcattgaagttgattttcattcctaagatacgattgaaatacactaagatggaagagaaacactaagaccataaagaaaacgaaataacataaaaatatgtacaagaaaatgcaagcagagtgattgatatatattaacaaattcacgagcataggggttctctcctagttacgcataaattcacgtctaacttgtcgtttatcatacttaaggtggcaatttatttacaatgccttacaaatagatatagttttcaattaactctttattttcttaactattatctgatagttaccgtaaaagaaacaccattgatgcaatcaattcaaagttacaattcgaattttgatgatggagaggagactaaactaatatattctagatgtttgatctggagaaattatctaacttaatttaatggtatttttgacaaaaataaataaataaaaaatatgaagagattatgaattaaccaaaaaatctaagtaaaaaatatagaagttagttttttgggataatctttaccaacgatccatcttgttatataaaatgaaaaattgtatagcgatacatcaaaaatgccaaattggaatcaatggaggacctggaggtgattaaatcatcacaaatgccaaattgtggaagtgatgaagatttaagaaacgaaaagtaattgctcagaaaaaaatgagagtagatgttattagcaaaaataatgtttgcccaaaggatccaaatatttaacaagttgaaagtactataagttttgatcaaaatgagattctttgcatacattttgatcaaaatgagacttctctactatgaattagttttcaagcccttaagctttgatagataaacatgtatgtcttgttcaagcatatggttcttgctgttaaaaaagtgagattcttattggctctgaatttgatatggataggagaaagcaatggaatatgttgctagctaattccaactcttttttttcctcaaacatataatacatcgaaatatttctatttttgtcaacaacaccaaaatatttctagtctaaagagtttttattatgagtacatgcagtaaatgaacatatgttggttatttatttgcaaaaatgacagataacaaattagtaaagaagtttatttattatcacatttttttttaagtagtaaataatgtactatcattcactccatgaaaaaaaaaaaaaatcattcacgtcgtgtttctctttttcacaaatatcatcttaaaaattgatttaataacataatatcatactatgtatttaaatcagttacaaaaattattacttgtttatggttttactactgcaattttttttgacacaccattcacatgaaaaaagaaatgaaaaatgaaaagggaatgaaaaattttgcttggagaatgtgccaaatcatttacatgaaaactgaaaactcacgagacatatcttttacatgaaaaaatgaaaactgaaaattgaaaaagacagacaaaaaatgttagcttggcaggatgtgccaaatccttttcattgaaaacttaagtaccaagaacatatcacgtggatgtaattgacctgtttgagatttaagtcaattattggatgattttgtttgcttttacttttggaacaaaaaaagtcttctaccacttggttcacatgcacaactcagttgtgagtcttgtgactcgttaatatataagccggttcttaaaacatagaacgaaaaaaaagaggagaatgtcttgtaaaaggaaacaacaatcaaagatgcataatcatgtgatccatgttcaacgaagagaaaccattttgatcgagacatctctttcgtccacatatagctaaatagaccttaataagaagatgacacatcaacttcccttgaatccattcatgtaaaacaccattatcgcacaagaccaaaactctttatctcgttaaatttatggttactacatgaatcttcttacctcacatatcatgaagctcatatgaatgtgttaagactcgcagacactatgttggatgtaaaagatgccgttggagatacatttgtacggctaatagctccaaagtccaaccacgaagaaactcgtagatggttaccggggtagagaattgtgctttctttgtgaaaaaggttatcccaaagaagaggagttttttcttacaaaacagtatgcaatcacatattccatgttacttgcatctcaagtcacttgttgcgtactcctcaatgtcttgtttactccgcagaattgctaccagtcaacatccgacccctactgttcaaggcttgatttagcatgttacaaaaatatttattcactgttgtatatccaagttttgatttcattgtttttttttaatataaatataattagcagctatagtatatgaagtgaatttaacaactataacatgtgtataaatctgagatttcaaatatcagctacagtagaaactctataaatgaataatattgggatcatgaaattttattaatttatagtgatattaatttatcctataaattaataaatattattttataggataaattaatatttatcaatttatagaaatatttaagcaaaatacaacactattttctttcaaaatagaataaatgtcaatagacaactcgaatatctaggtgcaaatgaagcatacttaaaaattcagagtttttagaagaaattatgatttctgtctataatgttggtgaagaacttgaagacgataatgtgaaactttctgaaatagtgacacgtaaggaagcaattatcgcgtctagaactcttcataacttttgtatgtatatcgaaaagacaacaccaagagtttttgatgcaataaaaaaaattagagatgaacttcaaagagattcaaattttaagaaaagacaaatataacgaaagtcatattatactagattatttttaaaagtatgtttaagattagtaattattaatttatgatattactggaccatattttgacatagagatttcaagaaaattattatcttattatcttatcgattttggtcaatttttacattggtccgaattggaaccgacataatatattaatttatcatatttattaatttatcgaatattaatttatagagtttctactgtaatttcaatttaagtggttgagggtctttttaagacaataattagttagtggtttctcggaaaactgttgagaagaagaggtccttcgtttaatttacattaaggtccaaaactatcttatatttactaatttcaacctcaatgtttggatttggtcagaaaccaaatttattaggtttccaaaatccagtttcgctcctccttgctctagctctgttatctgattcgtaaccattgatgaaatgcgagttctcgacgaaattgcagagtcaccatttctgatttcaccgctaaaccctaattcgacagccaatggatatagatgggtcgataagtgccatggattcttacataacacggttctcgttgcggcttctctcttcttcgtcgcttacttagcttacgaagcgaagaagagtctgtctaaactctcgaatcggagatcttatatcatgattgcttattatggttgtctttggcttgttagcttgctcaatcttgcttggtgctgtctccaggtttgttaataaaatatcacaactttgattgaattacaaagatttttttaagaaagatcaaaactttgattgaatgatgagtattttaagactatttctaggttctgtgaaactcaaattagaaactttttggtcataaggttaggaatgaaatcatagtatttagtgtttctggataggttattgagtaatgaatgaatgtttcagaaagatgacaactttgttgatgaatgagcatattaaagactattctaggttggtgaaacttgaatttggtcagaagtaagtatttaatgttactgtattggtataagatgtgggttgttaggaagatcataattgtaatcacggtttatggaaatgagctagtgatccttgtatctatttacatattcctaggttagcttttgatttgattatcatgtttccggatttgattatagggttgggaatgtactcctgggaaagaagttgtttggaatctgttaactttgttcacaacatctggaatgttgtttctggaagtaagcttggtggcttttctcttccaaggaaactatgcaagcggtgcagaagcattaactagaacgttcctaatctcgggttttattgttgctcttgatttgcttctcaaggtatctctactttgtctactcttataccttctcatttctgaacaaatcttagatatggtgaaatgacaagtttaggatcttccttttgcttttgccaaactttctgatatgaattaggccttaccatttctgtagtccttacgggttttaccttcattcaggcaatttttctctttggatttggagtgccattgtttattgacaacaatgaaaatggaaaaacgttcaaatggggcttatggatcattcataagcttctactcactggcgtttatgggatggtgttcttgatgtacaactctaggtggagagaaaaattgcctggtaagttgatcagacgcttctatcttcccataatagcctccactggtttctttctatttatcatcattcatgtcttcttgtttctaacagcaaggcctgcattctacaactacataatcatcatgttcgccttatacagcctttacctagttgcatctgcgtttaccgcaaacaacgcgcattttggtttctggtaactcttatctgaaaccatcccaacagagaatattgtcttatgttcagcttgtatctgccttttaactcaaaatacttgcaggttatatgggatcatgagtgtttgctaccacgcattataccttcctcttctttacataacgttcctcgcagactttttccaggtaatcatcatcattcatcttctctcactgactctctcactctctctaaaatgcaaatgggtttgctgcaggaagaagatttgaacttggagaatgtatactactcagagatgaaggatgctggatttttcgactctgattgggaataggactagggtaacaaacatcttcctcattttctcaatctgtaaatacacgttgggtaggatctcctagaagtcatggctgctttttccggctttggcgggttacattttagggtctagtcttttgtatgtctgtactttttcctcatgtttctttctcttttataaatccaaaatgtcttgtgaatctctttgttccttaagctgataatctaaaagaaagttttgtagtagtctaaagattgacataataaaccactagggcaaattaagacatacaacaaagcatgacacaattgagcaaacggcaataacaaaagacaaaagcctttggttgtttccttaactaagcagtcttctcttggacgagttcttcaatgagttcagcagcctgttggactgttgcaatctcctttgctctctcttccgccattgttatcccgaactcttcctccaaacccatcactatctcaacctgcaaaaagaaagcagaatttgttgatgatgatgtccaatgagctctgagatacaatacaatgagatgatatttaccgtgtcgagagaatcagctccaagctcggtaaatttagttccggcagtgactttttgatcatcggtgagcgacaattgcttcttgacaatctcagacactttctctactgtctcttgcttgaccttaaaccacatatataccacattaccaaatatattcaaacagcctcaagaaagtcgaagaaatatagagttaaatcaacatactgcacaagaaactgcgagacgagcaggcatcaaacgtcgtaggctgaaggagagattattagtcttttcattgttgaaaatcgtagcctgtttgttgagacagaaccttgttgttgtagcctgttttcaccatgcattaacaacgacaaagaaagcaatgaggatagtttttctacaaccatagctaagggatttgtgttgcaaatgtatgatcataaaaatcaagatgttatgaactctttattgatagtatcaaaatatggttatcgaggcaaatgataaatcgatattaacgagcaaattaatgtatcgttagcaaaaaggaggagaagagagagatgtaccgagaaaggagcttgcatggagatggaggagcagaaacttgtcgccattatcgatctgatcgagagagatggcggattgttcaaggagcgtgaattactattttgtagctgatggcaaacactgctgggatttatgtatttatagagccacgttctattctgccatcattttggaaaatctattctaagtaccatccatttattctgagtaccactcgaccatgcgtaattacatcttaatgaataactgagggagaattcaaaataaagagtaaatcatttagtaaaaaaaaaaatagaaaaacggtcgttgctcccgcgattctctccgacgacttcggacgtgattttttccgacttcgtcgccggcgacttgagctccgatttcgccggcgatttgagctctaatttcaccggcgagttagcttccgatatcgtcgtagcttccaagccgataatctgctcccaaagtgagcttcctcttcaacggcaaaagtaaatccgatctcgttttgatttgtagattaatgtgaatttcttgttggagttagttgttcataacataaaattgttgtattgttcattctgggctgttttatcgttttgaatcagagaatttagtgagtattcaatcgaaatttacgatttgtgaaacccagaattgacgaactgggacaaatggtaaaactgagatataatagtataagcggtacaagtgttttattgagatacaatatgacaggtggtacaaatggtattagtgagttataatataggtacaattatgtctacatctgaatgattacgtaattatgtttttataatttatttgtaattacaggagacgatgaagaacaagcacacattcatacaatttgacaatgggtattattcagaatagcatgagtggatttcaaacaattctttaagcggtgtattgttgaggacgtcaaaggtaacatactctatgttagtagaaaagatatgcaagaagattggaatagatgaaacctcaaggaaggtgaaattgagttatattctatgcacatctcagagagagacatctattgtagatgatgatgactttttaggttatctaacggtagtgaatgctaagggaattagaccagctttgaacgtggaggtagtaaataaagaatctgagagggtggaacaaaattcaagggtagagagaagaagttcagttggtattaattatgaggagttgaatgcatttgatgtggagaatggtggagtagtgacaatttttagaggagaagatgcaggaggtaattgtgttaatgctgaaccgattattgaagaggctaatagtgtagaagaggctattgagaatgcggatagccgggtttttgaagaggctatggagaatgtagttattgaagatagggagcatgtggatagccggatggatgttgctgaagataatggtgttgatggtagaattgagtattatgagcttccatgtgttggtgaaggaagtcagagtagtgagaaaagtcagagtgttacggaatgggaagatggaacggagattgaattgcatcaagaatttgtttctaaggaggccgtgcaagatttggttaacagagctgcaaataagtattgttttgcgactacaactatagcgtcagatccacagcgactcatgttacgatgtcggcaatctaaaacaacaggttgtcgatggtatttacgatgtgcaaaagtaaagagttcagattgttttagtgttagagttcacaggaagatgcacacatgcaagcggtctgataagaactcaggcaattgtaaacataccggcacaccacgattaatcgcgtctattttgtatgaggattatcgaggtgagtttcaaactccaccacctaaaagcataatgagtattgctcggggaagaatgggtttgcattgctcgtatgctaccgcatggagagggaaaagataacacgttagtgatgtgcgtggtagtcctgaaaaaagctacaccgacttgtactcttatctgcacgtattaaaggaggtgaatcccgggacaatatcatatgtggaagtggatgcacaacaaaagttcaagtacttattcgttgctttgggtgcttgcattgaagggttcaaagttatgaggaaagttgttattgtggatgccacttttcttaagaccgtatacggcggtatgctagttttcgcaacagcccaagatcctaatcatcacaattatatcattgcgtctgctgtaattgatagggagaacgatgctagttggtcgtggttctttaacaagctgaaaacagttataccagatgtaccaggtttggtttttgtgagtgatagacatcagagcatcatcaaatcaattatgcaagtgtttccaaacgcgagacatggccattgtgtttggcatttgtctcaaaacgttaaagtacgagtgaaaactgagaaggaagaagcggcggctaacttcattgcatgcgcacatgtttatactcagtttgagttcacgagagagtatgctcgatttaggagaagatttcctaatgtcggtccgtatttggatcgatgggctcctgtggaaaattgggctatgtgctattttgaaggggataggtataacatagacacgagcaatgcgtgtgaatcattgaacagtacgtttgagcgtgcaaggaaatacttccttttacctttgcttgatgcgataattgagaaaatttcagaatggtttaacaaacataggaaggagtctgttaaatattctaaaacaaggggtcttgtgccggttgtggagaacgaaatacactccttatgcccaattgcgaaaacgatgccggtgaccgagcttaacagcttcgaacgtcaatacagcgtcattggtgaaggtggtatttcttattatgttgacttgctaaggaaaacttgttcttgccgacgttttgatgttgacaagtacccgtgtgtacatgcgattgccgctgcccgaaactttgtggggaccgaatggatattagatggtctcgaaatggaagacctaacttcgcattattaccatatgaatacgtggatattggcataccatagaaccatttatccagtcccgcattcatcagtttggattattcctgatgagataagacaattgatattcttaccgccggataccacaactaaaccggggagaaatcaagaaacccggtttccatcaacaggggaacgtcgtcgaaagaggactaacaacaagtttcagcctgggattaataacaacgcgtggttgcagcccgaggagtccgcttcataattaaatgtgtattttgtgttgtgttgttatgtctgtaccgtgtacttgtactatcatcaattcagaaaacacttcttacattatatggtatgcattgtatcatgttggaccatcttgatataaacatggcaaaacgcatatatttggaaacttatataactaaatcatgatatcttattattaaacatattatatcatctgtccaactaaaagttaattctcttaatgaagtccaactctaaatactaaaacttccacaaagtacaaataaattgagtacgggacaactgaataacttatggcacaactatggctaatgcgcagtattttgtctgggcccgcattccacttttataaccataataactattgtgtgttcacactatgcgttcacactatgtgttcacactatgtgtttcaatttcaattcaaaaaaatctttctcatctcattaagtacaaacttttttctctctctctctttatttctctctctctctctctcctttcttctctcgaaaagttttcttctctccttctctcttctctgacgacgacctccgccgacgaacaacacaacgaacctccgccgacgaaccacacgacgaacctccgccgacgccgaatcttccgcatcagccgccttgtccaagttcattggtaagtttcggatttgatagaaaataaattagggttttgatttttccccttttgattttcatgtgtttggctatgtagcaaataatgccgcttagttattcgtcaccttcttcatcagaggaacgatccgatgatccttccaagtacgatggtgattttggtgttccccaaatctgtttttgtggtaaacagcttgagcttgtagagcgtcttattggcgatcaaaagaagacatttctcaaatgtccgatgagtggtcaagatgataattatcacgtagacaagggttgggatcttgcagttcacgagcagtgcttttgcatcgacaaacgatttggcgagcacagggaattgattcaaaacgcattcaaatttggaggtgatagtaatcgtctccagattaaccaaatccatgctgaaattgaggacctcaaacaccgcttggacaagaaagatgcagagatcgcaaggcttatggatgcacttggaaagaagtaaaatgatttaattgacattgtgaattcctatgttgcaacaagtatgttaaagtttgaaactatgttgaattcctaagatttctagagtcatttgcacctttttaacttgttttgaagtaatttgtacctctttcggaagtgagttgtacctgaaactgaggctggcgagctgaaactgaagctgaaactaaaatacacgagttaaagtataagatgcgaggtttaagctcgctctttcggaagtgagttgtacctctctataaactacttgtacctcttttttgaactcatttgtacttgttttgacgagctgaaactaatggtctgaaatacgagttgagactgaagctgtcagatcgacgagcttaaaactgaaggtgtctgaaagacgagatgaaactgatgctgaaactgaagctgtctgattgacgagctgaaactgaggctgtctgactgaccagctaaaactgaagctgtctgattgacgagctgaaactgaggctggcgagctgaaactgaagctgtctgattgacgagctgaagctgaggctgtctgactgacgagctaaaactgaagctagaaagctgaaactgaagctgtgtaaaatacacgaggagttaaagtataagatgcgaggtttaagctcgctctttcggaagtgagttgtacctctctagaaactacttgtacctcttttttgaactcacttgtacttgttttgaactcatttgtacttgttttgacctcatttgtcattgttttgatttgttagttgtacctcttttagaattgagttgtacctaactataaactacgtgtaccttttgttttgaacatcatcctaaatgccataaataccataaaaacaagatcaaccatcctaaatacataagtaaatcgttcccacaaaaacacaagtcttcaagacatttttctcatccctctccttctctccgcggtataaggtggcttttggaatctcgatggatttatcttacgcttctttttgacaccttcatcctcgtcctcaggatcctcgtctcttttcttcttcgcattcttcttgtcgttgcactttccctttcccttcctccctttcttcttcgtttccttcttccctttcaacttgaacatcaccttcaaaagaaaagacaaccattcataaccaacaaacatcatatattaaaaagatcaaagattgacaaaacaaaccataccgattggaacatgcggaacataaagaaccatggcagaactcggatcatcgggctcaacaaactcgggcacaaaaccctcaggttcaacaaactcgggcacaaaaccctcaggctcaacaccatcggtctcaacatcatcgggctcaacaaactcgggcacaaaaccctcaagttcaacaaactcgggcacaaaaccctcaggctcaacaccatcggtctcaacatcatgggtctccacaccaccggtctcaacaccatcggtctcaacaccatcggtctcaacagcctcgggctcattcttaccaccatcttccttctccttattcacatcggaatggaccttcttctcaaatggaggcacactctcaccggcttgtctcctttcaatggtcacaagcctttcattgtgtttcgccaacatcgccatcactctcttaaagccttcatcaatagcttccttcaaagagcaagagctactgctgcccggaacatccggaacatgtctctgaacattctcttcctccatttgctcgccgccgcttcgggcccggacatccgcttcaaacatatccttccagaagattctcttcctctctttgatcaaacggtttctccagctatcgacaaccggatcaacaaaccctatcccatcatcaacatgatcaccatctacaatccgcctcaacaaatctttctcctcgtaatccggttccaaaacgctagagataacctatacaaattcacacatcaaaaataatcatattctagctcatagataactgggacaactctagagataactgggacaactcgtacctttacacttccaagctcctcgtttatctcttccaacgagaaccctttcatgagactactagagaatttggccttacacattctcggacactcattctcgaaccttacagggtctctaaacttttgtcccaaatgtggaatagcctcaaaaggcaaaatctacacattcaaagtaaaagtcacattagtattattttttaagtctactaatgcatcttataatggatattactctaaattgttacctctaatggaagaataaatccggagaaacaagtctgcaattttgctttccctttcatcgatttcattaccgacttgataccttccatacatccatcaaatgtgaaacgaccccatggaaatgtctcacatgcacgcacatcatcaacaatcttcagaaagaatttgtcaatgtttccatcagcctttgacttggccgcgatcaccttgcacaaaaaaagcaagatagccaacttcttcctatccgtcttcttcttttctccacatttcttcaattcatccaactttttctcaacatcaacgatcttaatcccagataccttcttaaagatctttttggcaaacttcaaatctgcatccacgatcttcatactcggctgcaactcctccgggtaatcatgacaatcgaaaccacataacaacgcatgctctttaatggagtacctaataggcactccattaaccacaaaccagcactccctatccatctctgtctgtgctgtgcgaagcaaaagcatccacaagccttgggtcatgtggtttttctcctcaggcatgtggaatacatgcctaaactgtggatgcgccttgaaccatggcaaatcttctttaaactcctccaaatacttcactatctgctgcacagtgcatctcgtccctatcttacacgtcttcacgtattcgcttggactaaagaacatcctctctggctgcataggttgttcttcatcatcaagttcctgaaatttcatacacaaacatacaattaatattctgctgtactacttgtactagttatctcataacaacattatcaactttctcagaattgaaactatacgtattaaattcatgcaccaatcatacaattaaattaatgcaccaatcaaacaaaccaatgtatgatcacgttaacgtataaatccatgcaccaatcacataagttgaaactatactattaagttgtcctaagtgttttctagttgtccctatacactactttcaatggatattcaaacaaaatcttcagaaattaatgttacctcagggttttcttcttccctttctttttcctcttcttgagggttttcttccatcccatgagatgacattggttcatcatcatcaatttcctgaaaattcatacacaaccataaaattaatatttttcgttatctcataccaacattataaacttttctcagaatccaattttctaatgcaaatcaatgtatgattgatcacgtataaatccatgcatgcaccaatcaaacaaaccaatactattaagttgtactcattgttttctagttgtccctacacaatactttcaatattcaaacacaatttacagaaataaccatttacctcagattcttcttcttcttccctttatttttcctcttcttgagggttttcttccatcccgtgagatggcattggttcatcatcatcaatttcctgaaaattcatacacaaccataaaattaatatttcgctgtactacttgtactagttatctcagaacaacattatcaacttttctcagaattcaattttctaatgcaacccaatgtatgattaatcacgtatatccatgcaccaatttcacagacctatactattaacttgtactcattgttttctagttgtccctaaacactacatcaatattcacacaaaattttcataaatttgtatatacctcagaaatcttttcttcttccggttcgttaaggttttccggaggctcttgttcacagttttcgtcttcaaatttgttttcctcggctgcaacttcttcacggttcatatccgcttcacggatgatcgtgaccctcctgtcttcactttcactcgaactaggagtgactaaccttacacgacccatgattaccttgcaaaaacactcaacaatcaaggaaaccgttcaaatcaacccaacgaaaaccaattctaatgtttcaaatcaaaaaccgaaccaaatcaaaaatcaaaaaccgttccaatctacacttacaatttggaacgccggcggtttggaacgacgacggaactgcaacggaactgtaacggatgtgtggagtcgcgacgttcggttttgacggcggaactaaaacggttgtgtggagtcgcgacgttcggttaggtaacgggatccaggtaacggcggtgaattactcggaaatgagaaagagaggggctcgttgtggagtgtggagtcgccggagaaaagaaaaagacgatgttaggattttgaaatcgctggagacggaacgcgtttggtgcggagggagcggagtcgacgacggaagtgagaaatcaatttttttacttaggttaaaaaattttaattttggggaaaatccatttagaatgggttggatccggttcaacccgtggatctgcggttgggttatgtaaataatctgaaaacataaggttatttggtaatctctctctgttttggtatttaaaaataaatcaaaaagaaattctttttttttgggtggcagaatagaattttttttttcgaatcatggcagaatagaaattcttccgtatttataaggtggtccagtttgaaacgacaccgttttgagagatcattaatctaatgactgggtacatatttgggctattgtagggctgattcgctgatcacgtgttagcccaactaaatatgcttttttttttttttttttttgtcgaccaaattttcattaagtaaagcccaaaaggtagtacagaaggttagtctagtggatacaacgaaaataaaaacggcccatttaaaccataattaaacacaaattatgattaacaaaataacaacacgtgtataggacgtgtctccgcctaactacgtgtcgaggattgtagcaccgccgtcaagagctcgccggacatcgccaaatcttcaattagccgccgctaatcaatcctggatcgatgtgtatcggcctgccttctgtccgatctcgaatccaacccaaaaaagcatcgaatctaccggattgagagatcatcatagcttcaaaaaatttctgtcaaaaaccaaatccggggaagctccaccaccgtctatacccatcttgatgtagatctgaatccaagttgctcttgcgtctagagcaaaggaagcgatgaagatattactcctcgatcagttggagaaaacagagaaatctttgaagaaaagccggtgagaacgaaaatggagtaagatcgaattccgctaaagcgagaggagaaccggatgaaaccgatagaaggatcctactgtgaatcgaaatttattgatctcaaagatgagaatatatataatccggattacaccggaaacaaaagaattcatatgataaaccaaacatgcgaaattagcaattttcctaaatctttaaaagatattacttttcaggtatacatcaacaaacttatatcatatgataaaaatgatgcattaagttccaaaaaggggcggaggcggagggattgacattgtttgattcgaagggttggagataacatagaaaataaaatattaaaaaaaaattgatacaaaagatgagatttttgttaataacagagaatatagaactgaatggtgagactgcaactctgcttttctcattatttgtgaggcgttaaatagccaaaactcaaatacaactgcctcctactttctcggaggactttgacacgatgaaacaaacaacaactcaattactcctacaatcaagcatcttattcccactactaagactcagtctaatgactaagtccaacgacactaacaatttttgcatcgttgtattgaatcatatcgtcatgcgaacaacaatcataattttggttattgatgttgcaatattggcgacatcatattttgcagatgataataatgatctctaatgaatctcttttattattgtttatcagactagaaaagattttgatatgttttgcattcaagacaattattaaatgatgtagaagaatttgacaaatatcttcgaagattttgttattcaaacttcacatgtattgatagaaaaaaaaacatgaaattgacgagtacaaggaaaccgacaatggaatcaaagaagcattgagatagtttagagaggtgaacgaaaaagatgaagaaagacaaagagatagagatcacgaaagagagagaagaataaataaaagatttgttgagaaaatttaggggataataaatcaaagaaaagaaaaaaagtaagaaaattttgataccaagaatatgagattttgaaagaaataaaaatgtattttctctattgttgctattgatgttacaatattggcgacatcatattttgccgctactaataatgatctctcatgaatcctctttattatggtttacgtttttctcatatcagattagaaaagattttgctatgtttttgcaaactctcattcaagagaatataaaattgtttaaaagaactttagaaaaaaaatcgaaggttttgttattcgaattttacatatgatgacaaaaaaaaataacatgaaaatagagcttgtatggttgaggtttaacttataacatatatattattaatgaaataagatgaaatagcaaacattttttttcctctagaacatataattacaccatcattgtacaaaagatgacaatatatttgataactctcataacttccaagtcgaggtattccaatttcaattcacgtcattttctctcgtcgactaatcaccaaaaaaaaacataaaagttaatatggctttctccttggcaactaacaattattctattaaaaataaatttcaagacctaccaaacttttattgcattaggttcacttaatatttcttttgacaaaactaaaacactcaagaaattggttcacttattctttaaaatttagaacaatgaaataaatttcacaatttaatatggtagtctcccttgcaacaaatatatcctactatattatttgggaagtacattttaaatgtaaccttaatttttgtaagtaattacataggtatgccattagaaataaaattttaaagagtaaattaatttatctttttaaggataaaaaagtcaaatactaaattaattaattaaatttaattaattaaatttaaaaaacgaaataaattattattttccaaaaataataaccaatcaaaatcaacatataacatttgatatctaaattttaattaatttgatttaattaaaaaaacgaaatacattattaatttccaaaaaaataacaaattaaaatcaacaaactatatctgatatctaaattatcatattaattttttattaattattatagttcacttctcatctttatatgattttatttttgcgggaaaataatatcatcattataaaaaaataattagagttatttcgcatatgccacaatttgaatttttaaaaacaaatataaactgttcaatacatgaaaaaatattataacgggtgaaaaatagatttaagaaaactttctactgagtaacgggtcataattagaaatatttatattcaattccatacatattatattgaaaatttataatcttatatacaacaataattaataacatattagatgtgattcaatttttaataaaagcttgaaaatcctaaaattgacgggtttagatcgatattaatacaagatggaatactacaggtgaaactcttaaattaacaataatcaaactacaagtgtataatcttaaacactaaacaatatagataatatcaacaaaacatatacatgaactcacagttactatacatataaaataaaataaaataatatcatatattttaaaatcatctttacgataaaagattttagtttaactaaaatataagcctacctgcggtatactgcagcttaatatctagattatagggcttattggatttaaagacggatcatcaaagatttcctaaactgaagcaaaatatactgaatattcaaatatctatctgttaccaaattataaacaaataagttaatttaatattttatatacgaaatcaattaaatcttaatcacataaaaattagcacaaaaaagtattcaacaattaaaaaattatcaaatctctgtgttatataagttttgatactatattcgaataatgtaatataccttttcaatttgtattctttaactaatttaagctaactaatatatttgctaatcttatacctatcaaaaccgactatcgtttcttatctatatatacatttttgcagccattttttgaaataaatcttgtagttgagacttatttacaatggctgccactgaattttaatgtttgtttttgataattaaaaagaaaatcttcgaattaaatatttgacatttaacaatcttcccaaaatctctccacattaactacacgattatttactaaaataatacttctaaaatatttaatatcatttaattactacaaaattatcatttttgatattgcttttctccataactataacaattcgattataatcatcaaagcgaagagatataatctgatagcatttaattactacaaaattacaaaatatttagacaatgattcataaacatatcataaataagatcaacattaataaaataaatggttttcttttttacaggacgggtttggcaggatgttacttaataacatttgtaaactataaaataaaattattttataaatagatacaatttgtaaacttttatatatactaactttaaaaaataaattgttcccgcggtataccgcgggttaaaatctagttagattataagtttcaagacctaccaaattttgatatcattagccattaggttcactaaatttttgttttgacataaagaaataattctttattaatatttttgtccgaaatcgaaccaaaccgtaccaatccgatcctcaagttcgaagcaaaaaccaaattcaaaacataaacaaatgtgtagtttgtgttacaacaaaacaaatatgaatataattacatacatcaatcaaacacttcaaagttgccatgttttgctttctgctctcaaaacgttaggacagatttctgtcctcacaaacaatattacaaatggataatttacacaaaagcataatttgaatcacccttttctaccaaaaaaaatcaaagcttttcttccacgttaccctcaagccttactaagatcaggagggtttctctcagttggagaacctggaacaaagggtacaaagccacgacctccaaagacgggtcgcatgaaggagtcatcaaattgtctccagtagtaatgcacggttcgagtgggccgtgtcaagaagccacgtatactgtcaggccgaggcacattgtggttccctgaaggctcaatgaacgagtcttggtccaacaaagggatatgtatggattttggggtgttgtcatcagataacatgctcgtggtggcgttctggtgcggtaataggtagcttatgagtggtttggtcagcataccaaacacctgaaaacaaggttcaagagaatctattaaccaaatgtccaattcaattaagaaatattatgtaactcatttgatcatccagagatttcttaccactgtgctaaaaagacagacagttatcgtactcgtgatcatgattgcattcccgcgtacatctgtgtgcccggcccttgtaaactacaatagaaacaagtgttaaatgatgatttgtgtcatttgaagcttcatagagagtatttaaagacattctttttataccttgttgtatgcaagagccatagatacagcacctctcatgagaccagaccaccaaatcacaacctaaagaatgggaaaaaatgatagatataaatagctgaaatccagaagaattattgaatctattagtaccaagtagaatgatacatacctgcatgttaaagttgattttctcgctttgattcttcttggctaagttagatagaaacgataacggaaagacgaacgctgctcttccaaccatgaccagacccattaggattgagctcactgcgatcgatgttcccggtgtgtcactcacggatctccacttgtcaatgtccaaggcatccattccaacatacaagaaaataaatgtctccgcaagaaatgacaaagttgcaaaggtatgcctgtttcatcgaaaaaaatcataagataatcattgggaggtagaaagtgttaatctcagcaaaaggcggagaaactaaagtttgcatactttgttgttattcttgagctctccgttacattgtgccatgtgtaatgggacatcacaataccacagaaaaacacagtgaggataccgctcaagtcgaaaagctgcaaccaaattaatataacatcaatataatttgtgtttgaatgcaactgaatgaatatgttcgtgttatttaaaagaatctaacctcagcaagcatataagaaagatacgccataagcatcataagggcaacctctcggtcagttgagtgcctgtgacaattaatgtgaggccatctacgttagaccaaacaggaaacaacttaaagaaaacaagtcacatatatgacgttaaatatgtaccttccaaagtatagcttcttgataacatacgcacttatcagaccggtctgcaagatgaataacaaagatgtgaacaccagagcgtgcatatagcagctacaagaaagaatggcagggaagaaaacaatggacttactgcagcaccaagcaaggtacttaggagaaacaaatacaagaagtttccaagaagatgaaaagcagcttcgtggtttaggtgagtgagatcaaagctctgaatcgcgttgaagaccacaactgacgttgcatcattcacaacaccctctccgaatacaagactgtaaagcaaaggtgtctcgtcttgattcagaacctatatcacaacacaacaggaacagaaactttcggtccactatgtttcagggtttgtaagtaatttaagtcatgttggagaaaacacattacctgcagtgtacatactgaatctgttgcagcaaatatggcaccaatagctgagattcaaacaccaaaaacaaatcaagtctcccgattaagtaaagcaataggaaccaaaaagaagccattagttcaggccttaccaagataatcacccaagtcaaaggttccaatgtccaacttcttaaagaactgtgttacacctgtttcaagaaccaccagaaaatcagtagagatatacaaaactatctcgacctaatccaaaaagccgcattcagcggtgtttcagccaatcgtaaagcgaagtaacctacctagagatatgattgtgcaagaaataatagtcccaacagcaccaaaaagcataatagtcacgaaattgcggaaaaactgcttcttttttacttgaaacctgaaatagacaacaacaaatctgagaaagatccatgacaaagacaaatccaggaccacacttacttgcacgtgtataaatctaactacttcaaaaaaagacatcatgccctcttttctttataacaatcacaagtactagaaaaagttgatgtatgacaggtatttatagaagtagagcttaagcttactaatcaacatctttaaagcgttgtactaactttatcacctagaatcacataatgcatacttttcaaaactaagttttttctttcaatctgttttatgtaacttttgtaggtaaaacccgtgcaactaaacgtatcatatagcatgagaccctaccaaactaagtcctacattaaaagatatatcccaacatagaggaaaaggctcaaatggatgtaaaaaaaaagactgaccctgcattgaatataatgggtggcaaaagatatatgaagaaaagatcttcactaaagacgagaagatgcgagctttttcctttactaatcaacaaaatggtaacaccagtgcctagcccctgcaaccaaatagctcaaatgtcattcaagttggaactcagtaattactcttttcaattgagtgaacttacaatcaacaaggcggtgatggattcgttcatccatctattctcttccaaaagatgaccaagaacaatacaagcacaaagaagtgcaacaaagagattcaacgcaaccacagaagcgtgatcagatgtcgataacgaaggcagtttcgacactagagaatccaacattgttatcttcttctagatccaacaaacttcctctttccagatttgatccaagaacatgaacaactattcagattttggatcagcaaaatctggaaaaaaaagtctcttttatctttccgtgctgtccactgaaaccattcctgttttcaagaaaacagagctgagactaaacagtgaagctgtgtaatgtatagcatgaatcagctttgactataaaaaacacacaaaaagtgaatccaaatctgagacttttgatacaaacaacaaaaagcacaaatcccacaaaaggctaatattattaaatgatgacaacataaaaccaaattctcaaaatttcctatttttggtaatagcacaatatgaaattaggtcggaactttaataacccagatttcaaatatctcccaacaacaaacaacaaacacaaaaacttcaaatgaaaaaaaaaaaaaaaattggtggatctgatctgaattgctttaccttgaacaacttctgggtaatctaaatatcttcagtctgatttacaaaagagcccagaagatcaaaattcaaaattttggaagcttcgaaagctaaaacctgagattcttcttcttcttcgtctacgaggaacgaaacagagaggcgaattcgaaaattgaaggaattggggaagaaaaaaaaggagaaaattacgggactgaggaaattatacgaaatttcgattttttactggaaatagagagagacgtgtacggtccctttttaagagagagggagatagagaagagagaagattccaatttctaaacacagtagagagagaaatataagttacgaataggagagagatagagtgtatgtattattctctgttgtgtaaatgaaagtacaaatggcgaatttatagccgttgatttaaagttactatctgagatctgaacagtttagtgtttggatttattgtggaacttatcgtagacgataaaacctgactgtactaagattcatgatttatctatttgatttgtcgagtacttttggttttgaagacaacaagttttttttgggtcaccgttttatttatttttttggaattttcttcaccttgatgctgaacttttttaaaattcataaaaaacctaaatacatagtgaaactctgatgcagtaaaagaaaatattatatggatgaatttgtgtagacgaaattatttataaaaaaaaagcgttaatggcaaactcaatgaaccaaaacaaaaaaaaacaaaattttatcatgatttcacctttatttttggtatcatttcttctaattttattagagatatacattttaggatatatatatatatatatatatatatatgaaaatggcaatgaatttttttatacaaggttactattttccttatcctttatcaaaaaaggttaatttctcataagataaattaggttatagggatcaaaatctcacagaaagcaacaatgatttaaacttgaccaagcgttgttacctcaattggtaaagatcctaggcgaaacttagaggtcgttagttcgagtgatgtttgggacgaaactaatattacatgttgtggtttcaggcctgaagggattacgggtttcggcccagaacctcctgatattccgaaaaaaaaaaaaaaaaaaaaaaaaacttaaatataaaactatatttcattctattaattgttaattagtttagataataacaactcatgaaatcattagattagtgccggtctgccggatatgctcctagctaagtctatgtcataacatatagaatcgactagttaattatcgtggttctaccatttatagtttaccagatcatactgtatgcttgaaaattgataatctttcggaaatgaatttgttttgaatattctcaaaaacgtgttcatcttagtaccatatctttttgtcatcaaaatggttacggatcttctagcgtttaatcaccctatttgtttttttgtaatatcattgtttttgtttttgtcaacaacaaatattaacatgtgaatttatattttagtaataatataataactatattagcaaaaactattaccctacatattttggtattttgtaatgttgttattttattattaaaaaatgtttttattttattaaaatttgagaaggatcaattattgagttattgtttattcaatctacgtgaggatctgaatctaattaatcatacaaactccaaagtctgtccacgtcgtagaaattgttttaaaaagcccatcaaaatctttacaaaataaaaagtttcgttaaaattggattactatttcaacatacaaagttttcaagtatttaacgtgcaatttagtgccaaccaagaaagataatctattattctattacatagaaaaaggataatattaacatattttacataccgccgacgagactcataatttagataaatgttgttatgtaattgttcttacaaacaaattgtttttattatcacggttatgaaaattaaataaattgtctcatggcttttcaaatatttaaaaggtcatgtcaaataaagtagggccaaatttcatatagagctatccacttattttggaattaaagattaggtacaaaaatgcatcacctacaatctacggatccaaattatatatcatcacgattcccaaatttacctattcacgacaatatagttgttctaactatagttatatatatctatatatatatatatatatgtattttgtaagtaaaaataatatgattatttctaaattttcgaggaaaaaaacgaggccatgtcggaatgacaaaaaaatacttttaacgtttactaatttttaattaggaaattattgttcattggtaactcttttccttatagagtataaaccaactcacgttccttacatatgtcgaaatgacaaaatatttggttattgttaaattgtttgttattcaagcaaacagagtgttctggtcttaatagagtaaagatataagattaaaacacacaaaaaaggtaaatattgagcgtgacactttttgcatcagagctttctctacatcaatcatggatatctcaaggtttctgcatttttgttcaacatacatataaggcattttctagagcctaaagccggatcaatgaaatccggggccctatttaaattacgaaaacaaagtactcttatcttaaaaattatagagtaaatagaaactaatttaaacaaaattctggagttaaaaacaaaagtacaataatattctcaaatattttggaccacacagttatttaggatttatatgtataaaactaactattttctcccattatcaaaaatcaatatatgtatatataactaaaataaaatttctttgaggcccctttagaatgggggccactgtaatgtttcatgttcatgtgttatggtccggctcttagtagcatcgcaatttcaataggttcgattgagtgattcaaaggttatggaattcaaagccacataacctttttacaaatttgattttgtttttgatccacttttctctttcatttatttatggaattggattttttttttatccaactcttatggatgtttagcttgtgaattaatcatgtttaaatccacttgtaaatcaagtctaaagcgacagaaccttgatgtttacgttcttgtgaacatatttgttggtcttaaccacatctttaactgattattttttttgtcaagtctaccgaaccaaatgacaagggaaaccgtttttgaattgaatgactttgaaagagtatcaacatgatcctaacaaaacgtcaagaaactagacgtgttactcacgcataattttgtatatctgagctaatggcttaccatagcaactggttaacagaaaagaaatagattagagaaattaaaagcatcaggagtaataatcctgttacaccctcttgtttgctcttctttgcgggatcttccacggtttcaagttctgcttctttcttcctcttcttcgaacactcctcagttttgggttcttcctcatcatcagcctccttctttgtatctttgtcattaacttcttcttcttcttcgcatgctcctaaatctcctccttcaagatttctcaagcgcgcttcaagctgtcgaaaaaaattagaccatcaaagaaggaagaaaaatgtagataggatcgggcgggagagaagaatacctttaagcggctttcgactcccatagtgttgtcttggccattaccaaaagcatcacaccggatagcaagagcagattttgcagctagtgaacgtgcgattttacccttgttctctggtgcagcttgcctaaccaaaggtgcgtggtagattaaaccatactttggagtggcttgtttggtcttaagggctttatatagggtcttttcagctccaagaatctgaattgtgctccatggtagctttgagaggttccataaactaccacaatgagatattaagcgagcaccgactagctccccgacaagggcagttagatttggtgcaattttgttcattttgttcttcaagtcgtcacaaagcagagttttgtcctcagcgattgaaagaacttggtcacagagttcttggatgtgcatcaaatcaaggtcactgacttcagttctcgtagacaccatagaagcctcttttagttctgcttcaacttcatcagccaatatctgagatgacattggacacagaaagatgtttcataaagacaaaactatagtttaatggaaacaaaaagtcaaggagaatggtaaataaggctttacctcagagaagtctagcgttgcagcattaatccgattccccattagtttaaccaccttggcatataagatattgtcctgtacaatattagcaagctcgggaaaatgcaaaccgtacaattcacaaacgctcgtagtgtaagtgttaagctctttgtcaagatcatcaagcagactgatagataggattatcatggtctccacctaacaaaacattttaagtatgagaggggaaaagtaacataagcaagggtaaaacaaaacacagagaactcaatgactaccttgtcagaggtgatttttagtttatatctagcaaggatgtgagacaattccaagctcactggagctaaatcattatcatccaatccggataaaagttcggttaactgacttctcacacctcgtaacagctccataacagcatcgttgtgaacacattctatgtcctagaggagagaagcaaatccgtaagacacaagccatatatatacagaaatatgtaaaagatcataacaaaatacacaccagtttctctgtgatgatatctccaagctttggatcagccacagctaagatttcaccatcatcacagttatttttcaaaaacttgtgtagacccttgcttggagttcagatgtgttgtcaaacttatgaaaagcttttagcttaaccatccttcgagctgactctgcagagtagaactcagtacccaaatcctacaagaacaaatttgacatacttagaatattaaaaacaaacgacacatatagacaaggttaagatcaatgaaagtaagagaatgaataaggtaaataacctcaacattagagagctttccttcatctaatactttaaagagtgcaaaaccacctgacgtctcaaacagtacgagcatctttaagattacgagaaaccctttaatcaactcaacatctcaaagtcagaactatacttagtcaaaaactaatacttggaagccacgttccactgacaacggagaaagattcaataaatacctaagaggatttaagcaaagctgctgcgttagagaaagaaaaaaagaggagcaacgaatttgctataagggttcgagattcttaatcgacgatctatatatataagaaaataaatatatgattttctattaaaaagttacggaaaaaaaacatgtgaaaatataattttcacaaaaaactaaaaaaaaacctttaaaaaaaaaactattcttattttcttaaaatggtatatttctaaaaagaattatacaattaatttttaaagatgtcaaaataaccgaccttacttctaagggaaaagattatcaaaaacaaagtttatttattctctatcaaaaacagagtttgatctgctaattttaatatacaaattgtaaaatatatgattaccttaaagaaactataaaattaattactaattcgaaaaatgattatagttacttttttaataaaatgttggtataaatatgttcatctaatctacgttacatacataatcttaaattaatctcaagtactctgttcaaagttcaaacacatcacctaacaagatgaccattaaggaatcaaaaagtgttcagctaaaggctaaaactcatgtaaaattacaagcaaaagctccaaaaactgtgttcttcttttctgagaatccaaattcaaatcactaacttgaatttaacatcaacaaactagtaagtggaattgcaaaactgattcaaacaatttactttcaacttcgaaagggttcacatcagagtatcaaacaataaaggaaaaaaggtttacaaaaacttaaattggatcaagaatctctgtttacaatgagacaaaatcagaacaagttctgaagattacaaccacatcatatcagacatgacgtctaaagtcggaatctccgaagttgatcattgcattggtgttatcgagaccgaagtagctgtttagaccaaacacatcatcgttggatagatcattccaaaagcagatctcatcatccaaattgacattggcctctgtttgtgtttcttgtagtagtagattgatttggttaatctcttcctctgtttcaaatccttggatctcggagctagggttttgatcaaaagaagcaacttgtgaagatgattctccacagatctgatagagagaggagtaacagtcctgatcaaaagacggagacgagaggttagggttttgatcgccatggaaagaagaaaaggtttgatcgctgcaatactcgttgacagagtttggagtaaaagtagaagcaatttgcgaataagaagatccatcacaatcctcgacgtcgagagaacaagtactattagggttttggtcgaaactagaaacaagttgagatttttcttccttctcaaggcaagccatcacatgcttcttcattctctgtaaacgatcctcgataatgcttaactcagagagatcatcacacgaatggtagagatcagggtcttcccaccaaaatcctagtttggatccggccgggttaacaatcttgggtggaggcttgcgatttaggtaacaatcagcgatttcgtaggcagaggagtaaccggagaaggaatagacaacatcggaactatcggagggagaggttacgaagacggcgatgttagcaccggagataagacagagatcggcggctttggaaaaaacagtttgacggcgtttagagcaagtcacggctcgttgctctttggtttctcgtttctttatttcgattttgcgctttgttcctttcttcatcatcgtggaatcagatgaaggcataatgtttcttacggagagacaaatagacacagagaaaaagtgaaaagagagagtagaagcaagatagatatattacccatatttatagatgtaatagccgcctgagttatatatgtcaaacttaattaggtcttgttgttttccttttactgcccaactttatttctatgcatttaacgttttttttctttcctactaaaacgttttagagatttcttttattacaacaatagcagaaaaaaattattactactataaacaattaaacatatatattggatattcaaaattatctaaatattagattttaacccgcgttataccgtagaaataatttatttttttaaatcagtatatataaaagtttgcaaattatatctatctataaaataaaaatattttatagtttacaattgttattaagtaacgttctttcaaacccgttccgccaaactcgtcccgtaaaaaaacccagtggtacaccgttaatttaaatatataattaaaataaatattttacgggattgcaattgtattttagtttgtcaaacaaatttttttaaaaatatttgtcgaaatctaattcaaattttggagaaattagatttagtgaattgataagaaatgtatttaggtgcattttgctcattttaagggattgcaattgtattttggtttgtcaaacattttttgttttaaatagttaccgaaatttagttcaattttggagaaatctgcgtgatatatgggattagaatatatttggaattttttttgcttgttaattaatttattgcaaaaaaaacaataattaaaagctagtggcagccattataaataagttccaactctaagatttatttcacaaaatggcggcaaaaatgtatatgtagatttagttacctataatcaatgttcaaaaaatcgttgtacggtagctagacgttcgatagatgtctaggctatttttttgaacattacctataataagtacataaaacactatatattaaactttttcgcggcaactaaatctaataatactaaatcaacagtcacttttaaaaaaactgtaagcttctcattttgacacgtatgctttaagtctaaaattttgcacttccacaatcgtaaaccaattcacttccttttactattcaatagaatattcttttttgacaaaagataaatttaaatttttttaaccactttttcagcaactacttcttccacgttattaagattctttactttctctcccatctttcaaaccctctgccagttaatttacgatctcaagagcaaccgtataagccattctcaagaagataaaaacaggtttaaattcttcttcttctttcctttctcataatcttagatcctccattctttcatctaaatacgtctaccagagaaacgaaagaatgacgtaaataatgaaagttgagacttttgtgatacctaatgtgatggacgctgttaacccctcacgactcactgagtttggtccacccaatcgctggtatgaatatcaataaacctttggccgttttgttgcgttttacttggtcttatcttcttacattttccatgcacacccgctgctacaaaatgaccacatgagtttgcgagaatcatatagaaacaaaatggatgcaaatgttttggggctttcaattcagaaaaagaagaagaagaagaagaagataaccaaattgagagatgggtggcatgacatgacatcttcttccacggtgtagtgtgcaaaataatttaaatgtgaaaccatcttatatgttcaagtttagaaaagcgttttggttagaaggtaattcatttctccatcattattattgttaagttttttgagaagaaaaaacggctctgtatatatatatatatttttttctatatatctatgagataagttagtgtatttatgtaagattatttgctgtttccaataaaagttttcttaattttaacacatatattattttacaatttgagtaaagttgaataggacttttattgagagttatagagcaatgtgtgatacacattgtattttgtgaggttgtgatattcgtcatttgtgtaattgttgcaaatttcaaagacacgaaatatattattggtattgttgttttgcgtgcaaggcacgggctgcctactagtttacttacaaataaaaagactttataaattaaaatccagttcgataggtgtctaggcagattttttgaacattacctacaatgattacataaaacactatagattaaactttttccacggcaactaaatttaattaaaaataaaaaaaactttatgaattaaaatccagttaaatattttaaaacatatatgttcagtagtaaattttgatattgacggaaccattatcacgaaatattcagaaagaattttgattcatattcatcacaaaatttatagcacaataaaaatatatacacacacaaagtaggtagactctagattttatttatcttttgaaatttctaaggtctggtatgatttgccttatgctcaacccaatccatttccaattgactattaaggtactttttagactcacaaatattcattttgtacaaggttttttaaaatgtcaatgatacacttgatgaaaaatgtcgactcttcggactgatctttacaaatttatgaactaatcaactatgagtaattacgttatactaagattagaaggatttaacggtaaggtcttgactcgtttggcaaaatgcaagtttctgggataaggactaaaccaaacatattataaccttacaaaacgaagagtagttcttttttttaagtttcaaacaaaacaaaaaccttacttaacacctaacgccacaaaagattttctttgtttctgataacaaagtaaactagaccacgcaaaaatattaaaggtctcttcagacctcagttttcttcttcttcttcttctcactcttttccttcttcttagcaggcatttcagtttcctcttcctcgtgttttctcttcttcttcttctccttctttgcaggctcttcggcggtttcaggttctgcttctgtcttcttcttattcgatttcttctttgagggctcctcagttttggcttcttcctcatcatcagccttcttcttcttctttttgtctttcttctctttcacaccgttctctgaatccactgtgggagtttgaagaagagagtctgcagcagtgttgtatgtctgcagaatacaacaacaacaacaacaacaaacagcttaatcctttaagcaacattacaggtaatatatccaaaacacaattgcacaaatccagaattcataattacaaaagaaagttgaagaaacaaactagcagaggaataatctgaccttagcaggagtgatcagacctccggatcctttctttttatctttgtcatatacttcaatctttggtttgcctttagctgagccagatagacgtcctaaatcttttccttcgagagttctcaaccgtgcttcaagctgtcagaagaaaatagcccgcatggtaaacatcaatcaaggtagagtatttttagatcagatcgagaggaagatcggaaaaaaaaaaattgaaggatacctttaaacggttttcaactcccatagtgttgtcttgggagtcaccaagagcatcacaacggatagcaagaacagattttgcagctagtgaccgtgaaattttacccttgttcttcggtgcagcttggccaacaacagatgcatggaaaattaaaccatactttggagtagcgtgtttggtcttaagggctctaaataaggctttttcagctccaagaatctgaaccgtgcttccaggttgctttgcgaggttcaacaaactaccaccgtgagatattaagcgagcaccgactagctccccgacaagggcagttagatttggtgcaattgtgttcattctgctcttcaagtagtcataaagctgagctctgtactcggcaagagaaagaacctggtcacagagttctcggatgtgcaataaatcaaggtcactgacttcagttcccatagatatcacagcagcctctttcagttctgcttcaatttcatcagccaatatctgagaggaggacacagaaacaatgtttcaaaaaaaaaaaaactagtgttaagcacaaggaagtcaaatactcaaacaggcctttacctcagagaagtctagctttgcagcattaatccgattccccattagtttaacagccttggcatataagatattgtcctgtacgatcttagcaagctcaggaaaatgccaaccaaaccattcacgaaccctcatagcgtaagtgttaagctctttgtcaagatcatcaagcagaccaatagcttggattatcatggtatccacctaacatacaagtacaaggtgaagtaacataagggtcaaacaaacacaggatatatagacaaactcaattgcaattcagacctaatgttggaagagtaaaaaaagggataccaaaagttccataatttatcaaaagttggctaactcaacaaataattcagagaaccaaaaaccaatacaaatcaaatgactaccttgtcggaactgaactttagtttatatctggcaaggctgtgagacaaccccaagctcattggacctagatcttgatcacccaatccagatataagttcagttagctggcttctgatacctcttaacagctccataacagcattgttgtgaacacagactattttctacacgagtgaagcaaaaccgtaagaaacaacccttactcagaaataaaagagcgtatcggaacaaaatacacaccagtttctccttgatgatatttccaagcttagaatcagcaacagctaatgtttcaccaacacagttagctttcaaaaacttgcgtagacccttgcttggagttccctcaagcaatttagccactgcttcaagagcttcagctgtgttgtcaaacttgtcaaaagctactagcttcaccatctgtaacaacacaccaaaaattgctatgagaaacaaatattattagccagatacaaaatttgaactatgtctagaacaaaataaatcacctttcgggctaactttgcggtcgagaactcattacccaaatcctacaatcacaaatttgacatacttagaattaaaaaaccaaaccacacacagaaacaaggttaagataaatgaacaaaggagaatgatttagttagtaacctcaacattagagagctttccttcgtttaatactttgaagatggcaaaaccacctggcgtctcaaacagtattagcatttttacaagctcctgaaaagaagaaaaaacaagattaagagaaacccttgaatcaactcaaagtcaccaaacttgcaagttagtgttttacgagctaaagccattaagctagtacgaaacaatattcaaggtaaaactttttccctgtttcgaagtttacaaatcagaataatagttaaggcagatactctgttcaaattcttgaaaatccgacaaagaacagaactatactttgtcaaagtcttagaattttggaagcttatttgccataacaacgaagaaagagagggcgagagagattcagtaccttagagggttaacgcacaactacagctttagagagagctaaaatcaggagccgcgattctgctagggtttaagatggtttttatagttgttgaagaaggttcagagattctcaaaacgctgcgtttttattgctaacggcgcgtttttgtaacctagggttttaaaacgcatcgctaatttagaaaaataaatcattttgggcctaattaagtttggcccattagtataaacgacgtcgtagtttgaatcatgtctttcctttataatttagctaaagcagcgactgatcacatttcaatctctcacgacaaaaaaaaatgtgaacttgaaatggaatcttcaaagttgttgtctttattgcgagagtgtaccaatagcaccaagtctctaagaagaatcaagcttgtgcatcagagaatactcacgttggggttacgaagagacgtagttttatgcaaaagtctcatcaatgtctactttacttgtaaagaccattgctcagcgagacacgtcttcgagaacttcgatatacgatcggatgtttacatatggaactctttaatgtctggttattcaaagaactcaatgtttcatgacactcttgaggttttcaagaggttgttgaattgctcaatttgtgtccctgattcgtttacttttccgaatgtgattaaggcttatggtgcgttgggtagagagtttcttggtaggatgattcatactcttgtggtgaagagtgggtatgtttgtgatgtggttgtggcgagttctttggttggtatgtatgcaaagtttaacttgtttgagaattcactacaagtgttcgatgaaatgcctgagagagatgtagcatcttggaacacggttatttcgtgtttttatcaaagtggagaggcagagaaggctttggagttgtttggaagaatggaaagttctggctttgaaccaaattcagtttcgttgacggtggctatatcggcgtgttcaaggctgttgtggttggagagagggaaggagatacatagaaaatgtgtgaagaaagggtttgagttagatgagtatgtaaactctgcccttgttgatatgtatgggaaatgtgactgcttggaggtggctagggaggtttttcagaaaatgcctagaaagagtttggttgcttggaattctatgatcaaaggttatgtcgctaaaggagacagtaagtcatgtgttgagattttgaatagaatgatcatagaaggaactcgaccgagtcagacaaccttgaccagcattttgatggcttgctctcgctcacggaatctcctacatggaaaatttatacacggttatgtgattagaagcgttgtaaatgcagatatctatgtgaactgttccttgattgatctatacttcaagtgtggtgaagcaaatttggctgaaaccgtcttttcaaagacacagaaggacgttgctgagtcatggaatgtcatgatttctagttatatcagtgtaggtaattggtttaaggctgttgaagtgtatgaccaaatggtgagtgttggagtgaagccagacgtggtaactttcacaagtgttttacctgcttgttcgcaactggctgcgttagagaaaggcaaacagattcatttgtccattagtgagagcaggctcgaaacagacgagttgcttttgagtgcgcttcttgacatgtattctaaatgcggcaatgaaaaagaggcttttaggattttcaacagtataccaaagaaggatgttgtatcatggacggtaatgatctctgcgtatggatctcatggtcaacccagagaagcactttaccagtttgatgaaatgcagaagtttggtctaaaacctgatggggttactcttcttgctgtattgtcagcttgtggtcatgctgggctaattgatgagggtctcaaatttttcagtcaaatgagatcaaagtacggaatcgagcctattattgaacattactcgtgcatgattgacattcttggccgagcaggtcggttgcttgaagcttatgaaattattcaacaaacaccagagacaagtgacaatgcagagcttctcagtactctcttctctgcttgttgcttgcacctggaacattcattgggagatagaatcgcaagattgcttgttgagaattatccagatgatgcatcaacctacatggtcttgttcaatttgtatgcttctggtgagtcatgggatgcagcaagacgagtcagattaaaaatgaaagaaatgggattgaggaagaaaccgggctgcagttggattgagatgagtgacaaagtgtgccatttctttgctgaggacaggtctcatttacgagctgagaacgtttatgagtgtcttgctcttttgagtggtcacatggaatccggtcaatgattcttatgttattgttaattatgcatgagacgaagtctcctcctttgcaacggttgactttaattgttggttaaattagaatatgtaaaaaaaaacaagttgctgccttaaatattatatactttggaataaattcaacaagttcgtaattaacaatatcacgacttctccaattaccaaagggtctcatgccacaccaaagagcatacatatagaccaccaagtttcattctttttcggctaagtagaagaagaataaaatgaagagagaaaacaacctcgttctcagcttactcttctttgtaatcgtcttcctgatgcaggtcggagaagcacaaaataggataaccaatgtaaatgtgggaatcgtgaatgatatcggaacggcttactccaacatgactttgctctgtatcaacatgtctctttctgatttctactcttctcatccagaaacccaaacaaggcttgtaaccaccgttgttgactccaaaaatgatgttgttaccgcagcagcagcaggtacacgcatacccatttctctaaatttgcatgcactgagatacgtgtgtgtcatcaatcatcagttcatatgcacacttcttatctacatttatgctttctcctccaaaggttttttttttgcataacaaaacactccttggcgttgactttgtcacagctcttgatctgataacgaacaaggaagtgaaagcgattctagggccatggacttcgatgcaggctcaattcatgattgagatgggacaaaaatctcaggtgccgattgttacgtattctgcaacaagtccgtccctcgcttccatccgtagtcaatacttctttcgggctacgtatgatgattcatctcaagtgcacgccattaaagaaatcatcaaactttttggttggagagaggttgcacctgtatatgttgacgacacatttggcgaaggtataatgcctcgtcttacagatgtgttacaagagattaacgttcgtataccttataggaccgtgatctctcccaatgccacggatgatgaaatatctgtggaacttctccggatgatgactctacccactagagtatttgttgtccaccttgttgaattgcttgcctcaagattttttgcgaaagctacggaaattggtttgatgaaacaaggatatgtctggatcctcaccaacacaattaccgatgttctaagtatcatgaacgagacggaaattgaaacaatgcaaggggtattgggtgtaaagacttatgtcccaagatccaaagagcttgaaaactttagatctcgatggacgaagagattcccaatttctgacctgaacgtatatggattatgggcatatgatgccaccactgcattggcattggccatcgaagaagctgggacatcaaatttgacatttgtcaagatggatgccaagaggaacgtgtctgaactccagggtctaggtgtatctcaatatggtccaaaacttctccagacgctctctcgagttcggttccaaggtcttgctggtgatttccaatttatcaatggagaattgcagccatcagtctttgagattgttaatgtgaatgggcaaggaggaaggaccataggattctggatgaaagagtatggtctctttaagaacgtggaccaaaaaccagctagcaagaccactttctcttcttggcaagatcgactcagaccaattatatggcctggagacactacttccgtacccaaaggatgggaaatcccgacaaatgggaaaaggctgcagataggcgtcccagttaataacacttttcaacaatttgtgaaagctactagggatcctatcaccaattcaacaattttcagtggattcagcatcgactactttgaggctgtaattcaagcgattccctatgatatttcctatgacttcattcctttccaagatggtggttatgatgccttagtctaccaagtgtatcttggggtgagagacactgaccatttatttttctttatctgctcaatctttactaagatgggttgttgaaaccacgtctgtgttcttaatgtttggagcagaaatatgatgctgttgtggcagatacaacaatatcgtcaaataggtcaatgtatgttgatttctcattgccatacacaccatcaggcgtaggtcttgtcgtccctgttaaagacagtgttagaagaagcagtaccatctttttgatgcctttgactttggcactttggctaatcagccttttgtcctttttcattattggtcttgtcgtatgggttcttgaacatagggtaaatccagactttgatgggcctggccagtatcaactcagcactatcttctggttttctttctccattatggtctttgcgccgagtaagctccctctgtccattacactgcaattgccaatgctcatttttcacatactttagtgctgcacctattccaaaaatgtcatcttgcttacaccttaatgcatctacaggagaacgagtgcttagcttctgggcaagggtcgtggttatcatttggtacttcttagtacttgtgttaactcagagttacactgctagtttggcgtcgcttcttacaacacaacaccttcatccaacggtaaccaatataaatagcttgctggcaaaaggagaatctgttggatatcaaagttctttcattttgggaagactcagggactcaggtttctcagaggctagtcttgtatcctatgggtcaccagaacactgtgatgcgctactgagcaaaggacaagcagaaggtggtgtttctgcggttttaatggaagtaccttacgtgagaatttttctgggacaatactgtaacaagtacaaaatggttcaaactccgttcaaggtcgatggattaggctttgtaagtccataactttgcattgaactcactcttgtagtcatcttgcacctaatgctaaaaccataagtttcttctgcaggtctttcccattggatcccctctagtggctgatatttcaagggccattctaaaagtggaagagtcgaacaaggcaaaccaactcgagaatgcatggttcaagccaatcgatgaaagctgcccagatccactcaccaaccccgatccaaatccttcagtatccttccggcaacttggctttgatagtttttgggttttattccttgttgccgccatagtttgcactatggcattgttgaaatttgtgtatcaattcttgaaggagaacccaaatcaaaggaacctgcgagtattgtgggaaaagttcaatgagccggatcaaaagtcatacataaaagatgtgacgaaatgtcaatgctcctcaggtcaaggcatgccaaagaatggccaagaaggagcaaacgcagtaaacaatggcaattaaagttagcacatctattgttttcctttcttatttcaaacaaaggtttcattacatctttgaaaattccaaacaaaagagacacctccgaggatcctgatgatcattgttcattgtgataaaaacaaaaaaaggtttaagaatctgctcccctttaatgacctaaagcaccgattgtctatagcaaaaattatgcagtcaaagaagcaaagagcattttacagattaaaattaacccacagatagtttgaattcccgaaactacaaagtcaaagaatcagctcagaataaacgttgaatctacacctaaccaactcaccgaagcatgccaataagaagaacaacaatccagaagggtgagttgaaagcaaaatttacagtggatacaagttcgttgtctagcgccagaaaagcttaccggatctgggaaacagatggaatcagtcggtaacgatggcccgttagtcgccgttgagaccctgtgtcggtggagattatgagatcacggtggatcgaacagcccgaggtcacaaaaaatcgaatcgttctcctccgatactccattattgatttaatttttatcagattaagtcttgtatccatgaataaatgattttgtttttaaagtttaaattgtgactgaattatatttaaggatatttgtgggtttgttcttgttaatatggttccttctttctaatatgtttcgttgattggttttgcatcatataattatcattggcttatgacgttgtgaatgctagaattttctttagtttagtttagcttcaagttaattttctttcatccaccaccagtaactaactatgcagctcttacctctaggttatgtagcgttttggaattcaaagttgtaaattctgttgattttcaatggtgacagtgcttgtggttagtttggtttatgcagcttactttggcttataggattataagttacctactagtatgactaggctgaaattttgttgattttccagtgatgacaggatcttattgtgagtcaggagtatgtaatgttattttctttcctttttgaatcctttattaactatttcgatttaccttattgcatcaaacatggaaacatgcctacaagtttctacttggttagataatggctaattgactatattaaactctgcgtactaaattaagttcttgtgttgttgttgtacatagaataagtagattaatcctctcatttttaccccttacttcttcctttttttgcctagttttacctttgatattgctccgattctctttctatgctctggttggtatgtgtataattcatcgatctttgtattccgtctaatctctccgatttcactgattctttggtcttctctgattttagttttagatctcagttagaacaaagtctttaaggttgcaatttcagttcctcgcagctccatacaaaatattgaagagcttccatacaaacaagaggcatcaatttaaacctctgttcatgatcaaaaacaagggcaccagctttcatttcatgaaactcaacactgagactgattaatgactgagaagtccactcctaaaaccttaacattatcatctagccttcttgcaatgctcaaatcttcaagaactgaacaagacaagataagcaattgtatagcttcaccattggcttatacattctgttctaaacacatgaacttagacataaggtaaagaaactgactcgaaatcacgcatcaaaacctgatggagtctttaagtacaccaatgtctaacatatataaagacttagtggaatcacttttaaaactctaacgcttcacatgatacgtagcatcaagatgcttaagttaacgcttaactacagaatctatccaccacgtgacactgacacaaaactgttcattctcaatcctccggacacactttacctgagcttgtacaagcatgaatccttagaggaatctaaagacctatcagcaaaactcactaaggcattgtaatctggaaattcattggaatctaaattcaacgaagccagagtttctccacctcttggacaaaacactacttttgacatcatcttttgtcggaagctgcagtaatttgcttatcctattatcttctcttccattaaatcgattcgtaaaattaaactgaagatcacaccgagacaagctcaattactcaattagttggcttatctgcataaattatgtacatctagcattcatttcaatgtctattgtatattaaagatcttaataaagcaggttttcaaactcaaattgtagactcatacaaatatagaagaagccaagactttttttaaaacttgaaaaaatagcattcatacatacttagaaaacatacaaattaaactcataacctaaactgagaatatataatagaaaataacagaacgttgaccaagtcaaagaacagatcttggaacaacaagacctaattataagagaacatcattggatctgcaaacgatggtgcttgattccatggcgcaaactgatcaaaggggacaagtggggtttgtgtctgcatctgaggagtaaacaccatgggaggaagatcagagttacttcctagaccagatccttgttccccaagtaaagtcgattgctcaaagctagaaacagagttagggatttgacagaagctacaatcatcatggttatagggaaagactgaaaatttgctctcatgttgactcaatgatgacgttgataggtcttactctgtgtttgacaatggttctgtccattgttgttgatgttgatgatcctcaatcagcgaaggagaagacaatggatacgttgtggaataaaccgcacagctctgacctaactcggtctggtttttctcgggttggagtaacagaagctt

SEQ ID NO: 751 - DNA, 133195 bp, Arabidopsis thaliana
gaattcgtgaggaatgatgatgaggaaaagatgaagagtgcagctaaactacacaagccacatcctgaggttacagaacctgaaataggcgcatcaaaatctgtacctgatgagtcagtttcaaggagtgatgaagcaccctctacgagcaaggacaagaacaagatgaaaaaaggtgttgaggagagtattaatgttgatggttctgattttattaaggataaagcgtattcaaaagataataataagaggaaatctccaaggagaagccaacaaagttcttacgctgaggaggagaaaatcagtgataattccctaggccctccaaaaaaaaggttaagatcaaatgtcggattgaaatctgaacaaactacaagaaaaggattagtaggtgttggatcatctaaacgttttgattctggtggtggttcatctgccccttcatgtgcgtttaaaagaaaagctaagaaatttgtggattctggatatcaagaaatctcatctgtcaaagacaaagagagggaagtacgtaaagcaagtggagaaggggtggttatggaagcaaagattgacaataaccacaatcctaatgaaaatcttattacagaggatttgcctgatccagagttcagtaattttgaactgacaacaagctgttttggtgtcaaccaggtgtggtccatgtacgatccgattgatggtatgcctcggttgtatgctcggatagacaaagtgttggttcctgagttcaagttgtggattacgtggattgacccgcttcaggataataaagataactctatccccattgcttgtggaatctttcaaggtgggggttcagaggaagagaacgatcacttaaaattttcttgtcagatgtttcacttaactcgcaacaatagcgttgtcatatatccaagaaagggagaaatttgggcaattttcagaggctgggatatcagttggagtgctagctcagaaaatcataaacatccttatgaatatgattttgtggaagttttgtctaattttaacgatgagaatggccttggagtgggctttctgggaaaagttgaagggtttgtttccctctttcgccaagatgcacaggatggagttctccaacttcagattccaccaagccagatgctcaggttttcacataaagtcccatcattcaaaatgactggaaaagagagagaaggtgttcctcctgggtgctttgaattagatcccgctgctttaccaaaagaattgttcgaggtttatgattctaaagttgatgttgggttggatagagaattgccgaatggtaaaactggtggtccttttcctgaagcttccaaggttgaaatgcaggcaaacactaccagagagagcagtccatttaaaaagaaacgtccaaaagtccatgataatcatggttcattctccaaagaatctgatggtagacgcactaatcatgaaaggaactcagcgaaggagtccagaaagagtgtcaaagcagtagatgccttgaatctgcgaaaatctcctcgtcttttgagtgaaacaaacagtcaagcaaattcaaggtcaggccgacaaatagctgagaagaagagtgctaacaatggtgaatcctgtggaaagccaggtggattgtctttatctggtgagaagatgtctgagaagactatcacaagaatgagaaaaacacctcaggatatacacaaaccgacagtgaacgtaaagaaacatggaagaaatgatgagtcattgtctcagtccaggggtgatggtttgctgactcagttaaatggtaatatgaaaagctcagaaccagagactcgcgtgccatctagttgcaaaaccgtgaaagaaaacacttttaacttcgagaaccagagatcatgggacaaattccagattgatcaaatatgggctatttacagcaatgacaaagggagtcccagaaagtatgctcagatcaagaaaatcgacacaagtcctgaattcaagttacatgtagcacctctagagctgtatcgccctccaatacacatgccacgcccagtgtgctgtggccgcttcaagttgaaaaccggtaaagccgaagtatatgtacctagcagcttctcacatcaggttaaagctgtcaagactaagaagaacagattcgaagtatacccagggaagggtgagatctgggctctgtacaagaactgcaacacaagagattatactgagacggaagaacttgagattgtagaagtagtggaaaccgacgagcagaggatacaagcaatgactttgactgctaaagggtttaacaacaagcctctatacagaaggagtgaagagtcaaacgcaagttttattgacattccaaagactgaagtgtgtcgattctcgcatcagattcctgcgtttagacacgagagtagagcgacacggtttggagatggccaatactgggagcttgaccttaaagcagttttgggtctcaacttaaagaacccataggtctcttcctcttttgtcaatcgcacatattgggacatcatctctggaatgcgacactaaagttagtgtttttggaagatcagactataccgagacaacaacattagtaagttttggcatgttggtaaatattattgctctcaagtcttaagaaaatataatcaagttaaaaaagaaagattaagggggtgttattggttagtggattttaatagagttaaactctaacccaaatctaatgttattcattcattgattttaaatccattatttaaatcaagtgttattagttcttatacttacaatatcttcattaaaagactttaaaattaagtgttattggttttcatatttctaatgtttatattactagagtcttaattctaatgttattggttctcatattcacaatgattagttcaagtttcatgttattcatgtttgatagattttcacaaatacttttatttgaaaagatttgaatgaatctcaaactgatttcatgtgtaaattatagcaatcaaaatattgccttgtatcttgagattttcacaatcatacagtctcatgagaatattacatattgccttgttcctttgccaaaaactttctttttccttccacatctaggttcacgttacatctcggactttcttctctccttcttctttcttcttccctttcacggtaaagtctatctcttttcatcattatagtagtcatggctcgtgaatttgcttgagaacaaagtcacttttatcacttttgatcatactattatatatatttttattgtaggttttataatggaacgaaatctttgtgaggaagatgattcagatgtagatattatgttattgatggtggttggatccgttgatgcttatgaaagtcaaatcccacgtccgatgcgacgacaaatcacaaaaaagggacacgcttatatacaaaaggctttgaaagatgatcctattcattttcgtcaactatatcgtatgaatcctgaggtttttgcggaattatgtcatcttctccaaatgaaaacaggtttgaaaggtacaccacatgtatgtgtcgaggagatggttgctacctttttgataacagtgggccaaaattcaagatattgtcacacaatggacactttcaagagatcaaaattttcaacaagtattaatttccacaaggttctcagagctttaaacatgcttgcaccaacattgatggccaaggttacaaatacagtgccctcaaaaataagcaaaaccacaagattttatccttacttcaaggtacatatctttttgtgtgaataatatttcttgaagtcttatataaacagtttttaatttatgttaggactgtgttggagctattgatggcacacacataaatgcaatggtacaaggtcctgaaaaggctagttatcgtaatcgaaaaggagtcatttcacaaaacgtattagctgcttgtaactttgatcttgagttcatatatgttctaagtggatgggaaggttcggctcacgattcaaaagttctacaagatgctttaacaagaagaactaatagattgcaagttccagaaggtaatagattacaagttctaaaaggtgatttatcatatgataatttatttctaatagtgtgcttccatgtttcaggaaaatattatttagcagattgtgggtttccaaaccgacgtaatttcttagctccactacgaagtactcgttatcatctacaagattttcgtggtgaaggacgtgacccaacaaatcagaatgaattgtttaaccttcgccatgcatctttaagaaacgttatcgagagaatttttggtatatttaaatctaggttcttgatttttaaatctgcaccaccgttttcttttaagacccaagcagagatagttctttcatgtgctgccttacataactttcttcgacaaaaatgtcggtcagatgaattttcaagtgacgaagaagatgaaacagatgttgacaatgcaaatcagaattctgaagaaaatggtggtgaagaaaatgttgaaacccaagagcaagaaagagagcatgcaagacattggcgagcgaccatagctgcagatatgtggagagatgctactaatattggtagccaaagatagtaattcactttttataaagttcatgtatttgtctttctttggtgttgatggagacacttttcccgtgtttgagctgaaagatttatttttgaaccctttacactttcttttattattattatgaacgagttcttgtcgtgaaatgatatatgacatgcttccgggctaatctcatcgacataattagaaactgagaagttggccatgggaaaatggtacaagacatacaaatacagaaatgacaatgatgtcagcatgacacttgaccataacgttttaaattatgttctactcatatcggtggtggaataattataccttgacctaagaagtatgggtttatatgtattcttttgtaaacgtttaatactattaattatgaacgagttattctacctctatcatctatgttacagctaagcttttggagttatactgtaaaacattgttcattattcaaatcatatcaattaaaataaaaagtacaggatcatatcaattagaatattactttgatcatcataatattctagttgctactaaagaatagaatcatattacttagaatatatattaccatgatcatcataataatatcacaatctttttgttatattaacgtatatctttacgatcgcactatctctataaatgtcacgtacatctctcttctcattctctaagcatacaagctcattcgactgcaaagaaaaaggttcacttgttcttacttttttcttttgttcttatttacagaatcatatgttggaagtgtgatattgattaacttttgaatagttaacttttgtttcccgtctcactatttccttgttttttgcattgacgtatggttattttttattaaaatattgcaactttttcatgttttaacgtatatttgtttttccaatttgtcataggtatcactatgggagattcacaacccaaaaaaagaaaaaagggggattataatccgtggtctccagaggagactaagctgttggtgcaacttcttgtggaagggatcaacaataattggcgtgattctaatggcacaatcagtaaattaaccgtggaaacgaagtttatgccggagatcaacaaagagttttgtcgttcaaaaaactacaatcactacttaagcagaatgaagtatttaaaaatacaataccaaagttgtcttgatcttcagcgttttagttctggttttggttgggatcctttaacaaaaagatttacggcttctgatgaagtttggagcgactatctaaaagtaagtatcacattttcttttttaagtgaacatggtcgtacttacatattattaatatgtccctttgtttttgtaggcacatccgaacaataaacaacttcgttatgatacatttgaattttttgacgagttgcaaatcatatttggggaaggtgttgctactggaaaaaatgcaattggattatgtgatagtacggatggacttacgtacagagctggagagaatccaagaaaagaatatgtggatgattttgacaacgtgtatgagtatgatactacaactcatcatgagtcatcggagcactacgcaccatttatgtctcatggaacttcagaaagtcctaagcttcccccacgtaaaagaacaagatctgagagaagtacttcacaaaaagaagaaagtcctatgatggttgttagcagtaaaattttggatataatacaacaaagagaagagaggcaacaaaatgaagtggcacagaaaaagaataacgtttgggatgctataaaagaaatttctgacttggatgaatgtattcgttacaaggcacttacgaaaatttatcatttgggaatacaagacgttttcgtgagcatgtcggtggaagagaggctaggatggattcaaaccattatggaataatttgagcttaatttttattttctttgtttttaaagtttttaatttggattcaccaaaattattatgaataaattctttatcttattcccaaacttcaaaactctagaaaacttgaaataaaaaaataaaaaactggtcaaagttttgttagatttcgattagattataaaatcatttgttatagagttcatatctattagaaaaccaaatgacatcatatatcactgaaaatagacttccacgacagaatgaatagtgattcagtttaaatgaactcagatgttttaaaatctgataaacttcaactctaatggagttgacttcaacttcactaaccaataacaccacctaaacttataaaattcagaaaaataatcataaaccggaaacaaagctaattatggatggaagagaaacgtaaaccacgttaaaccaaattatggtttaatcaagaaaataaacgaaacaaaatcaagagaaaaattaagattacatcgaataaaccaatcgaaatttacaaagattgtttctgatatcacttcataaccgaatataaactttaagagataaaccataaaccggaaataaagctatttaaccgaatcaaaccgacttaaatcgatttaaccggataatctaaggtctaaaataatgagactgtcactgaagtttgtagatacggcgaggttgtggccggagaaattcgagaggaagaagcaatgaagagtgacttcctcacttcaacaacacacttcaatccttcaatattccttcccaaaataccctcaagaaactctaggatctcaataaagtcatcatcttcttcttccaaagtccgacccgacccgtggtcactcagcgacggtaacccggaaaaaccaaaaccgagatacgagagaccgaagcatccattatcagacgacgacgctcgacgaatcataaagaagaaagcacaatacttaagcacgttaagaaggaaccaaggctcacaagcaatgactcccaaatggataaagcgaactccagagcaaatggttcagtatttggaagatgatcggaatggtcagatgtatgggaaacatgtggtggctgcgattaagacggtgagaggtttgtcacagagaagacaaggtagtgatgatatgagatttgtgatgagtagctttgtagcgaagttgagttttagagatatgtgtgttgttttgaaagaacagagaggttggagacaagttagagactttttctcttggatgaaattgcaggtttgattctcttcttaaagctttgatcttgatcttgattctgttgtttaatgaagttttggtgataggtttttgtgttaaacagttgagttatcgtccgagtgtggttgtgtatacgattgttcttcgtttatatggacaagttgggaagataaagatggctgaggagacttttttagaaatgcttgaagttggatgtgaaccagatgctgtagcttgtggtacaatgttgtgtacttatgctagatggggacgtcatagtgctatgttgacgttttacaaagctgttcaagaaaggcggatacttttgtcgacttctgtgtataatttcatgctgtcgtctcttcagaagaaatcttttcatggtaaagtgatagatttgtggttagaaatggtggaggaaggtgtgcctccgaatgaattcacgtatacgttagttgtgagctcttatgctaaacagggttttaaggaggaggcgttgaaggcttttggtgagatgaagagtttggggtttgtccccgaggaagtgacttacagctcggttattagtttaagtgtgaaggctggtgattgggagaaggctattggattgtatgaggatatgagatctcagggaatcgttccgagtaactatacttgtgctactatgttaagtttatattacaaaacggagaactacccgaaagcgctctctctctttgcagacatggaaagaaataagattccagctgatgaggtcatccgcgggttgatcatcagaatatatgggaagctcggacttttccatgatgcacagagtatgtttgaagagactgaacgcctgaatttactggctgatgagaaaacatatctggcaatgtctcaagttcatttgaattcgggaaatgttgtcaaagcattagatgtaattgaaatgatgaagacaagagatattcctctttccagatttgcctatattgtcatgttacagtgttatgctaagatacagaatgttgactgtgctgaggaagcatttcgtgctttatcgaagactggacttcctgatgccagttcttgtaacgacatgcttaatttgtataccagactcaatttaggagagaaagctaagggttttatcaagcagataatggttgatcaagtgcactttgatatagagctttacaagacggctatgagagtgtattgcaaggaaggaatggtagcagaagctcaagatttgatagtaaaaatgggtagagaggcaagggttaaggataacagatttgttcagacacttgcagagtctatgcatatcgttaacaagcacgataaacatgaagcagttttaaacgtgagtcaacttgatgtcatggctcttggactgatgctcaatttgcgactgaaagagggaaatttgaatgagactaaagcaatcttgaacttaatgttcaagactgatcttggttcatcggcagtaaatcgagtcataagtagctttgtgagagaaggtaggaaaattaatctggttcgttgttctttagatatgggtatatgttaacaagctttggttatgttgttgaagatttacattcattttgtatgcaggtgatgtatctaaagcagaaatgattgccgatataattatcagactaggactcaggatggaggaggaaacaatcgcgactttgattgctgtatatgggaggcaacataagcttaaagaagcgaaacggctttaccttgcagcaggagaatctaaaactccggggaaatctgttatccgctcaatgattgatgcttatgtcagatgtggctggcttgaagatgcatatggactctttatggaatcagcagaaaagggctgtgacccaggagctgttaccattagcatacttgtgaatgctctaacaaatcgaggtatgtcaagtggaaaattgcatttccttccatcccaaaaaacttcagtgaaattcagggatccaaataatctaatctatagcacaagatttgaaatttttgagctgaagatattctaatgggtttgaaaattatgaattgatatatgactgttacatttccatcaactacttgcagagttaagttacatgatacgtattgtattcaagttaattgcaatgttactgtattatcataatcacagggaaacaccgagaagcagaacatatatcacggacctgccttgaaaaaaacatagagcttgacaccgttggctataatactcttatcaaggcaatgctagaagcaggtacaacagaacatatgatctatcaattccagttgaagtttatatggtacatggaaccaacactcaaacctctgttgtcacaggtaaactacaatgtgcatctgaaatttatgagcggatgcatacctcaggtgttccttgttcgattcagacctacaacacaatgatcaggtaaacgcatccgtccggcttccttatgtttaagactccagtaagttggtcgtcgtgttatatattccagctatctttgtgggttgatgcagtgtatatgggcgaggtctgcagctggacaaagcaattgagatttttagtaacgctcgcagatcagggttgtatctggacgagaaaatttacacaaacatgattatgcattatggcaaggggggtatgtatctaatcaagaaatttataaatatgttacgtgtatgttatcaatcacagtttctcgcagacatggaatgttctgtaacattgacctgtcttgattctggttacattaacaaatgaaactttctctggctgttacaggaaagatgagtgaagcattgtctttgtttagtgaaatgcagaagaaagggattaaacctggaacggtaggtcttagccaaattcttcgtaacatctatttagtggcttaacattatgagatatttcttaaaatctaactatgggtgaaaacaaatctataatactgggaaaatattgcagcctagttacaacatgatggtcaaaatatgtgcaaccagtagactccatcacgaggttgatgaacttttgcaagcaatggagagaaatggtcgctgtactgacttatccacatacctcaccctgattcaagtctatgctgagagttcacagtttgcagaagcagagaaaacgataactcttgttaaagagaaaggcatcccgctatctcacagccatttcagttcattgctctctgctcttgtcaaagctgggatgatggaggaggctgaaaggacatactgcaagatgtctgaagccggtataagtccagacagtgcttgcaagcggacgatcctaaagggatatatgacttgtggtgacgcagagaaaggaatcttgttctatgagaaaatgataagaagctctgtggaagatgacagatttgttagcagtgtagttgaagatctgtataaagctgttggtaaagaacaagatgtataaaataaagaattttgatctaagacctgttccacgacataaaacctaaaagtatttcacatttatgacttttctatctagaaagatttgtgttgtagccaatctcgaaaaatgttctggaaattattgtatgccaacatttaaaatacaatcgttattttttgtaactcaagtttatcagcaccatctcttcgttggataaagtagtagttatgtatttgtataacaacataatacgctgaaacaaaggatgatccatccaaaatcttcatcagaacatggtcttagaaaataaaggattatctgcaaaataattgtagaaaaggttgcgaaaaatatttttccatgagaaccctcagaattaaaatagggtttgagttgctgagacggtatataaaatgaactaccatagttgaaattcatttttatgagaagaaaagaaagatgatgatatccatctaatttttcaaacatggtatccattttatagtgtttgcaaatcgatttaagcttttgatttttaatatcaaatatcacataataaaaaatactaatcaatctaagccatttaaatctttttgaccaagttctaaccgttgtattgattagtcacttaatgtcttatatcaattatcatattatcaaaaaaatacaaatcaattaaaatagttaattttttattgaccaaaatctaattgttttattgattagtcacttcatgtattatatcaactaaagttttcacaagcattattacggtagttaaaattacccatattatttaaagtagattatggttaaatttatttattttaaacgggttggtgcaaagtagacccagttttaataaactttgacccaaacatttaatcccacatattcagtcaaaaaatccgataacattgaaaaaagtaacaaatcaaatctaaatctttggaatcttattaaaaatagttattaaaatatactctttttaaaaatattctgtaaattttcatattatggaacaatcaatataaattagattccaaagctatataaatatttcgaaatttgactaatctttttaaatatgaaaataattaataacatttttaatatataaacaaaaatacagttaaaagtagaaaattgataaacaattttttttcctttccgaaatatattaactcaaaatgaattgtttttctttaaaattattttcaagattcgttaagatcatttagcaaaattttatcttaactaagttaggtagttatttcaaactccaaaaaacaaaatttcaatttgcagctaaatcataaagaaatatgatgatttgtcttcttttcttaaatcgcttttcttttattaaaacaaatcatcaaatattgtgggtcaaagataaacccatttagctgcatctattttctgggatcttattttggaattctgtatataaaagagtcaaacataaaaattaagaatcaatattatacaatttacaatttaattgcattagcaaactaaactatataaacattcattatctacacaactttgtccatttatataaaaacatttcatctatattttgattaaactttaagtatatgaaactataatacacattattacataatatcagtatgtacttttctatcgtctataggattttaaactatacacctcctaaatcaaaatcacaacattttttaagtaaaatacatcaaaatatactacattgccgtaattgtaaaatacgtcccgttattaaaaaaacatacttacgtatgtaaatacagaaaactaaattagtgcgggtccaatcctagtatatttaatttttgtcgacctaatttattttatatcgacttattttgaaacagttaacttatattttgttttattgatatttacatagtcgattttttataactattgactttattcaattttatattgatttgttgagaaaaattgatttgttaaactgttgatttatattttatttttgtactaaattttcatctacgttgacttctattaaaacaaccgatttatattttggttaactgattttttacattctagattcttttttactgtcaatttgtttttttaaaacaaacatatttttgtgataacgtttaaattaataatttatattacaataaataaattataattattgagtttacatttgtaattaatttaaaaatcaatataatgtatttatatatatttgtctctcaaaacatttgttaaatgaaaaaaattaataaaataaatttgaattatatataactaaaattcgtagttaatacgaaatgaatcattatccaaaatatttactaaattaacccaaaaattgatagttttagatttttaataatatttgtaaaaactagttcatcaaattattttatattcgttttcagaattttttattattaattatgagcaaaaatgtcatttaaaaataataattagatatatcacaaattttaaaaaattgtagtgtacatatcaaatttctagttaaatttagggcatacaatccaattattctacaaataatatgtaaaaagtgattttataaagaaaaattgaaaattacttgttaaggagcattataacagcaagaggaggaaatgtttagagtgacatttcttcagatggctcagatactcggacacaggtactggtgactcctgcttggctaacgacaaagatgtgctaagtgattgaacatcattttgtttttagaaaattctagtagatattgctttgtaaatgataatttttatgatgggatcaatgtgctatagagaaaacaaaatgttaggtatattcttttgttgaagatttattccaaatataataagtttgcaaaatattctaagaattattcatatttctcattttcaaacaaaaaaatcagagaaaatcttacaattttctaatttttctgcaaacaattattcttatcctatactattatttgggaagtacataataaaaactaaccttattttttgtaagtaattacataggtatgccattagaaatagaatttcaaagattaaattaattcatctctttaaggattaaaaagtcaaatactaatttaatttaataagaaagacgaaatacattattaatttccaaaactatacaatcaaaatcaacatataagatttgatatataaattttaattaatttaatttaattagaaaaacgaaattcattattaaatttccaaaaaagtaaccaatcaaaatcaacatattagatttgatatctaaattatcatattaatgtttttattaattattatacttcacctctcatctttatatgattctattttttcgaaacaaataatgtcatcatatcatcggtatataaaaaaatttataattttttcgcatatgccatgattagaatttttaaaaacgaatataaactgttcaatacatgaacaaatattataacgggtcaaaaatagattaaagaaaactttcgactgagtaacgggtcataatttaaatatttatattcaatttcatacatattattttgaaaatttataatcttatatactacaataattaataacatattagatatttttatgtgtatgatgtgattcaatttttaatacaagctggaaaatcctagaattgacgggtttagatcgatattaatacaagatgatatattatagttgaaactctaaaattaacaattaaaatacaagtatataatcttaaactctaaacaatataaaaaatatcaacaaagacatatacaactcgcagtgtattatacattgaaaatcaaataaaataatatcatatatttataaatcatctttcaaaagaaattttagtttaactaaaatataaacttaccccgcggtatatatctagtaatattataatgttctaacttaatgatcgacacaacaaacaaaaagtattcaaaaatacagaattattagtttatcaattaagtggttttaaaaaaaaaatggttttaaaagaaaataagaaaataattttcgtgaatcaatttgacaaacagatggtagacaaaactttagcacacattatattttcctcgaactctaagctttggaaatcgagcaaaacatgaatctacatagaaaagagagcaatgatgaaacaaaacatacgtatttatgatgaaagtggtaacaaagcttgagcttacaaagaaattctctttgcatcgatctagtaatcaatattcaattttaattatataccttttacgaacacttacattcacataatacgtgcatgtgtccaagaagaaagcaaagaggtataaactaataaccacaactccaaacagagatcatagataagtcattaagaaatcactggtagaaaaaatactttgaacatattaacacaaacaaacaaacaataaaataaactatatatgcaaatattgatgaacttaaaaacaccaattacgaaaccataccagaatggtcgatcatatttcgtcttgctttgtttctgcttcctttttcaccagaattggcgataatattagtttcaacgcacatcatttggtgtatgtgagacctaccaatcgtaactttagagaaacctgaaatatacttggcatagatgacaatcgtaactaaacgaattcaacaaaaaaaaaaaaaaaaaaaaaaactaaacgaattcgtaaacatcaactttagttttatgaagtgcttatgattcttttgctactgccatctacatatacatcaatgcaagttagaggacgtttgtgattttaaacatgcaatcaagacgaatatactaaagatgactttgtggaaaagagttttagagaaacgaacctatggtagtttattttcaaaatatgattttaaaacaacaaataattacaaacattttacaaaagagataaaacaactggtatatatatatgtagctcgtagagtgtgattttagaatgtgagctacgttaagcatagccaaacttgttacggtttgttgttttgaaataatatacctcttgagcctttgctatgaagatggtgtcagttaaacaaagaaagggaagtccctctatctagcttgtggctacatgataagaaccatacaatattctctcaaacaaacccacatagcagccaaatcatcatatcatctaagagaatatccgattgtttctgtggaaattaaccgacagatcgaagtgagcaaaaacaataaacttgattcttctgaaaaataagaggaggcgatgaagaatatatataccttcaagataggtatttagcaagtctctaggccctttaacttatacatctttcttcaggttttgatgttgttcctttactctcggtttcaaaacctgatgcgtgaatttgtgttagacataatatgagaagacattaacaaaatcattaaccagggattatacttatgaatttttgttagacataatatgagaagaaattaacaaataatggacgtcaatgtccaaaatcaaaaagagaagcagagttcagaaaaaagcttgatgggaagttcgtgctttgctaatctatcaatcttgtccggattcatgacctctcgttcacgtcccaattctataacaacatattgccttttgacactgttgaaatctgagtcatatgtttgaaactaaaagtcaagagttgtaattttactttgtggaaacccttgctcacttaacgaataagacgcatttgaatacgtaagaggcaatagttcccagcctcatatggaatggatatgccattggagtaattcttctaacgttgttttaatattttagcaagaatatgtgaatgagaaaaagagagatggaagctacctagttgaaggaatatgttggagactgaaatatcctcttctcaatcaaatctcattattcatctttgaccgtgagctcatgaacggcaagaaataatctacgtactgatattgagttcttcctttgggaataatcaacttgtaaacttagcaataatagaatcgactttcttacacttaatggaatcgacttcctctttccgactaaaaggtatcagatcacggcctttgatcttcgctgaacgatttgagcaatgtagaactgagattttggtgaatcgacagcactttaactgatttaaagaacgcaaaaagggagatcgatggtccattaaacgctaaggagagaagacgatgagtttaggtttatagttgtatgttcacatgagggaagatgcgttttatgaactcgtaaatgagtttcttgacatatttacctgacatggcatcttaatttttaaaaatagatgggacaatttgatgcgctgatgtggcactctcttaaagtatttttgttttgctgatgctgatagctttagaagcctcaaataacatcttttattagtaaaagattagataaatatccgcactacgtgccggtttatgtgttactattttatataatattttttcatataaataaatttgaatgcattatttttgaaacataaatatgacttgtaattatttttaaaagttcagctatattaatgaataaaaaaaaccaatgatatgattatttatagacctaagatcctaatcttttcactatcatggatacatacaacaacaatatagaatatattgatacaatagcatgtaattatattacttgtgtggtttaaaacttgtctaacttgatattaaacaaaaaaaattttgttccaaccatatcatgatatgctagtaatttaattaaacactttagatttctctttccatatagctaaagagtctcatatttttaactttttggtatgtctaatgtctcaaaggttcattacacgaaaaaaacttgcatgtcattgttaccaatttaccattagacaaaaaaaaaaaatatatcatatttaattaaacactttagatttctctctttccatatagctaaagagtctcatattttcaactttttggtatgtctaatgtctcaaaagttcattacatgaaaagaacttgcatgtcattgttaccaatttaccattagacacaaaaataaaaaaagaaaatgtcatatgataagttgtaaaatagtgtttgatacttgagcatgattttgtattttttaaagttttaaaaaggtagttaaaagtgatattaatggaagatttaacacaatagaagacttttcattttccttcaattagttatgctaaattttttgttaaataatgtagaatgacatatttcattttcttgtgtgatgatgtgacaatcatatggagagagttggccaactttcatatatatgattatcatattatcagaaaaatataaatcaactaaaacaattaatttttaattgaccaaaatctaacaattgtattgattagtcacttcatgtaactcttaaatttcaccactctctaaaccactattagaatgatcacatatcttcaattcattttttgcctcttatatatcttctaaaataacatattctatcgaaattcatttcttttattaattggtaatagattgtcttgtggaaaggttgttaaagggtaatgacttaggttcgaggaacgtcaagcgcaccaataacctaccagacccataggaaagagattagggttgatgcgttgcagcaccagctgagtcccacggaacggattgttataatactatttattttgtttgcttattattttttcatatatactgaagatacataaaatatcaattcttttttttagttgataatttcataatttataacttttaaaggttatatatgcaaatttctcatagatagaaacaaatatctctctcagagaagtaaaaacaaaatttcgttctgtgtgaagcctcttcttcttcgatcaaccatggaagctacctctctaagctctgcagcaacaatcatctcctcctcatcttccccactctccatattctctccaaagaagcgaacagactcatcacctcccccgagaatcgtccgtctctcgaacagtaagaaaaaaactcaataactcgacacttctctatttccatttcttccgatcaatctccagatcgtgattttttgttttcaatttcatcttctttgatccagagaaggaagacaaagattacgatccgcaacattccgaatcgaactcatcaagcctcttccggaatcgaactctctccaatgtaaatctcgatcttgttcgatctctatttttggtggaattgagattgttaattaggtcaaaaattcgtgattgtattaggatgaagcaatgggactggtgttgagtgcagcttcggttaaaggatggacaaccggttccggtatggaaggaccgtctctaccggctaaaaccgatacagacacggtttccacatttccatggtcattattcactaaatcgcctcgtaggcgaatgcgtgttgctttcacttgtaacgtatgtgggcaaagaactacaagagctattaatcctcatgcttacactgatggcactgtcttcgtgcagtgttgtggatgtaatgtgtttcataagctggtcgataatctcaacttgtttcatgaggttaagtattatgtgagcagctcgagcttcgattacaccgatgctaagtgggatgttagcggcttgaatcttttcgatgatgaggatgatgataatgctggtgatagcaatgatgtctttcctttgtaaagaacctttctacaatatctttgttatatatctgtatatagctaccttgtcatatcatcttggtgtgaataacatttggaagtaataaattggtcatatagctcatgttctgaatttcttggggaaggtagatttggttctgagatagctctttttagtgtattatataaatgcttcttcatatgctggatttacagaaaatagatgagagcatgtatttctagatatcagaaggatcgatagaatcttcgatgatttggatacaagatccgacagattctcctttggacatagcctgcgcgagcttcgatcgagctatctcatggcgacgtagtagcagtatggtgttaaggactgaccacctcacctgcgagtccgctttcttctgtgtgaaccccaaactcttcaccaaaccatctaactgttccatcaacaccacaaaaccataaagcatatttacataatcagaagagtttttaaggggtaaaagaaaagagaccttgctgatatcgtcaaggcctccttcagcataaccatacaggagatattctgttgctacaccagccagagcaatgcatgagaatctgttcagcatctggttttggaatagcaaacacagtttcttgttaggctgaagattttaaaaaggtttagaacttttttatgggaagtataagaaaacataccgtagcggagacttttccagaattaacctgcattgtcaagttgggaaaaaagtgttagaagcttggatttgaatgagtttctgcttcttcagaggatgtgaaagaagaaagagaggttatgtacttcttcaaggaattcatagtctacaaaagctgagccagcttgaatgttgagagatccttctttctgtaaagcttcaaggctagagagcgtgtatccgcgtggtagaatcccgactaagtaggccaccaagaaatgacccgcttcgtgctgagatctcagttcacagtaagtccaatgaaaaatgatatagtgtttctaaattttttcataaagagtgatatattgaagcagagtgaagttgcaggttttacctgaacaactctgttatggtatcgttggctaaacgtatgaccagttgtatcaagaaccaaactcccaattccgccattaaaagagacctacaacattaaggacatatgaagagactatttatgtgtgtgtttcatcttaagtcagagctttgagttaccaaatccaaagtccacaggaacataaacccaagagtaagaaagaaaagctgttgagaactcaagtcaaaggctttccaagcaactattccccctgagacagctgcgatctgaaggtttctttcgatggagccaagcgttgtatctgttggcgagagaagtgaagctgcgttaataccattcagtttcagttcctccaacgtgtagagtctctgaggcacctataacaaaacacagccaaagaaggaggataaagacaagaaatgagaccactgattacaaattacagttttagtaacctaaatgctacatttcaaggacaccaagatctaaactaaacctatcatagtatcaaatcatgatgatcacgacacaaaggccaaaacatgcattagatcaatcaagtccatcaaagaaccagagaaggagattcacattgacattatgatacattagaaaggaccaagatctaagctaaacttatcaaagcataaaactgtgatcattaagacacaaaagcttagagatagatcaatcagttccaacaaagatacagagaaaggagtatcacattgacattacgagattcaattcacaattgtaacaactaataatgatataaacaacagaagacagacctgccttgcagcgccaaaacatcgaaggccatcaggttttccttggagatctttgacaagagacaatgcagctctttcgtctccactagacaacttagaatcaacttgctccaaagcttgtcttcttatggacaaacctgtttcagatgaacaaactatgcatctgtaacggtaataactatggaagagaaaagacttttgttggtttgaacatggaattagtcccacactatgtaacaacataaccattcagcaataaaggattttgtgaaactaaatctgacccagtaatggatttgcaatagtaatactgacttagattaagaattcagcaaatgggaacaaaaattggagattttagcattagggaatatcaaccacttgttctggataagaatatatttaaatttgaaatcagagtactttacctgagtttgttaaacgttaatgattttagccattgctttggaaagattccactgtgaatctaggttaaaaaaaaggacgaagatgaagaaaggtaagggttcttctcccacaaagaaatgcagatagttttagttgaaataggtgactcattgtaaaatggctgcaactaggtctacatttctaggctccatcttcagaaccgttaaagcacgagttttgatcccacccatcacaagactctctctcccaaaccctaatttcacttcctctcgcttccacacttcttcttctctgcctcagtctcaaatcgaaggttccatttcgaggtaatcctccatcttcccggaatctacgtttggcgatgacatcattgataaattaaatgtttttgtttgtgggtttatcttactctcatgcaaagtttcgatttttattcgaatccggaagttctcttctgcaagacctgagcatcatccatggtgtgattgcgattgcttccactagtcaaggtacttctttctctttatctgtgatgatgcatcaacttggtcacgtcttctaatggagagcatttctcttgaatcaaagtgtaggtcgattagcatctgtttccatgtgtacacaatactcaacttcagtcccaacacgttcacttagaaggagaatcagcagtagaaagaaatcgagtacaaaaccaatccttaatgaatcaaagtttcaagaaacgatatcaaagcttccaccaagattcacacctgaagaactagctgatgctataactcttgaagaagacccgtttctgtgtttccatctctttaactgggcatcgcaacagccgaggtttacgcatgagaattgctcttaccatatcgcgataaggaagctcggtgctgcgaaatgtataaagaaatggatgatattgtgaaccaagtactctctgttcgtcatgttggtaacgagaatctttacagttcgatcatcttctatttcacgaaagctgggaagttgatacgtgctgtgaatatatttagacatatggtgaatagtaggaacttggaatgtagaccaacgatgagaacgtatcatattctcttcaaagcattgttgggtagaggtaacaactctttcataaaccatctgtatatggagacagtaagatctttgtttcgacaaatggtggatagtggtattgaaccagacgtatttgctttgaactgtttggttaaaggttacgtgctttcgcttcacgagtcatcagatgagtgtggtttacggttgtgaaccgaattcgtttacttatgattatctaatacatggattatgtgctcaaggtaggaccatcaatactagagaattgcttagtgagatgaaaggaaaaggctttgttcctaatgggaaatcttataactctctggttaatgcttttgcgcttagtggtgagattgatgatgcggtgaaatgtttgtgggagatgattgagaatggtcgtgtggttgattttattagctatagaacacttgttgatgagagttgtaggaaagggaagtatgatgaagcgacgagattgttggagatgttgcgagagaaacagcttgtggatatagattctgatgataagcttgtgaatgttcttcacaaggatttatagaaggtgtacaaaattgtgtttcttggtttgttgtaatgtagaaattttggtgcaatttattttattgtttttggtttatggtagtgaacaaatagtgagttaatgtaaagttttgtagaagatgtaccaaatggtgattcttggtttgttgtcatgtcgaaattttggtgcaatttattttattgtttttgttatatggtattggagaaatagtgagtttatgtaagttttcagttcttcttttctcctcaatgttgccttcagtttgcgatgaatcaaggtctgcttttgactttgtttttcttgctttctgggatcagtttattgaaattttgaacctttttgttggtttttcagatacatgatagtacgtaatgtgccagctttgggttgtggtgatgatctcatgagattattcatgacttatggagaagttgaagagtgagtctcttttttgtttcctgcattgttcttatggactatgatattgtttatttgtttgtttggatttgattcgtgtagatgtaaacctatggatgcagaagactgtgcggagttcacggatgtctactggatcaagtttcgtctcatcactaatgctaggttttgattcttctttctttgatgatcaacttggcatcactgagattcttatttggttttttattgattccaaactcaagcaatcatcaagtaatgtgtatagtgaaaaactcatcactgttatgtcttagcgttaataggatttttgtttttcttccctttgtgtgacttcatagtgagtgtaatggtatccggattttatgttcattgcagctgaatctgtcgaattgagctgtgtgatttgtcttacgatatgcaaatgaataattttttgggaatgagatatgttttatgtttgatacatagaaaaagaggcgtaagtaggttcttggagtgattttaattcctttggctaagagtgtcgaatttatatacagtaagacttctataaattaatactcgataaattaataacctctataaattaataaattcttttgatctcgggttggaccagtgtaaaaattgatacaaatcgataaattaataagatattttttttgaaaatcctatgtaaatatatggtcccatcaatattataaattaataattgtataaatttatgaatatatatatttatatttatgaatatatattatgtaaaaattagtaaatgtgactttagtattgtttttcttcaatttctattaattctttgtaaaattctattctaataattttactacgtacaaaaaagttttttttttttgtttttaaacctaatttttgttttctacttgtaattgatttttaaaaaaataattgattgtatagaaaaactaccttttagatcaaagttttgtaaaaaattacaaaatttgtaaaatttctccataaattaataattattaatttatcgataaattaatacctctttaaattaatatattttctcggtcccgatattattaatttatagaggttttactgtattctttacatattttcttgctatattttgtccacttttggttccaagaggaagcattttcttttgattaagatatgtttatgtttgatatatttgcaaagaggaagttggatgaatcaagttttttgggaaatcggctccaaatctcatatgctcctgaatacgagagcgtcagtgacacaaaggagaagttagaaactagaaggaaagaagtgcttgcaagactgaaccgtaagctttctatttacacttcaacttattttactgtcagttattcttcttgctacaacaagaaagattatcattggggaaagtggacagaaactgtgtttcctcagtagacttaaagctgtcaattagtaattgggatttatcattgtactcaaagtggatcatacccttgaactgattgccatgtatgttgcagaagctaacattttgtttatagcattgtattagtaaagtttttgaggttagaaaagcattgactgttaagacgatttacagtataacttcacaagtctaatatggttctcatcttgtgaacagcccataaagcaaagagcacctcccaagttacaaaattggctggaccagctttgacccaaaccgacaatttttcccctcggcggtaaaacataatgtccacttggtctattctttgtatcatcaataaacaaatagagatagtgcatgagagattgcttcttcttctttttgtctgtaggagagagatggattaccaattccatagaggaaatgctcctgttactcgagtttcatcatatcaggtgtgtgttttatttggtgatcttgacatatgtgtcattaaaaacttggtcatctgttttccactgaatatatcttggccaaaataagtccaactggaattgtgtaggagtattttgcgtcatcttcaatgaatcagatggttaaaactgtgagggagaaactcaataaggtacaaaacttaccgagtttgtattttacaagtgaactctttacaaattttgtagacgcttgaagaaaacctttttctaattgtcacattgtaaacagattgaagaaagtggtaaccaaaagaggttacaaccaagcagccaaacacaacctgacttcaagagaacccgagtcgataaccgaagaagaatataacacacttttttgttttgtttggtattgctcagctaattgaaaaccttgtttactacttgatcatataatttgtgctcttgcaagttgcaagattgtgaatattgtaatttgtgcctatcttgaaaacttgttacagtcctgaaatcagtaacttgtctttatttgtccaatctctatttcttgcttcagaagcaaatcaaaccatccaaaccaaaattgtactagacaaattgtaatgattttgatttgtttacatgtggatttgttacaactctcggtatatcttctatctttatatctcataagaaaattcaaatccaaatctaatccttgaatctcacgttactcaagtttcctttttgtaaggcaccgctcacaagtcctcctatatatttactcttgttcattatctctttcatatttcgatttcaacataaactgaaaaccctagccacctgatgatcaagaacgacggaaagatgatgagagtgagaattgccaaggagagatctgacttatgcgacttgactgctgctgcaattaaggctacttacaatacacggaacccatgcgaagtcgagcgatgcatcgatgtgttgaatcacttgaagtctctgtctctttccgttaaggatatagagttgtctgaatcaatagttaaactggagactttgagaagtcataggaaccctagaatccgtaaggaagcccaagccttgtttcattcatggttgaagacattctacgcacatggaagcgacaactctttcaaagctgctcttaccaaggatcgtctgaagatgaagaagcatgttctaacaaggtgttcggagttgaagaaggaagacgaaccgggaactatcgcttgtcaagtcactgcctttacgctgttgaagaataaagaagacgagagatttcagacgactgttgaagcggtagagagtaagacaacgatcaaactctcggagttgaataagaaagaagatcagagatcattaactcgtgaaacagagatgataaaagcaaggaacagctttttggctttgaaacagaaagaggatcataaatctgagacttgtgacgagaaatattttaagaaagagacaaagactaatcttaagccactcaacatgaagacaaggtgtgtctctttggaggatgttacaacgaagaagccacatgaagatggttcattgataaagaagactaaaaccgaaaaggagctgaagaacaagaaagtggatgagatggtgaagttgtttgaagcagcaaagaaagctgctgatgtggccaacgctaagggtgttctctcaggtaaaccagaggcgtctcgctgcattaacgctctctcgttattgatgaagatcaacattactccaaaaccaaaagaaccaaggagtatgatggataagcttgagggacttacaaaacataaagaccgcaagatttgccatgttgcatcagcccttcttcacctttggagacagaggatcagagaacaagaacgtaaaaagtctgttaccaaggcttcatcaaagaacatacaaagacgaggaaacttagtgatgtgaagatcatggcttgaacaaatcaaagtctcttgtggattcaaaaggttctgaaccattttattgagatcgaatataagtgtgaggaagagataaactcatttgtaagcatggttgagtgctgagcaagtatactggtgaatttctcgtatgttatgtagggttccacattggaacctgaatttgtaatcttttttgtgtctttacttttccctgctttgtttgttacacaagagactaacttagtgcaacaatattgtggcgaatcttaattctctaaaccaaattagagtagagatagttcaatagatgtaatgaataccaaatttattatcattgaaaaaactaaaatcacctcatttttttcactatgcaattgtttagcatgtgttgacaaaaaaaaaattgtttagcttgttcattaacaaaatagtcatattgttgtttacgttcactcgttatttatttgagtgtagtaagaattacacgatttccactatttgtccttaagttcaggtttacttgtccgaatttcttaaaccatatatcaaaaatatttacactatcgcatcaaaacagatacatgacatgcatgaaaatatatatgcaagtgagatgcgtactctttaaaaaattcaagttggggtatgatataaaactgtcaaatacatatgaaataataatcaatatattaaaaataagaatacataaccatatatatatatatataatttatttatattcaaattaactgtaatatcttcataattttttttatctcttactcgtcgcttttcactttccctttttaacatcacaacaaataatgtcgttcaccataatatctcctatataattttaacaacacgttttagtaccaaatttttatatgtatgtatattactaataacgtacagtttatttctgaaaattttcccaaaaaactatgtacgatgaactgtaaaagcatgtgttcaagataggtaactgttggaattgtatcctttgattgaacctgtaaaagagagaagaagcctcatgagatgaagaaggagaagagaagaagtcaagccaagaagaagagcaaaaggaagaagaagaagttgtcgtgaaacaaggtcaacgacaaagaggaaggaacaaagtcaagataatagtgttgggcttgtgttgttttgtaagaataagtgtttgggctaattgttttgttcggcccaaatgagtaagtgttttatgttagtcaaagtgtagcttagtgaaagactagagttgtgtaagagttgcttgtaagtttggttatagtcttagggtgatgatgcctagaagtatggtctaggtctaagtagaagcatggtgcaagtgtctgtactaagtagaagtaacttgtataagtatatgttgtgtgtcttgtaagaagtatctggtgatccaagtttattatcaatgtagtctttcaaaaagaaaaacgtgttcgtgtgtttgtctctaaacaagaacaaaacagagtgcaacaaagagagaaactaaagagatagagtgaaaacagagaatcataacaaaaactctatagaaaccgaaacccttgctcccaagggtgttgccattcaatagcttcacaatagatgcatcttatttctccgtacatgccgaagaaagtttgctaaaggccaaactattcaagaagccatcaaatgatcaatgtataccaatcttaaactatatccattttctaatagatttctaaaaaacaattttgcactaatttttcatataaatatcacataaaccaaatatttttcaaagatcagatctaatcttagtgctacaaactcttccatggacgagcgagatcatccctatcaagaccataaacccttctagtattctgatttagttagttttatatagtcgattgatatcttaacaaatatcctgtattttgatattttaataaaaaaattaaagtcgattaatgttttagaatgtatttcctttatcatttcgctaaaagctaaaaaattatcaaatatatttaatatatattttcatacaattactgaatttatgtagtttgggtcaaccaacgtttttaattataaatattagcataaatacaatatatattgtgattatgtgaattaaattaatcattttagaaaacaaaattttatataagaaaaaaattgttttctttttgttacgtgaatatcgtattattacatttttcacaaacaaaaaaaaacaaattgttttccggttgcgaacagattaaaggttttatatttttcaaacgaaaaataaaaaataaaaaaataatgtacttattttcatgaggtccacccaacaacagtcgtcacactagtcgcgttggacttgcatgcgcatattatactctatagtcaaacccacactaacctacgccgatattcttatccaccaccacctcttattagctcaaaaaaatttcactaacccatagtcattattgcttatactccgtattaaaaaatgttaaaccttttgatctgacgtttaaaagcaggtttctttctatttccagataaaaaaactttactcatcgagactcgtttagtgattcgaaatttcccttctcggctcaaatcttcgatctgggctttcgtgtctttttgcgttttgattggtaataaaaagaagctttttaaaaactttttccatggctggaagtgaagaagttaatcttattgagagcaaggtaagacctttttattgactttgctgattttgggtattatctgtgttcatggattgttcttagttttctggtgtttggttagattaggattcatatgtgttttgttttgttttgtaatcaaagcttagaactttcatcgtttggggtgatgaaacgtgtcggttccttgatgggtctttactaatttaggagctctccttggctttatttggcttttagtttttttttctctgacccttgtgactgattttgattttgttattccatgaactgtttctactgtcaagtgttgtaatcatatctcttataaggttttgttgtgtttgtgtatagttcccctgttttacaagtgaaagctctcaaaaatctcatctttgatatctttatggctatctccttatggttttgtgtttgaaagttctctgatttattggtctgtcttgtgttttttgttgcagacagtggttcctctcaatacatgggttctaatatccaactttaagctagcttacaatctcctgcgtcgccctgacggaacttttaaccgtcatctcgcagagtttctagaccggaaagtccctgcaaatgccaaccctgttaatggggtcttctcttttgatgtgatcatcgatcgccaaactaatttgcttagcagagtttacagaccagctgatgctggcacttcaccaagtattactgatctacagaatcctgttgatggtgaaatagtgcctgttattgtcttctttcatggtggaagctttgcacattcttctgcaaacagtgctatttatgatactctttgtcgtaggcttgttggtttgtgtggtgctgttgttgtctctgtgaattatcgtcgtgcaccagagaatcgatacccttgtgcttatgatgatggatgggctgttttgaaatgggtcaactcgagttcttggcttagaagcaagaaagactcaaaggttcgtattttcttggcgggtgatagctctgggggtaacattgtgcataatgtcgcggtaagagcggttgagtcaaggatcgatgttttggggaacattttgcttaaccctatgtttggagggaccgaaagaacggaatctgagaaacgtttggatgggaagtactttgttacggttagagaccgagattggtattggagagcgtttcttcctgagggtgaagacagagagcatccagcgtgtagcccgtttggcccgagaagcaagagtctagaagggttgagtttccccaagagtcttgtcgttgtagcgggtttagatttgattcaagattggcaattgaagtacgcggaagggctcaagaaagcgggtcaagaggtgaagcttctttacttggagcaagccactattggcttctacttattgcctaacaacaatcacttccataccgttatggatgagatagctgcatttgtaaacgcagaatgccaatgagaacactcttatctctcactgtaatctcttcactaacaaacgggtgatatccaccatggaaggtgaaagcccgagattctcgttttagaagctctttgtagtgagtcaaaagaacggcgtttaactactaccgcggtggtggtggctgcgtccgcgtttgtgaaccgtccaaagctggattctgaaagcaaagcaggaagaagaacagtgtagtcggtaattatgtttggctttctagcgttagcttttgactttaactagagctgagttttttcagcttgtggttaatagtaactttggttatgttactattatgatattttcggtaaatatctatctagtacatatacatgcatacatcaacaatatgtttaattataagctttttttgtttttgtataattataagttgttgtagctatgtggtgttgtgtttgcttacctaaaagtgatcttattttctttgcgttaagaagatgatattcactcacttataggcgttattacaatgtaatcattgacaaagatttgatgtataagtcttataattctactttaaatgtaaaaccaaaatgtctcatagagaaagagattcattgcatttggaccaccaaaaagaaaaaattgactcctcaaaaaacatgcaatattgttactattttcttatgaaaaaggcaataaagagggttttgtttctataggagatgtatctttgcacaatgatgagaatatagttaataaacttgtggaacccaataataaaaagaagcaaaagatacaaaaataagcaaatattatgataacatacaagtatatggagtccacttagaataagactagatgtagaatggaaaaagacaaagttggtttggtaagaggcttcaatcttcttttaaaagaagaaaaaaaacattatacagaatgtggttatagttagctttgatagataatatctatcaacaatgatgagaatatagataatatctatcaacatatcttcctcacctacttctaatttatatgcttactccaaaatttatcgattaacctgactggtttaaacacagcgagtgcggttacggttgcgggagtttgcggaaacgggcggttgcggtttcaagcgttatcaagaattatgaacgattggttaagcgtttgataatgggtgcgtttgcgggagttttatgaatggtaaaccagcgggtgcgatagtaattaaataaaaataaaccaaaataaatataatatattactattaaaagaaagaaaaatacaataaattattatgagaaattgataatattagaaaaattaaacataattaataattaaaaccagaaataaaacattaaattcaaaaataaataaattttgtaagaaaaaacttaatactttatgcagttggtacatcaccaaaaattgcatcaagtagtgtgataaactgtaaataacgttgaactcgcgagttttccggattgcctctatacatataaaaaagtttcttcaagatatccaaatgatttttaacacatctccaactcaaaaattttccaaactggtcgtgaatggatgaaaggatagatcatacttacgtttgattcttgattttgattttgattttcattagtttgggtggatgacataattgagagaatatggttacaatatattgattaaggttttctaataagaataagatatatagggtttggatagaagacataattattttaattaattaaaaaaaaaaaaaaaatttaatctaaccgctaccgctcgcaaccgcaaacgctgcgggaaaaagcttttgaaatctggcgatttcgagcggtccaaagcggtatctagcggtttctatgattggtgccaatcgctaacaaccactaccacccgcaaacgcagcgtttgcgggttgcagagggagaaccaatcaagcctaagtggagacaaaaacttgataccaaaagatgtcatatatatattgcataatatatgaatatgaaacaaacaagtttattggagtttctggaatcaactacatgttctgagagaaaagtagcagaaatcacagacatagaagagctagatacgaaaggaaaaaaggttcacatgatagttattgaaccaactacatagaggagttatgagtaaaaagctcataagcaactacataaatggtttataagttaaacagcgaaaattgagaactcgaatgagttaaagggtagtaccatcttcagcttcaggtgatcacttgagagaagcagcataagcaacagaagcagccatgaggagagaagtaacagatgaaacaagggtccaaaagctcttcttcttatgtgcatcttccacagaatgcttcattttcgccagttccttcttcatttcctcgaccatgctttctttgtttttgaacgctttcttgatagcttctagctgcacagagtaggaatccattccttttccacgcttcttctcgtcttttttgttttctattccacatactagagaggacacactcttcagcattgttagactttgttttgcattggttccagcagattctagctctgttttcaaaacacccgtagctcttttcagctctacgatatccttttgaaggatagccttttcgtttctcaatgactcagatcgattctccaattctttcttctctttaatcaatctccctcgctcagccttaatcttctcaagctctttaccagtagcttcattcgttttctctaatgctacaactttttccttaagagccaccatgtttctcttctcctcatcaagagcctttccagcattgtctctctcgacctccaccagcgccagagcatccttaagctggctaacattgcagttaagcttctcaccattcttgatttgatcattataatcctttcgcagctgcgccacagcatgcttttgctcacccgccagtttactcagctcaactatctcagcctcctggttaacaacacgctgcacaagttcattcttctcacgcaacaattgctcaaccagtttctccttatcagagaattgcaccatagccatctcaatctctttcttaatcgaattgttctccaccattaaaccctcaagctcagattccttaacagttttctctttcacaagttcattgatctgctcagctctcgctttcgcttcctccgtaacctcatcaagactcttctccaacccaacaacctgaccacgtaacccctccctttccttagtcaaactctccacaatctcattcatatctcccagctttttctccaactccacaatcatctccctctgatcacgtctcaccatctcaacctccatcttctctttcacaactccttcaatttctctcttcaaaacatcaatctccctaaccttctcctcaaggctctccaccaattcactcctctccctattacccctctcaatcacctcctctctcttcttcctctccttcaccaatctaccattctcacatttcaatctcccaacttcttctcccaaactcacttccctcatctccaacctcaccacactctccttcaaaagattcatctcctcactctgcaaatcaaacccactcttaaccaaatccctctcatcacaaaccctactaaactcttctctctcactctctaacttcctaatcaaaccattagcttctcttttcaaatccctaatctcagtctctctatcactcttctccttaaataaccaatctacttcaacacccatttccttaacacgaccctcaacaaaacccattaacaaatccatttcaatcttcaacatgaaattctcatcgctcgaaccacacaactcctcacgaagcaaagtcttctcctttcccgaacgaaccaactcgatctccaacgaatctttcgcctggaagagagattcaatctgttgtctcttctccatagtctgcttcagaagaatcgcattaagtgacttcaaattctgaaacttttcctccgaggagtcatggtcctccattgatgactcacgacttagcttcgtcgatttctgggaagtgactggtactgactgattctgaatttgttgctgctcattggaagctccattggagttacgagacactttcttcttcgccatttgaacggaagtggcggctgagattttagggttttggttagggtttgggtttttgttgctacggcttttaacggtgaagcgagagagaagactaaacgaagagacgaagttttgggggaaattttgaaaatttcaaactttagggtctaattttgaattatttttgagagctttttgattcagtgaaggttatgatttggtttacactttcttatataacagttagagaccacagtgttgttatttctaattaatgcatgaactataattttgatacgtttcattttgaaatattacataaagacaaatgactataattacaattgctcaaattgtaacatatatctataattagttaaaattttgacagctgtttaaaactaatcattattttttaactaaaattaggtatatgatattttgaccccccaaaaaagatatgattattagaaaagactaaaattagatatgtttctttaaaaatcttgggaaaataaaaaatataacataattacaaataattaagtttggacacatatcaataattgattaaattttgacatatatagttaacaatataacttttgatatgtgtcagaaaataatattatatatagacatattaacaaactaaatgttattattaaaatagtgttaagtaaaaattatttatttattttgttagaatttaacacttgttgttgattggaaaatttactttctcgcactaacactttgaaaatcttaaaaaaatattacggtgatcgtggaggtaaataattataccgaaagtatattagatatttcagtcatatatctttttttttttcaggccaaagcttttgaattcattcacatgaaacaaattacaaagatagatagttctacgaaaatagtgacaaagtgataataattttccaatcaacaaaaactattatcactttgttgattggaaaatagatgcaacaaagtgataacaaggataagtcgacaagcaagccatgaaatctcgtagacaagagttgaagttgccactagccagaaaacggtgcgtcggattcacaaccatggaaactttgggacgtgagaagttagtctgctgaatagacataataacgttgaaaataattctaaaactttaatattcgccagcacgagaagctctacacaaagtagtagaatggttaggagcattaggtgcttgcacggcttgaaagccgaaagccgaggacggtgaattggaattaggaggaatgggtaaaagatctctccataaaggaagaaggctggaacataggattctcaaagaacatgtaagacaggtaagtgaggctcttaaagtcgaataaattttggtttaaagctctataatatgattcaagataattttttgaacaaatgaatgtttctcaagggattttgagaatctgtaaggtatgggagattgggagaagctttagagagagatcaatggagttgttgcttggaattaagcaaccataccaacgccaactctccactaaagagataatatcaagtagcctagagctaagatacaaatatgaagaattcgatgatttgcttttgaccaaagttcgagaaatagtatcacgatcccattgcaaagatatcgacatagaacttgattggtgtcctcggtcaaacaatttcacatatcgaagtatcaaatttattgggctaagtaatatgtttgaaagatcagacttgggccaagcagattttggagttggctcgcaattttctgaaatgggccaagagatacaatgttgtgagcccaagtaaaattagcccaaacgccaaaaccctaagatccttttgatttgaagaattatgtcgtgcgccgccgacaacaccaccagacgaggtgcaagagatggtccacgagccgtagctcctgccatcaacgaggtctggtgtgtggaatgttctaggagctcatgggcgtgtctagatccggcgttgccttcttctctttggtgatgttttttggttctgtttcctgagattttgtgtgtttattggttgggtaaactttcttcttgctcttcctccttcgagtagttgggactattttgtttaggtctgagtgagtatttccggcttgcgtttggggattctttggatttgcttcgaatttgattttgtgatttgcggattcagtaggagtggctttgtctatgggattagtggctatagtgaaactgtgggctctggatatatgttattggcatatgcggagaaacagaacaaaaaaatcactatatgatcttttaccatgctttgtcctcactcgcatggttccaacaatcacttttcggaaagtcgtccatcctaaaactactccagcccaagcacgcttaactgtagagttttctcaagacatttgaccgaaaagataagtgcgctttggtgacataggtggtcaaatcaattcttataaatctctctatatgcaccaccatatttctgaaatcagagtgttatactagcagggtcggtcatgatcatgtgtgttgtagcctgtaggcttgtaccaattattgctggttcaaactttgtttttcctgttttcttttcaattcaagtaatggcctgacgggtcaaaacgtttattttgggcttctttagcagaagagtcggcctcgaatgaatttaatcggctgggtaaacagaaactgtatgttattggcataattcaagacttcaagtttatgttttgtagatttcacactagatgttattggcataattcaagacagagataatataattaaaaataaattggagacgtttgatatgattagatttataagtagttgataaaacaaatatgataacaaattcaatcagcaagttttagttgcagactctagatctccttcgactcagctagatgatcagctcaacgtcgaatattagtgtgacgtttccaacatgcaacaatttcaaatttagtttttttttgtttttgtttttttggagacaattctgaacagtttagtttataacttgtatttttagttacttttatattatattattaattatttaaaaaaaaataacttgttttgaatctctttatttatgatattaatctccaacaatactatttcattattttaaatgttttacgaataaaatataatagcctaagtatcaaagttggcttcaattttatcagtggccacttcgtaagtcgtaaccagtagggctaccaccaataaagagaaacgctcgacacagtgactatacaaaaaggacaagtcaatccacgacaacggagtgttgctcttcctttaacaataaagactacttcacagagtaagagagccgaaacatctattatagcaaaactggaactaggctgaaggacaactacaaccaaacacaactcctgaaatcggcgacatcgaaaatgaataaaaacaagcaagaattgtcaaagcttaaaaaacatcaaaatgcttaaaaatattaatgaactgaagaaatctcgatcagatcctataacgtagagacaagaaccgagcctaaacaatccgtatgtggacatatctattgtatcgtagaatattttaactatcgtttaaactattatcatctcattaaataggtaatacactgtgtatatggtttagatttctcacatctagatgatatttatggatggtttactataaaataaatagtttcatttcagcatctttggttagggtttttcattcgatctctcggttaagctaataataaagctggttgagcattatatatgttccaatttattgtttacacttgcagaatctttctattaaatgtttttccattcaacgacgaagcaatttaatggttgtattgtgttgggattttcttctgtctaggttcaatgtactttcctaaaatagatgttttagaaaataaatatatttttttactagggaatgatccgagtttttaccatacaatcaattatcctaaccgtcgattagtccattgacgcagttgagagaaattgatgtattgcctagaccaataggatacctcttagttaatattttacaataatagaggaaacaaatactgaaatacatatagtatcatatataggggtgtcaaaatggatcaaaattcatcgatcaactcaactcaactcaacccatgaaccttaatgagttgaaaattttgactcaaatgagttaatgagtcaaatgagttgatgagtcaattggtttgatgagtaaaatgagttgggttgtaatggttaattgtttcaatggtttacccaattaacccatcaaattttgtaaaattcaattaaaccaactaaaatctctaaaccaatgttaatttaagtttaaccaacacatctaaaccaatttaataaaattaatatttttccaaatttcttaaatatacaagcgatgaaattgagaaaaagtaaactcgtaatttttccaccaaaaaacataaacctgtgattttcccgccaaaaacgtaaatccgtgattttcccgccaaaaacgtaaacccgagattttcccgccaaaaacgtaaacccgagattttcccgccaaaaacgtaaacccgtaattttcccgccaaaaatgtaaacccgagattttcccgccaaaaacgtaaatccataattttcccgctaaaaacgtaaacccgtaattttcccgccaaaaacgtaaacccgagattttcccgccaaaaacgtaaacccgtgattttcccgctaaaaatgtaaacccgagattttcccgccaaaaacgtaaatccatcattttcccgccaaaaatgtaaacccgtaattttcccgccaaaaatgtaaacccgtgattttcccgccaaaaacgtaaacccgtaaaaaatagaatccgtaaatatcctaagtttgatgataatcaattaataatgataattatttattattgttttataataataattaattaaattattacttaaatgggttaacccatttaacaactcaacccatcaaattaaatgagttatgggttgacccaactcattttgttaaatgagttgggtcaacccataactcattttgttaaatgagttgggtcaacccataactcatctgaccctaaactcatttgattatgagttgagttgggttaggttacctattttgacacccctaatcatatagtatgcattttttgtgaatgaaaaacgtaaaacagaaaatactaaaaacaaatgtataacaaaaaaaaaatgatatatagtttgtatttctgtaaaaacaaatgttttaatgacagataatttgtatttttgcgaaagatgtataataataataataataaaaaataaggatatttcatatgttacaaaaacttttttttaataagttgataaaacaaaacatttttcatatgcgtgaaaaaaatttacgattgtatggaacggatggcggtactacacaatagaaactacaatcacaaaatttaaaatatctaagccatgatactaaatcataatagaaacttaactcgtgtttcatttactatacaaaattaagattaggttgtaaaatacatttacacatttactgaaatcttaaatatacaaaagaaaaaaggtaattcacatgtgttcaagaaaactacaattttttttcttatcatatttaataatatttattagaatttaaagtgatttgagtgtttttgagtttttaaataattttgatgattttagaaaaattcatatgatttttgtaaaatatattcaaatctcaccttaaaccatgagatttgagtttctgtatttttaactaagaaaatcctcttaaatcttccaaaatcatgaaaattcaaatccacataatgttttcaataacagtggattttaaggtgaattttgaaatcattagttcaataacactgaattttatgaaacttttcaaaatccatatttgaataacatagaatttataaattttacacaaatctcttaaaatttcactttcaatacatcctcctaaatgtgatataacatcacattaatgttagataatataagggctgcctgcctctgtcaccctgaaatatatcagttcaactatattcccccatactttcaccctctacctatttccccctatacaaactatattcttcataattccacccaatcttacacaattccacccaattcaccaaaattaattaatctctctaaatgcgttttaaaatcaataattgcgttttaaaatcgataatcagctattaaaccattgacccaaccaaaatctcataacccaaaacaaaccttctgtttggcaaggagggttcgatttttttacttgatttggtgcattgttaacgttgttatgttaagaccttcatggtgttatgcaatgaaagttcaattcaaagagaagaaaaacaaaataaaagacatccgaaacaaagcaaatttgtccaaaataactaacatcatcataattgttacattactctagaaccaaaacacatccaaatcggctataatgttattgacataacaagtaactccaaaaaatatgacaacacattcaataaccatttgccaaaaagcataacatagagactactcttgtgttgcttgagaaggttgggtgatgctgatcgtatccggcccttgagtcttcttcttagacttcttctccttgctttctttcttagccttcttagctttcttttcaaactgagtaagtaagtagtagtaagctactaaagagacataatatatgaagaaagaaactttaaaacagaaacaaacctcatcattgccatcactctttctctttctcgggaccttctccttagggaatcttttacatcctaatgcgttatgcccaggttcaccacaactcttgcaatgtatgatcttaccttttctgctaagcttttcaacttcatttttcttcctttttttcttttttggcgactcattcttccctttgatccttgcaaacttcccttttttaggtttttctttctttcgtccaggcaaaacaggttctggtggtgcggttaccaagctgtaacctgcattcatccaatacttaggtccccttaatggcatggtggctgtctcatagttgtgtctccacatatctgtcgagaagaacccggatatgtagttctcagcatccaaaccagcatttatcagagcagcataagcatgctcacaaggtatcccacttatttgccacttcccacatgaacactgagatttttgcagttccactctatgactatttccatctatatacacctcagaaacaccatgtgtgcaacgatatactgtacttctatccgcatcttgcttctctaatgcaagaatcttcaaagcatatttagaaaatctaccttgatggcgcaaggatttttggttcctcttgacaatccgagtcattccttgcttccttattgtttctagcattggaatcaatgactttgcccttgctttggtgatggttgagttgaatgactcggtagcattgttgtcaacatcctcacaacaactaccaagcctgtagaaacaccttgaccaagtatgcggttcctctttcaatacatcactgtacaatgcatcatcatagcatctcaagttatagagattcttcttgtattccttttcattgtaactccaagccaatttccacactaacatcttgagcatatccttcttggcatgattcttcttgagattctctacaatatgcttcacacacattctatgttcagcatttggcaattcatgtttaacagcacttagaagaccctgttaaataattgtaaaaaaaagaaacaaaatgagaactttcatacttaccaacatgtaatgaaatacaaaggtaatgagaggttcctacctttgagcggtctgaaagaatgacaaaacgactgccatcctctagacccaagtccttttttatctgttggacaaaccacaaccaattctcggcattctcagattggaccacagcccacgcaactggatagatttgattgtttgcatcgtgaccaactgcagtcaatagaactcctttcacagcaactttcaagaatgtaccatctagccctataacaggtctacaagaaccagcccattgtatttttagtatgttaaagcatacataaaacctattgaacacatcttcacccttctcatttggatatgtatcaatgaaggcaacagaatttgggttttgagaatgaatctcttcaacatatcctcgaatatgagcaaattgttcctcatactccttcttaagcattttcagagcaagaagtcttcctctttggcattgtgggattgtagacaccaatttccaacgctctttgatatatagctgaatatccataggcataaacttttcatctatcctcagcttgtccaagaacaacctagcaattaccggactctttaagatctcacatttcccattaggtgagcaactatgatgcgtacatgatgtcttgatcacaaacatttgcttgtctgaatcataagcacaatacaccctccaattacatttgccacccataccgcacttgaatgaaatcttctccttctcccatctatcttgaaccacattatgcccatgtttcaatgtcacctctaaaatagcttctttgaactcaatacttgtgaaaaaagtacttccaatcacaaatttatcacccatcacccttctgattcttctatccctcaacacaatcggatcctcgtcctcatctgaactatctggaattatatctcggcctatttgtatctcatcttcgaaattggctaccccatcatctacttcaaagtcaaaacgctcaataggatcttcttcatcctttttcttcttcttcttattcttccttctcacaatttctataatctgctcttcactctcacccgcattctctgattcatagcccctattgtactccacatcatcatcgtcactacaattgtacaaaattacaccatcatcgtcagacatctattgctctctcacacaattaacaaatttaaacaaacaatttctgaaaaattcaaacagatccaactatgagaacatgttattacatagaaataacataacttacgacatctttgtgtgggtaatgtgtgatttcaacccaaccacgcttcagattcacgctttagattctccagagatgatgatccaacgaccaaccactccaattaacgccggagaaactaattaagaagaagatgaagaagaagaagtagaagaagaagaaggagagagtgtcgatggagaagaagaagaaatagaatagatttttattttttattttttttgggcataagaagaaatagaaaacctaattcagaattttcccccttttggtttaaggtataaatcgaaccttccttaccaaacagaaggtttgttttgggttatgagattttggttgggtcaatggtttaatagcagattatcaaagttaaaacgcaattattaattttaaaacgcattcagagagattaattgattttggtgaattgggtggaattgtgtaagattgggtggaattatgaagaatatagtttgtatagggggaaataggtagagagtgaaagtatggggggaatgtagttgaactgatatatttcagggtgacagaggcagacagcccataatataatgttggtatacagtattactctaatcaaacactaaagtcttatcgttccgaataaaaatgcgtcgttcaactacgaataaagtacggtgtgattcacatgataatgaaccggaccgtattgtgcgatttacgatttagattttgtctctattcggaacctaaattttaactattattatacaacaataatttaagttttgataaatcactacaaaattacttgaataaaaaaaacactacaggtttagccgtaattatcgtcttaaatggaagaacatcaaatccattgatttgtttataattaaattcgtgtgaatcaatgtcatttttgatatttctcatcgcttttgccaataatttacgctggatctttctcctgtctagattcaatgaatctgaaggtcagtgatagtgtaaacattagaactatctagcggttactagttgactaataagttttgatttttagtgggtcatatttatccacttccgcaacaaaaaatcatatgatagttaaaaacttccctagttagtagtaactagctagtcttaaaacttcttttcttttccccattaaacagtcttaattttaacttcgatttcgatccataaatttgcatagagaatgcaccaaaatgatttctattgtggggaaacttaaatgattaattgataccaaaacaaaatgtgttttgatgattaacgtggggaccaaaacgtgggtcggagagtgcccggggccgggagtgctagccctcttaatttacgtgactcacttaattacacgcatctaccattttgtcatggtgatttatttatatgtatactataaatttaatattttattttcaaataaaaaaacaaaaaatttaattaattatctcatatttcctttgttctttaaacttgattttttttttaaacacacatattaaaaaacatattaaatattggttataaatatattactttttgtgtattacagttttctataactctaaaccaatgataattaactatttttcttgaaaattacaattcaccaatactaaccaataaatattacaaagaaaacttaaaaaatcaatcttttagaaacaattttttttctctatataatcaatcatttaataacagagggaatatcgttttcctttctgctaaaatatcttagctttctaataggtaatttagcgtaccgattcatttgtattaacatgaatctaatcttttattttctgtttttactactagttaaatcgttagtcaacaaaactaataatatccaaatattcgccataaaattatccttttaacaaatttagacacaatattttaattgatttagaaatccaaaatggcaatcatattatttttaaattgatatcttcttaattttttaaaacatgagacaagtagaactctagtctggtgaaaagctcacaagtaaaacatgaaaggagtgtcttaattcaactttgttttgtcggcagtacacatcacaatgtcatatagataggttgtagacggactattttctgaattgaactgggtcgtgtttgtagactatttttttttttttttaattctatcgactgatccggtgagtttcaataaaagcacactgaaatagttcagagagaacgttttttcgaaagaccaccacattatatgtcctaaattttaaatgttttctaactaataacagggttaatcagactacatgtatttatgattattagataaatcaattgagccaaaacttaactaatagattttccaaacaaattttccaaacaaatgtgacagattatttattttacaaaaaaattgttttacattaaaactttaaataatttctacaccgaagaattgaatttgcagcacaacataagaaatcatgaatgatggtatggcatgcatatgttaatcctaacaaaattcatgattccctatccacgcaagctagcttgcttgtccaaattagatttgttcaactgcataaacaaattgtcaatttccaaagaggcaccaaaagtcaaaccataaataggtagtttggacaattattggggatataatggattagatcgtagattcaggagaatttaaggcaagtaagttggttctctatctaatgttccaagggtcttatctatgtacttcgtttcgatgattaattgatgtagttagtagtttcaaattccaaacgactatttgtatgtacaattacatatggattaattgtcagataacatgttgaattctaacatgtttctgtctatccgattttagattaaagttgtttatacaaaattttagacaacacttaaattagtactatcgttagttatatagttccattaatcatttctccttctgtatggtttatttggacagatatgtcattaagcgtttaaaaatatttgtagatttgataatttgtcaaaaatagcatttattgatattatagttgatccgtacgcgttacgaattctttagttgacctttctttttttataatctcctaatatttaaaattcagcagcagactgatgaataaaattaaatacttggttccatttctagatggtaacaggtacaaatatagatcctcacgtaagaataataacaacggaggacaaaaacgttaaattatgattaattaaacatttaattaaaagtattagcaaactcaatcaaagaatgactaaaaggttctaataacttgtgaggtatttaaacaagttaatgtaaaaaaagaaacaaaaaggttgaaacgtacggttttcatccaatgattatgaatgactataaatgattgttttttctacatcaaatatggagttccatcgtcatccaattttcttttggttacgagtgaaaacttcttaaaacacccgaatataggatctgattgataaccaaaagttgtacaagttttttagctgttaactttatcgaaatagtgcaaaactgttaaaagagctgtataaaaaaactgtacaaaaaatctaagaagaaaactttttgtaacgtttttgataaagtttttgtgattgataactatcaatactgtacaaagctgtattgtgttaccattcaaacttataatgttatagtcttggagagatattttttttactcaaagatatgaatttaagttaaaatattccataatccaaaccagcaatatatacacattaatataatttaaattgcatggaattcaaaataatacttatcgtgaatccatctagatacgttgagataagggaccaatcaacaagagaagacgtcacttttacaagttgagaataatctttcagagagaaaaaaagagtaactgtcgatttttgttgatccaaggtaacgtatatgtcctgactcagattattgcttccaattatatgtgaaaagagctttctccacattgacatataactaggatcattcgctatagacgattaatcgttgtttataatttgttataaaaaaaactttggtattttaaagaatatgtcaatatttttttcatactacagtatttttaattcgtcaaactatttaagaatacgctcatgacaaatgatcatataataataatttaaatagtacttgtatttattttttcaagaagaaaacttagttgaatgaaatttgacttaaaatgatataaagggtttgaatggtaaccattttaataacaatacagttttgtaccgttttgacagttaccaatcacaatttttttatcaaaaacgttacaaaaagtgttttactctcagctttttttatacagttccttttaacagctttgtactattccgataaagctaacaaataaaaattttgtacagcttttggttaccaataaaacccaaagtcttacaaaaaaggtcttacgcgtccacgttagctttccaatccaacccttaattagaagtcttcaccatttgctggttaaaggatattttttcaaagtgtttagcattttgtatacgtcaaactattttagaatccagatgatgaatgatcatatactaatacttagctgtatttttataatttaaaacaacaaaacttggtttaatgaaatttgacttgatcttgtttaaaaaaacgtctcacgtccacacgttagcttttccaatccaaaacccctaaagagtagaaaaccaaaataaccatttttaattcccagcctctttttatacgtagtctaaattgacaaacacatcattcgctctctttctcttctttctctagctctcttggttttttgctaaaaacagagcattttctctctagctctcactgtttctttaccataagtttcgtcatattagtacatgcaagtgtaagggatggtgatggaggaaggaagaagcatagaagaagggcttttgcagctcaagaacaaaaacgacgattcagagtgtcgtattactgcttgtgttatccttagcacttttgtcgccgtttgtggctccttctcttttggtgttgctgtgagttttctactttaccttactttgattttttcttcttctatagaagaacaaatgaaaacaacaaaattgtatgaaaagaaaacatacttcataattacgttatacctattttcttatagtttttgttgtttttatacagactggttacacttcaggtgctgagacaggagttatgaaggacttggatctttctatcgcgcaagtatgtctctcttttacggtttttcttctatttctaaaaacatgtattgaaaattaaccaagtagcaaattttatcaaaaaaaaaagactaaggccatgaatgtttgtagtttttaaaatggtttttggattttggtttttagtttttgattttcttggtttttgtttttggtgtagattttagtttcttaaaaacttgaatggtaatttgtttagattttggtttttatgttaatggattatattttattttacaaaaaaaatctaaaaataaaataaaaaatgtgatcgatggtttttttatagagaaactctcaaaacatagattttgattttctttgaaaagttgttaaaacactcaaaaactagattccctatttttttaagaaaacttgttttttcaaaattttgaatggttacaaaatagattttagaaaaaactaaaaccaaaaactagtttaaaaaccacatccattcaaagttaattcttttatactatcatccttaaacaaacaaacaaagttttgtgtataattaagcaactgagagcgagtgacatattgacatatgcaaaaaatagctaggttaattatcgttcaatttttatcaaaatacaagcttcacatcatttttaaatccgtaaatatttgtttctttattcattcaaattgaaacaaacaaccatcaattctaaagaagaaacatatagattgtcgttatcccattgagttgattatacttctttgttggtgtggttcacctccttttttacccattttttaaactcttatcataaccctaccaaaactatatatatatattatcctgatatatatggaattgtcgaaatcatccaaaaaaaaacattatttatcataataataaccctaccaaaactatatatatgcacatatatcctgatatattgagcggttgtcaaaatcatcttataaaaacattatctagctatcaacgtttccatcgttccagaaccattctccggccaattctctcatctacaataatagaaatttgaaatattgaaatattatatatatatatatatatatatatatattaaaaataataataataatactatatatatgaaaactatatttgttataaatcatttttttctcagttttcagcttttggctcattcgccactttaggagctgcaattggtgcactgttctgcggtaatctggcaatggtcattggcagaagaggggtaattaatttaaccatttcacctttcatattcgtaattttaccattcttctatttttttggttctttcgtgactataattttcgtatatatgatgcttataataatatttttgctatttatgatataatagacaatgtgggtctccgatttcctatgcatcactggttggctctccatcgcttttgctaaggtactactagttattttctattcataaacatgttttttttttcattcaaacattatttcttagaaaataaacaaaccaattaatttatggttattataaacccaataattaaatttatgttatgttttggaatacaataggaagtagtgttgctgaacttcggaagaatcatttcagggataggtttcggcttgacgagctatgtggtaattaacttattattattattatttaatatcatctttgtaagtttgttttctgatctgtaatttttgcttatttaccaagcaggtacctgtctacatagcagaaattacgccaaaacatgttcgtggtacatttacgttttcaaaccaggtaatactttaggtttttagaatatttataagaatgagtgctgacaaaaaaaaaaaatagcacaaactagtctaagacaaaccaaccaaaatccaaattaaaacttttcaaaatttctcgtgagtatattgatccttgtttcattcttgtgtaattattgattattagcttcttcaaaacgctggactcgccatgatttatttctgtgggaatttcatcacttggaggacgttggctttattaggtaagactataaattccatattcatcgtgaaaaaattgttttgagacgtaagaatatgttaaatgtatagtagaaaaaaactggaaatcttcagctgttatattatagcaaatcaactgataaaaatgtaatacgtttttggtttaggtgctttaccatgcttcattcaagtaatcggtttattcttcgtgccagagtctccaagatggctggttggtcatttaatttttctttagtgttttacgtaatttattaattattatcaaccatgagaagaaaaaaatttaaaccaaactattttcattttgaaggccaaagttggctccgataaagaactagaaaattcactgtttcggcttagaggaagagatgctgatatttcacgtgaagcctcagaaattcaagtgagttttactatatactattatcagttataatttatataattttcaataaatatacattccctttttctttgaaattatattttcattccttcacaaataaaaaaatgtaaagtctgaataattctgtgttgttttcaggtaatgaccaaaatggtggaaaatgattcaaagtcgagtttttcagatttgttccagagaaagtatagatacaccctcgtggtacgtacaagtacatcaaactaatttctagagtatcaaattttcatatttaatttatctgcacaagcattcatttttaattaatatctcaggtaggaatcgggctaatgttgatacaacaattctcaggaagtgctgctgtaatctcttatgcaagtaccatttttagaaaagctggtaagcattcatttatttttattaatgtttaattttatattaaaatgtcagaaataataataactatatatatattatatgacaatctgttcaaatctgcaagtgaagatttgcatagaagtttcagtttctctgagaatgtttttttttctaacaaaacatattttattctaccaatcaatagattatgggcaaaggtcctgaactcctaagatttctcaaaataaaattaaattgtgtatttattttgtaaaatgatgccattagctcattctaaatactttaagagaaagggttttagtaaatatttaccatgagttcctctttccatttttttttgctcaataattgttctggatggaaacaggtttttcggtggccattggaacgacgatgctaggtatcttcgtggtaagtatatataaatgtttttctcaaattttgtttgactatatggatgcaaaatttaagaaatgaaactacgtctctgaaatctgttgttattgagcaactaaacttgtgtgatgttatttaacctggtataggtcgcgtttctaggagatatagaatttttgggtttcaacttccaaatattcaaaaaaaaacaaaacttgtgtgatgttggcgttttaatcgacattttatcacagttgaaaaaacgacattttttattttgttaaaatttcgtactttaatgaactctttgaactaagaattttcatgtactagttttttttcttttaactcgtgaaagcattgaatggtataatatctggctattcgcagattccaaaagccatgattggcctcattcttgtcgataaatggggcagacgtcctctcctgatggtgagcatgtctttaaataatttctggctgttcgcagattcaaatctattagtctatattgatttgattactattttgacatagacttcagcgtttgggatgagcatgacttgcatgctacttggggtcgccttcacattacaggttattttttttgtaagataattactatttttatttattctgtttttaaaccaataacttatttgtttaacaatgtttttgcatgagcagaaaatgcaattgctttcggaactaactccaatattatcgtttatatgcgtaatggtaagacattatatctccttgtacacaatctttttgatgaaaatatttacgttgatgtttcttttacatataaaatatagttaaaattgatattttttaaatcggcagatgtatattgcaacttatgcaataggcttgggaggtctaccttgggtaattatgtcggaggtacataaatttacttcactgttaattttatttctatgcaggaagtaagtaatatgtcttgaaaaataaagtaatatatgtatgatttttggtgtgtgcagatatttccaataaatataaaagtaactgcaggaagtatagttacgttagtctcattttcaagtagttcaatcgtcacttacgctttcaactttctgttcgaatggagcactcaaggtattatgtttttctttttcttaatatccattttatacaattttggttatataaattatcttgtgatcaacaaaaaaagttataacttatcctttttttttgtatatcgcatagaaataatcaatgattaagtctagaaaacttatatagttttcaaagtctgtgtttatagcatttcaatgaaacctcatatacattttataacacaactatttgtttattttattttaaaagactaattagttaaatttttggttgagtgaatatgttatatagtttgtatttattttattttctcctaatgtctatatatatatatatatatattataattgcatttaatttataattttcttatatagtttaattaatgtaataggaacgtttttcatattcgcgggtatcggtggagcagcgttgctttttatatggttgctcgttccagaaacgaaaggattatcactcgaagaaatacaagtttcacttattcatcagcccgatgaaagaaatcaaacttaatttgaattattttattttattataaaaatgatcaaattcagtttatggtgttatatttgtttatttacaaacaaggatttttttttttcattatgtaattactactttatttttctgggtaattagccccatttttatgatgtatatttacgagatgtaaaacttggcctacgtacatgtgtattttatctctaaaattgcaaatgtaatatttttcggacatatattaaagaagagattgatttctagtattgggtaactagggtaattaatgatgaacaataaacatgcgattaattaatctaaactgttaagtcctaatattgctgtttaatatgaagtagctagtatatttagaaaactatatatttcgaaaacgtgatatctcataaatttgatttaacattggataacatttgtggaccaccatgcatcatgcgtgctggtaagttgattcgacaaatttctgacgtttgtaagttgatggctaatattaattagattatgcattggaaccacatagatatttcaaaaacaaacatatttaggttcgattcatcactagtaatatattgttttgaccaaggactttactcatgccctgaagcgacaatctgtctatggtgttgcatgtttttgaaacgaaaatctgtctcacaaaccctgtggttaatatctcctctggctgaagaatatgaaaccttagattggaaaaccatctatgaatttttgtctttgaaggttttatcactaccgcatctattatctctatccgtgaatatactgagcttatcccggagtgtcaatttagacacatctctgccggacgttatcttcatcgactatccactgaagcatcttgacaccacttcaatctagcggccaaaactaggagttgtgatttccctgtttttgcttaagctttttcgaaccatagctaactgttccccgacacacatccagctagcttccgatctagaatttcattcttacctgacttcaagggtcctcgccatccaagcttccccgtcatggaaagaaccttggctctggttccatttgtcgtttgtgccggcgaatagtgagactaagtacctttagtaatcgtcacaaaatcttttgatagtgactagttctaaaatacctgaattgttcgtggaagtctctttgacacaccaagaactcgcttgtggcatgttgctagctagcttctgtctctgagattttatcataaaatttttatgggtctatcctcaatgcttttaacttatcctagctatcttatctttattgtaagaatgtgcttcaagtacttgtatcctttgtttctcctcttttgggtttgattgaatgaaatcaattatgttttgcacaaaaaaaaaagacaatttgacaaacacgtgaatgcaatttgattgagttaagattaattagtacaaaacataataattgaaacccatgtaagtttggttgattctatgtaaacaaccgtttttctcaaaaggtatatatttttttgtttttggcattcaaaagctatagtttgtttctaaagtaatcatttttagctgatcaaaaccaagtaaaccgattaattattgtgtgaatgatagttaggtgttgcatttgtgtgtaaatgaccttaatgtatagtagaacggaaggttgctgttacatgattatctaaccggttctcagatggaatcgaaagtagaaaattcatatggaaccgaagttatgcgattcaataaaaccatatcaaatgtacaatatatttacacggtaagtacattgcattagtaagtaggtatgaactcctgactccatgtatagtagaaaagggattgattacataaaatacattgactgcgtgaaatgtatgataagtgcttggtccttagtcctttgttgtgtataaggagcaatttatcgggttttcgatcataaaatgatatttttcattttctaatcataggctttttaaggttttttttttcatcctaagcacaagtgactttcaaattaatcttcatttttatgactaggagatgtaactattttctagagagtaaactctttcctacatgtatcgaacccgtgatctccaaaatctctacgttttcagtaatccatggatttaaccatttgaccaactcgaagttgatttatttttgttctgatgtataatataccaccttttgtattgatttcaaggtgaaacaaatttttttataagacaatttagtttgaaaaaaaaaagggagattaaaaaaaatacactatttatttttaataaaacttaaaaacatctgttaacatagaaacaaatcaacgcatagttttgtttttttaagatacaaatagttagagaacataaaataaaatttagatttaaggttagaaaaataaaaatcgaataaaatgcagcaaaagattatctataacatgtgataaaatggaataatatttaaaatagctgtactttaatttcttttctttcttttggtgcaaaactttaatttcttaaaccaataaaatttaactggataataatctgacccataatttccttaataaaacataaaaattaataaaaaaatctcacatacagttaagtacaatccaatcccttagatatattcccccccccccccaattgaagtaaaaatcaagtattaagagttaacaatcactaagcattccaataatatatttttcaatggaatggaattaccattgtgacataactttttgttttttgtcaaactgtgacataacataaaaccattaaagaaaacatgtgtccctcctttaataagaagcacattgtgacaaacagagcattctctctctctcacactctcctctgtctcgctacctctgtctctttctcgagcactcactgttttatttaccagaaattgtgttgtatcattacatgcatgcataaaatgatggtggtggagaaagaaagaagcatagaagaaaggcttttgcagctcaagaaccaaaacgacgattcagaatgtcgtattactgcttgtgttatccttagtactttcatcgctgtgtgtggttctttctcctttggtgtctctgtgagtttcttatcctcatcattcttctttgcttagttttttcttgatatagtaaaaagaatttttttctttctttctgttgtcaacttattgtattaattgggaacgaaaaaactttacaaggataattacaaccacatatcttttacctttaaaagaagaaaaaattacaaccccatgctatgggtttaacataaaaaaaaactttaaaaaccaagaaagggcagatttagattcactatatttctagagagtattaaacccgagaccggagtagaaaactcttatatcttgagatttttacaactcctacaactatggtttaagccatataggaaaatttccggcgatgcctgaaaaattccggcgaaaaagtggatgtaaagattgtcttcctaacctaatttaaggaaccaatgacgactactattaaataagccactgcatttatattacacactaagaaacaagtaatttattcagggtagctcaaggtttaacaagtaaaaacaaattaaaacgttttttttttgttttttttttttgtttggcagcttggttatacttcaggtgcagagataggaattatgaaggacttggatctttctatcgcgcaagtatgtcttcttctttttttttcttgtgcaaatcgcccaagtatgtctatcttttgttcttttccatcaacatttattaaattaatcaagtcacaagttgtttatattaagttattaaccgtaatgtaaataaaagaaaataatagtggtagtctggtagatggcgaaaagacacattgtgacattgatcagtgtcttaagggagatgatcagtgtacttaagggaggtgatcagagctgtccaaatagacatgaatttatgtatagtcctattagatcagtattaaaatttcacatctatttaaattccatattattctttgtcagattgtaataattaataatttcttatgaagagaaatatatgctgtcgttatcccaatgaagctgcacttggttggcttgtaggcttgtgggggtcacctccatttttactcctttttcgaacttcttatcataaatagtaaccttacgaaaaatgttatagttctatatttattaaagatacacaaaatgaaatacaccgaaaacagaattgtaaaataacattcaatcatatagttgtaaaataccattcaatagatagatgacaaactatatataagttttttttttttagaaattaatatcgcaataaaaaaaaaatattaaactcaacttctgcagtttgtctttgagttaatatttttttaacagttttcagcatttgcttcattatccactttgggagctgcaattggagctttgtttagcggtaaaatggcgatcatccttggcagaagaaaagtactttaattacattttcactctttcatattcttaagtatggtttgataatcaaattttaccttttctgactaaaatttttcgtatatatgtttttgtatattttcgtatctgtttgctactaatgacaatattgcttttcacgaattaaagacaatgtgggtgtccgatctcctctgtatcattggttggttctccatcgctttcgctaaggtatgtgaaatattccttaccacaaacttgggaccgcaaacttattatttgtactgttagtacttagaagattaacaaactgtttatcatgaaacccaagaattagttaatcatttatattatgtttggaacacaaaaggatgtgatgtggttgaacttcggaagaatctcctcagggataggactcggcttaattagctatgtggtaattaacctaatatatttaatatagccttaattaccttgtttttatttacttatatcatctatatataaagttattttaaaataatttaatgctatttactgaacaggtacctgtctatatagcagaaatttcaccaaaacatgttcgtggtacatttacctttacaaatcaggtaatatatttgttctataaatatataaggatcagcatcgacacaaaaaatagaaatatagaatttctcacccatgtgaccaaattatgctagaactaagcagaagaaataaatcaattgtggggacatatatgatctcgacagaagcaacaaaacttttatcaaatattgagtaaataataattttgtcaaaatccaatatatgtcttcgtattttttaaaatgtcaaaacgaaatctgtgtaaatttttatattatacttgttagctttctcttgagtttgacccttttgattctcgtgtgattgactgattattagctccttcaaaactctggactcgcaatggtttatttttctgggaattttctcaactggaggatattggctttattaggtaaatgttactaatttatgatttttaacagtaaaactgttatttatatttgatgtggaaaagataatttacatacagtaaaagatgaataaatagcaagaagaatgtggaaaaccttgagttgttatattacaagattatacatataaatgtgtatttttctggtttaggtgctttaccatgcttcattcaagtaatcggtttattcttcgtaccagagtccccaagatggctggttggtcatttattataaatattttttaagaaaccccattacataatttattaaccatgcatgagaagaaatgaaatgaagctaaactattttaatttttgaaggcaaaagttggctccgataaagaactagaaaattcacttcttcgtcttagggggggaaatgctgatatttcacgtgaagcctcagacattgaagtgagttttataatatatatgatagtattattattataaattacttttagtttatatacactcttttacaaatagaacaatgtaaagtctcagtgatttttgttttattttcaggttatgaccaaaatggtagaaaatgattcaaagtcgagtttttgtgatttgttccagagaaaatatagatacactctcgtggtacagtaaaattaagtcaagtgttacgaaattagttcctaattaattttcatatttatctacacaagcattgaacttgtgtgtttgatttctcaggtaggaatcgggctaatgttgatacaacaattttcaggaagttctgcagtgctctcatatgccagtaccattttacggaaagcaggtaacattaagttttattacttcttatatcaaatatcagctataataatcatcaatagattgacaaaaaacagtaaaaaatttttttacatacacactaacatacagcaatctgtctaacatatagttttccaaattttgtgagactttttaagaaataaatatattttctctactatttttatttttgaacaaatatattttctactattgttattgatttttcattccgataccaccatctcgataaataatttagggcattggggtttgaacttcaagatatccagaaacaaaaagataaataatttcggagatttatttgaaaaataaaatatttacttgagttctcttacagttttagttttttctatacaggtttttcggtgaccattggatcgacgctactaggtctcttcatggtaattacgcaatcaaactatattacagttttaatattttctatacatatttttgactatatggatgcaggatgacacatttagcaatcaaactatataacttaatttatatttgtttctaagatattatttaaaatgatatagagtgaggacaatatagttttagaattttacaaaataatcaacatatcttttcgtaaaactttcaaaattcaatgaactttatatatatgcttatgttttctttgataattagaatttcattttgtaatattcgcagataccaaaagccatgattggtgtcattcttgtcgataaatggggcagacggcctctcttgttggtgagcacctttaagacatttattttcttattaccaataaatagaaagttgaaaagctgttttaatgttgatctaattcctattcggacatatagacttctgtatctgggatgtgcataacttccatgcttattggagtcgccttcacattacaggttctgttaaatattttcttagtgtctataacataatttatgttcaaaaatttttggtatattaatatggttggaacagaaaatgcaattgctaccggagctaacaccagtattcacgtttatatgcgttacggtaatttttcaaaaatctactttcaccgtaataaacatcgttgtggtatttttttttcttctaaaatattgagtttcttgattggcagctgtatattggaacttatgctataggcttgggaggccttccttgggtaattatgtctgaggtacataattttagcttcacttttattttcaatgcagaaaataagtatttgttttgtaaatgaagtaattatatgtataatttttgttgtgtgcagatatttccaatgaatataaaagtaactgcaggaagtatagtaacgttagtatcatggtcaagtagttcgatcgtcacttatgctttcaactttctgctcgagtggagcactcaaggtatctttcttatttttgatcctcttttaagaaactttaatccatagtttcatttaggttataaattatctaggcaaaaaaaataaaataaaatcttaataaagtaaaagtagttttgttttgtcatctagcgactaagcattctaggcgctaggcggaagatcactgccgatttagcgcctaacactttcttaaacactaatccaaaccaatgatatattaagtctaaaacatgaatgcaattggcataattataaagcatatccacagttataatgcaattatatgtttttttttcagactaaaccgaatttctgaaaaataataagttagattttgtttgaaaaattatgttattattatggaaagtaatcaactaatactatatatcaatgtaacaggaacattttacgtatttggagcagtcggaggactagcattgctttttatttggttgctcgttccggaaacgaaaggattatcacttgaagaaatacaagcttcgcttattcgtgagcccgatagaataaatcaaagttagattgaaacgtttaagttttattttaatagataaataattaaaatcaatttatgatactgtgctaagaaagtaattttttttttcattatgtaatcactatttaatttttctaatacttagaattttttatgtatatttccgcgatgtaaaacaaggcctatgttcatttgtattttatccctatgattgcaaatgtaaaatgtttttgtcctcatcgttcactaataaaaaggttaagaagtttaatatctagtgttgtataaacaagggccaaccgttaatttttttaaatagcaactattctgttataattattaatttttatttttatttttattgttttctatagtttaaaaaatctacctttttaagaaaatagttttaacaatttttgattagaatttagaactaatgttttttctattcatcgcgtgtcatcataccaaatatgtaaatgtttttatttaattgattttttctactatttttcagcttcttatctcattttttgacaactactaaaataggtcatactgttttttgttaaacgatattatcaatcaattccacttttttttggtccactcttttgataatggaataaacacaaatagtgaatagtgagtgaataatgagttggtcactttcaaaacctaactaatggaactgattcaaccttatctttatatcatcccgagtcttcttttttttttttgttgtaaagaaagtttttaaatgcagcttactggcttgacaaaaaaaaatgtagtttaccaaaatcaattatttttttctttcaacatcatgaagatcatctatcatatgactttcccaacactaaatgacatatagttaaaatctatacacaatattctgtatattattatcacaaaaaaaaaaaaaaatgaataccccactttccatattggcgtgaggacaaaaataaacaaattgctgtgaatcatgagaagtacatctacaattaagatggcatggaagggactacatgtttgttcattgtcaataaaaaaaaaaaacaaaggaccacgtttgttaaatatacataatttttcataatcaaagttttactgtactattttttctttgtacactagggaaataaaataaactataactacgtatttttatggccaagatataaaaatctcctcttcaaacagctcaggcaatagacaaattaatctccaaccacatcatctcctgcacattggctcgaacagacggtgattccacactcctttagtcgttggagtctacttatgcaagtcccaaagcgtcgatgacaatatcttctgttctctagtgtaaaataagtgccatgtttgttttaacgttttaaacatgtctctctttttccttttgtaaattacctttttgttgataaaattaaaataacatttcaacaaaaataaataaaaaaaatcatttccaaccaaaaatagacttcaccattttattttagactgacttcttaccactatcccaacactaaatggatcagattctgaatattataactaagtgaaattacaatatttttttacgaaaagtattataaacatattgtccatagtctttttgtgtccgaaaccataattagttgtttgtttgtttttcggacggaaagaaaaattagtttttagagatattgttaggattcaaacccatgacttggtcatctttaaacttaaaagatctcaaacttaatagatatttggggatttgaacaaacaaaaaaagaagatatttggggatgtatccatatcatcaccaaaataaaggattattaagaggaagtatactcttcgataaacctaatctcaaatgaaactgaactgaacctaacaagagattactaaatcgaaatctaagactgagtttgatcatagaaatgagatatttactctaaagatgttgagtttggtattatatctcataatcattggaattgtttcttggctaatagagtttgagaaacaattccgatgattaacaaatatgatggcataattaagtgttacatatatcatatatgatatagtgaggcttgttaattctcggtaatcatcaagaaggattgtagataataaattattattattaatgaaacgttactttgctcccgtttctcaaagaaaatgaccactgttcgctgtttcttttaatgtttacgagatccttacccgcacatacgtgcggaatttcatatttttggaattttatatttttagttcaatgtagatttttttgttattttatgatatatattatagtataatgtattagatatcagaactcgcatatacgtgcaaaatatgaaaaaaagtaatagatttttaaaatatatataatattttgttataagtaaactttgtaatagtatagatattataaaggtaagaataacaaccaaaattcaattgtgttcgtgtataattatattttaaaatctggactcacacggggaaataacccaaactaaaaccaaatttatatcctattttacaccagtaatcaaactgttataatgttttgattagtttagaaaattaaaacgtatatttgacgtatatttcttggaacggaaaacccataatgtgatgtatctatcataaattcttcgttccataacccgtctgtatatgtgaaataaaaatactaccaacgcccatcacaaatagaatttgtgtcacaaaatacgtacatgcagggttaatttattttatatagtgctcataacccaaactcataccagttggatatttaatttgatgtccagtttggtttcaaatttctttatatagtgcttccgtttcttttcatgtcgtttgtgtctcataattcctattttcatttcattccattgaaaatacgttccaaaattcttatttgcttacctttaaatatcatgttatatatgactgagttttgcggattaacatataggatgttaaagtttacaaatatatcataaattaaaacacaaaaatactctttcttgattttttttcaaattcaaaaatatgaatagcattataacaaataattttgtaaaaatttatattttaacaaatgtaataatgtttatttccttacctacatgtttaatattcttctttcccttgtttaatcataattaattggatttttggaatataattaaaattttgaaatacccctacaaaagcaatttattttgctggataatttgttctgaatgaaaaatgtataattagtttatattatttcaaaagtttgtgcactaatatattatagatttatttgaaaaaagatccggttgaaaaatagaaaaaagaaaatccaaaatatttcaaaattagtatgtaaaatttattgtttagatatttctaaatgtaaggcataatgataattattttaaattaattattttagtttaattcatagtaaatattaatatttgtaacatcttatctcgtttttaaaaattttaaaataaattttcgttttatatttcaaaatacttaacccaaaattctaaattgaatttatttatctatcacaaattatgatttttttattcatgatatcaagcaagtcttatgattttttaaaattttaaaataaaacttaacttccaaaatgttagtttaataatattgtataatttgatatcaaatctaagtttttcaatttttattggttaacaaattttaagaaatatattttattttttcgtctataattaataggaaagagaaagtgagtttaattttgggaaactaataattacttaaaagaatattaccaatttttatatttaaatatattaattttgtgattactattgtattcttaataaatttatttaaaaacactaacaatcaatggcattctatgtaatattttacccttcataaggttgtttattttcaatgatttccaattaatagtatagatgcatctcgcaactggatttttttttttttttttttgtaaaggatcttcatgaaatttcatcagatgaaaattttacggttcgcttaatgagaaacggttcgatctttatgtgtgcaaggttagtaacatcttacattttcatacatattttcatttcgtcatattatttatataaaacaagaatacaagatatatattttaaatgaaagaccattagacgttacatgtattttgtgttataaaaattgacgtatttttgtaagaccgagtcaccaaaatgagttaggtacaaccgtgcaagatatcgcttaatggactcaatttcatagaacatgcacatctccaattatttacgttttagctcaaatattatgttttttttttcctaagatttgttttttctttccctggcagatttgattaatcaaataatgcatgtgtgtgtgaacacgtaaaaaaatcgtgtcccaacttgtttatggccatgcaaaaataacgaatcgaattttgtaaaaaatagcactttcataaaagtattttgacactttaagatctaaacacgaaataagagcgtacctccacttaatatcttgatgcaccataatttcattaacgactagccaaagttataaaccacaaactaagttccaatatataaactaacttctaacaaaaaagggttatccaaatgtgtatatctatagttctttattttcttttgacaaaatgtggaaatatatagtaacaaaactaaatatatattacatattcggacaccaaataaaactcgacatctttaagaaatgtatataaagacgcatcaaacatatcctcacgcatgcatgcattacgtatagaagaacatacaaaacactctttctccacataacatacaaactttcctcacttccgatcaaattacgaaatggaggcgtcgttcattagatcgctaccgtctgccggaaacttcgccaacctattgccgaccgggaccgccctcatattcgaaaccctactaccgtctttctccaatggcggcgagtgcaacaacaaacccgtcaataaactcctcaccattactctcatctccttttgcgccgcggcttgcttcttctcctccttcaccgactcatatgtaggccaagatggccgcatttactacggaattgccacctctaacggtctccacatcctcaacgactatccagacgaaggttatgatccagagtccggcttaacggctgataagagagagagatataagctcagttttgtagatttcgtgcatgctttcgtgtcggttatcgtgttcttagcgttagccgtagagagctcggattttcggaggtgtttgctcccggaggacgatgaaaacagttggggtggtcattttgtacttatgatcaagtactttgctgttatggtgttgacaatggcaagcttcttctttgctatctttccctcaaaacggagaggcatcggaatttcagacattcgttgattcataacatttatttgtgtatgtacatatatgtgcctatggtctaaatatgttgctatggtaataatctttataccccaaattccatgattgatcttatcttattcaattcatgatctttataaacgagtaatcatctcacacggtctaaaaataacaataagcaatgtaggctttgcggtcctgtggaaagaattgtaaagagctttgcctagtcttattgatcttcatgattaatacacaaatctttaacaagcaagaagagaagaagaaggaataaaccagaagaaaaactgatcaagatggttgtgaatgttatccatctcaaatcagatatatgctgtccaagactccaaaaccagctgcaacgccgccttcatctgatgatgcgatcttcgtgcgcattagataaccactctgctcgtttactataacttcgtctttgctcctacatatttcatttaatcaaagattatggcacaaaattaagttgagaattattgaagcataccaaattcttcatctatctgctctgtacctgaggtaagcaccatagacaccgagttctgatatagcttgatgcttatggtaaacgccttctcgcaccaagaacatgtttgagacttttgggaatatcctctgcatcaggatatacgcagcgtttccttcctctccttctttctgcagtctcaaaagattttccctcacatcatctccatagatgttgtttcctggaagaatccaagaagacaggcttagaatatgacccgaaaagttgaagatattgggggactcaattgggttctaacctccgccttctctctgaggcttcataacaaacaatccgggtttttcgatagcctgcttgacaatttctgagtcatccaagctccaaagcccagcaaagcatttcctcagcttagcaatgtcctctttgttgtccagaaacctgtttctcatgttttaagttaaaaaagttttcgcctttgaaatatttggaaacggtcttcagtatcagcctccatttacctctcgagaacacctggtttagccagttcttgctggattttcttggagccagttaaatggtaagctatgctcgggcatttgacagctgaagactcctcaataagcagcctagcattccattcctgcaaattgaaacaaataaaccaatgatatgattcagattttcccaaagagtaaagccacaatattggaaacttgacggcaacttactgattcagacggatgatcattaggagtatagccagatctgaaataaaccactgcgactgcttggccgccactgcaacaatgaaaactcttaacatagctttcaagatgaaggtgtaagttctcaaaaaaccacaatgcaaacaaatgcttacacaataagggtttcatcctcttgtacactcccttctttttcgacttctgctagagtcttcctgatgacaactatattatgcgtgttctgaagctaaggaagaacaacaccattttttgtggtacaaaatatagcataagaagtcaagatcgacccctggaaaccaaagaaacaagacaaaagaggatatttttctctcaatatactgctcagcaaatgttgatcgtacatgttgcgttcttctggctgtacaattaccatgactaccgctctgaaaccaagaaaaactctagctttaaacacaaaaacgtttaaattacatcactgattcttgatttgtgttccaggctaaccttgggttactgtactccaaccaagctttagccaatgcatcagcaaattggattgtggatgtgtttataggtacacgttcagagtctatgccaatctgatccccataagatcgaagcaatgacctgcaaacaagtggaataaaattccgctgtataaaaaaaacacaacaggtaatgcagaagatggtctgtcactgttacatactgatgtagctggctaacaagacgactaaggccaggaaacgaacacgagatagtattcatctcaatctgaagaagtgaatttgtttcttcgtcaagcatataatcaaaccggtgtaaacccaaacgaatgtcctgcgatcacaaacacaaccaaatgaacaacatccagaaccaaagaatcaagataaacatgaaaccagagataatgtaaaaagacctctttcttatttctttctagcatcttggagtgaatgtcaagaagtctagatgtaaagacatcaactttcttcgttctagaacatagaaaatcaatcaaaagatcattacgcttgttattagatgatataatccaaagcagatagattgcgatacgaacctagagagactatcctgtaagaatttgccatccaagctaacacgatcaatcaattcattgaaaagaggagtaacattacaagcttgcttccaataagcttctgggaatgcagttggtagcaatgcaataggtgcgtgcatcaatccaacccctggaacatttcctgatttctgtaatcatcaaaaccaatcaaaagaaaacacaaagctttggattcagatcaaacatggcatcgaaagctataagacaacgaaactaacacaatccaggacgaagaaaatgatgattcagctatacaaggttcataaagataataaatttcgaatttttctctaactttatcagaacacaagatcaaaagacaggaactttagtggtgggcaagtaagtaaacctgataacttttgtcaccaacgacgagtccgtgaagagaagaccaaacgagagcatcgtaaaccagtttctgaacaaactcatcatctaatttctccaaatcgaaaatgggtttctgtgattccatcttaaatgatctcccacacctcaaaggtgactgatttctcagagttttagggttctggaaaaggaagctacttggattgagtttcagcgaagaagaagatgatggagaagaagaaatagagaaaacagtggcattgcaagtggaagatgatgagtaagagagagaagagcagccactgcccatctcagtcaaacaaagatcgctacgattttttggtttgattttttttgtttggatcaaaaagatcgctactacagtatttgttctctttttcgttttgttaaattagtaaacataattttgttattatgattgaaatatttgtattatgagccaagtgattgtttcattatgattgaaatatttatatttaagctaatttaactctttaacaaaaagattaactatacttcaaaaaaaattaaagatgctctttgaacactgtccgttcagaaaattcacaagtttttgatacccatgctcttaaagtattgttgttttggcaacatttaaaacattttgttatttttttctaaagtggtgaggtaggtgagacttgtgctaagtagttgtaacttgtcctcttatctggaggaggacctgttgtgtacaaattgagtttggatatataaattgagaatttctaagtgaattttggaaacaaagaaaaaaactagttttttcctccaacacaatcctcttatcctcttaaaggtcccagcttgactcattaagactctatgtgtttattgttttcactagttacttgaatgtcgaacttgaatccttgataacatttaaagtagaagagatcaaagaaagtgacagaagcagcaacaaccagtctctgttactgaactacaacaaagataaatgaggtatacaaagagactaaccaatacatattttttctgatctttgctcgtattgatgatttacctcgcaaaatagcaaagtttttctagggacctaaacagataacattcaggcttgaattgtaagagaaaatttgaagaaagctaacagttactgactcagtagaaatcaggaacatgttggattttattctttgtctgaaaactgttgacactctttgtccacaatgttgcaaaacttcataatttgatccggccacagagccgccagtaagctcctgtatggaaaagagacttctcaaagacccatatgtcacgtacaagcacctgcacaagcaacaaacttgtaactcccttgtaggtttaataacttctccagatttccaaatcgattaccaataagttgaataagatatttcattgccaaatgttattgtggacattctcaggaggttcatgtggatatagtctaatttttacagtattgtcatttggttgcagtctagaaacaatcatcgaaaagcaattattaaactttactttacctctttgttcttatctccagctgctacattgccttttgcatcgtatgcttcaaatttctgaagatagaaaagatctcaagaactcattacagctttgtaacactgacctgctttgtaagaaacaaaatgatgacttaaagataacactgacctgcttcgtcagaaactcgagtgtcagttgtataaatgctttcttaaggtccgtccggtcaattccaatctgagaagttgtcaaaaggatgaaaagaatagggtgagtttgaaaatccactagcggagagaatcttttatcattcattgcttcagatcatattctcagtatctaaaataaattcaaactgttaaaagaacttgccagtcgagcttgtaaagttcggattttgacaaccggctcaaccatttcccagtaaacaccatcccacatggcttctctttgtttaatttcgttcttcagtgcctaatagtgaaaagaaaccaaaatttaacattacagaaaaccatcacatcttcaacttcaatacaagaaaaaactgataatcagttagatggaaaacttacagagtacattctttcagttacgtttttccttatcgtcttcttctcaccattggccatctgaatattaatctgaagaaaacccgggtagctaagtcaagatgattgttaaacattctactgtgagactaaaacaaacaaaaacacccaaaaggtatgtaagtaatacctgtttgtataactctagtgcttctatgtagaacgtattcttcgaatacccagtctttcttaacttagcgatagcgtaggcacttcttagctgaaatttagagttttgacatgtattaagacatctgcaaagcaaatatcccagtctaataatgcatgaatatgtttctacctcccgtataaaatcctctttcgttcttcgccaaccacttcttgtaaaacatctgaacaacaattaacagaaaacagccgaggcaattattaaaaactcaactctagtagaacaactatattgtagcttatagtcagaacttcctaaaacgattaacagtaaaaaaaaacaagcagaaaagggaagtttatcgcattagaaacagtatcttccaatttacctccgccaaatcgagattttctcccggagcgcatagggttcatatacaaatccaggacttaccatcgacactctaacagcaccctacactcataaattcaccaatgtgagagaatcaaaaccataggaagcaatatatttatatcagtgacattagaaaccaaaccaaatctgacaaaaagttcatgaggatgagacacttcacacaccgttttctgtagctgaggtggagccttaacttgcgttgtagcagaccttttttcattcataaacggcaaaaactctgcaatctgataaacaacaccaaatcatgtatatatgattcaaaccaaagatcaatgatttcaacacctaatgatgaatctgatgattattaccattgtagatcgaagcaaatgtgtattgacgctgtggccttcatataaacgtgaatacgcactttttccatgagcttcaggaactggaaatgtaaactaaattactccaaaagcatcacttcacagtcacattcaatggagaaattgagaaaaattaccgtgacaaagagaagaatgatagcttctccaacaaccaaatctgaaatcatctccaatttgaatcaaagagaactcatttccattcctaaatctgaagaaaccaatgatgaagaaagctaaaaattgaatctttttggtaacagaaacgattcagagttcaatttcacgtattttcctaaaacgcaatcaaagttaggaaatttgcttacggaagagaagaagattctcttgatccagctgttttcaataaagaacgaactgtttgaaatcttctcacgagcgacattttttatctgggtgaagaaatctcaaagaaaaaccctaactttcattgatctcaaattccatcgaaggatttttgtctgtgctgattcgactgttcaatcggaagggtttaaggcggaagagattggctacatcgcggagcactgtatctccgtgtgccttctcttctagactgaaaacgtggacacacgtttcggaaacgcaaacgcaggtttttttcacaattgggctaaaacatgagcaaggtttcaactttcaacaacacaaccgcagaaaatcacagattttgagcccaaaacgcataatcagtaaaaacacgttctaggactttcgcggtacaaagaatcttgatttgttatctcattatacagaacatcaatgaacatattacatcaaccaaaaataaacagataaacgaaaatggaatgacaaatgtgtctcaaaacaatatctggttatcgcatttggccagtttgttcttagtcccacattttcgagtcgactagagagcgattttcgagttttctgttagaagaagctgccttttgactatagaatagtgaaagaaatggcagcagatcggagcttcaactcatcgtctttccatttggattccggtgcagctgctccagcgatataaaccttttcaagattaagaaagagacgcagagtgagtaatgaatctcgaaatatgaatgtcgaggagtaatcaaatgtgtgttttgcagcagagaccttccctctgttcacagaggctactagagctatgcgttcttcatctctaccaaactcgtagaagtagtaatttctgcagatataaataacaagaatttcaaacagatgagtcctttggaaattctcctatcaagaacattgattcccgaaccgatgggagtatagtttgaagctacttgccttaaaccttcttcttcctttaccttgattgtacgagcagagtaaattgttgccgcacctgctcatgcataaagaatatcaaagacaagattctaagcaattttctaatatgtatatgatttagcgaacctggaacaaaaagtcttgcagctgccttcaatgatcccaaatcagatatatctttagcctatttgaatcagagatcattcgatgagcttagtgaacaaggcaaactgatgactgcggaaaatgtaaacttgtaaaggaaatgactttgcagtgcaaacctctaagaaagtgatcttaagttgatttgaaggacgaatgactacactcaaaacttctgatctgcatacacaaatgatttatcacacaagttatcctaatggaaatccaaagggattataaaggaagaggaacaaacaatacccatcaggagtttggaaccgggcggcgaaagtttgtggctttgccttgtcaccatagagagacaatcccgcagagtaatcctagaggatgaggtaacacataatgtcaagaacaatgatcatttcatcccaaaaaaggaagtagcaccagttttcaattcaagcttaagattctactgatcttgaaacacagaacacaatgtaacagtaactcttaaacctcaaaatcaaattgactagaacaacaaccattgattcagacctaacttggcagctaaatacattgatcactaaaaagtctacaactttaaccaaaggagcagtctttgcatcgctatatcactcattgattcgtattcataagagattggtcacagagtttacacacctcaggctcattgacgtcttcaaagtcaggaggaaccctaatagcgaacccactaccaaagtactggaaccaagacttagtgttcgcaatgccgagtcgtaacggtttggtagacttcaaaggatcagctaatgactctggaatttggttttgaaagatgaaggagacgaaacagagtgatgctgttctaagcaccacatctctccgaaaggtagcagaagaagagagaattttgggtttataagggttttgaggtttagggtttggtggatgaagagagagggagtgaagtagaatggccatgagaagaggaagaagaagaagaagaagaagatagaagaaggcttcattgcttcgaatggataagaagtggggagattctctgaagtgtttagaagacaaatgatggtgcaaggcgaagggtacaatagaaatttcgttttttttgaagggttatttggtccttttgtatataggcccattaggcccaaagtttgcatgcttttgatgtggctagtgatcctcggagcttgacacggtgaagtcatggcggcggagacggaggcagaatcacagtaccttaatgtactctctgctttcctcgccatcgaaccggtggactccgtcatcactctcgctaggtaaaaccaccatcattcccgccgccgctagcttctttgttccattagctccggcgtttgattttgcttctgtatgttcttttttgtgtagagggtgcactggaggatcaattactgagaacgcccagagatttttctgggaaatttgcgttgaagctgtaagtaaattctactcttttgaaaactcggagaaatgtggaagctttaagatatttgtagtcaagttattgatttgggacttgttagtgtttgcaaaattgaatcttgagttgtagtaatgtgtaatttactgtgaaactcgtgtattggattaggctgcgaatggtaacggatcatacgcgaagaagttactgaagaaactcataaatgaagttgagttagagaatggtgaagtattggatgaagtgtatgaagagtatgctctttacatgttaacttctaaggtgtacttttttctttgctatttgaagttttcttggtttttctgtagttgatggaaaaacaaaactaagtttggttgggtgttttaggaagatatattggtgaaagaaaacataaggataaccaaattcatttcttttcttttccctgaaggtaaagtcatgtctttgttgtgtgtgtttgtttattgtttgtagttactattgagatgtgttttgctgacttattatgtggattaggttcgtacaaacacccgagttgtccaaggtcgaggaaattagttattccgctgcattgttcgttgaacatgcttgaaggagataccgggtaggagtgtttatatgatcattcaattgcaagagtctcgtttcacgttgctcattttttatcttggggttctggcaggtgttccatctggccatcgagtctgtttctgtcagaatttgttttgtcatttccagagttattcgccaataaagcctgttttgaggttagtttattgactgatgaggtttactttgtgatctattatgttcatttcatgattcgatgaagctttgtttaggttggttctggagttggtatggtcgggatttgccttgcacatgtaaaggccaaagaggtatcccttaattgcttattaccaaagttcacatcataagtacaaagctatgttgacacacaaatatttttcttgagcaggtgatactaacagacggagatcttttaactttgtctaacatgaagcttaatttggagagaaatcacttaaactatgatgacgagtttctcaaacaacccggagaagctcagagtacagtgagtgttaaactctctttttgctttctgattcagagtatataggatacacgtaacctattcaagattgattcttattttttcttaaacagcgagttaaatgcactcatcttccatgggaaactgcatcggaaagtgaactaagccaatatcgtccagatattgtgtgagtaaaaaatctagaattatatagcagaagatgttgcttatctcactgacccttgcgttttaacagtctaggcgcagatgtaatctatgatccgtcatgtctccctcatctacttcgggtgctagtagcccttttaaagaacccacccaaaagaggaaatggctctctcgagactgaagacagagacacgacacaagaagaacacagtcccgcggtggcttatatcgcatctgtgatccgcaatgtagacacttttaatgtgtgcttgacacttgcagaccaaatggacctttccatcacagacgtgaccgcagaacttacgcctcgctttgagcttttaccatatatgcattcgtatgaccgctcaaccgttcggctcttctccatatcctccagataatgtaattctttcagaagcaatttagtttctttacaattgaaatcaaatattcctggaccgttatttcgaaacatattccaagatggttgttggttggtcaggtcgaaggtttggtggttgaaatcgcggttattagcatttcatgtgtttgcggaaatgtgtatgttgatcttagattaagggttatatatacaaccgctaaacgcaatcactggttgttgcaattatttgatttatggtttgacagaaattggaggatctctgggagtgcaaataattacattatcactcaccaacttcgatgtggcaggagataagataagatacttgtgaagattaaactaatcaaaaaacatcaatcaatttcttttggaaacttgtaatctttcccaaaagtgtaaaaaaataaaaatttgatctttttttttacataagtccaagattatcgtctggttcttgtttataaagagaaacacggactaaggcaataatagttttgttgaagttgagattgatttcaaagggatcgtctttaatggaggtgatacacgcatggtctgctccaagatcactcagcaccactctcatgtactcctttgcccaggtactctttttgttttcttaccttactcagagatttttcctggaaatggaacagatttgcccaggtactgttttatcatagaaaatttattgatgatctaaattttgtttgagtgattgaatcccaccttctgagcagtagagaaatagttctctgtgtattgataccaggaaagaaagaaaaaaggatcaaaatttttggttttaaatattcttcttggcttcaaaacatctatgtgtcctcaatgataaacagttccgaataaaagttttttacatttttgagttattgtgaaactatgtatggtgtgagttgtaacttgcaagatgctttggtttaaatttcttcagagagatgacattgaagtgcttgatgagccattatacgctgcgttcctcaagtctacgggtgttgataggccttacaaagatgagcttctctctaagatggtaagttaattcacattagtcaatttaggcatagaggagaaatagtataatcgtcgcgttttctaataggagtgtgatggagaaaaggtggtgaaggatatcatttatggtccaggaaagaagaaatataggttttgtaaggttatactcacttctctttctgatatagagacttcaattttgttctataccacactgtgtttgggataaatttgtgtttctggcctttctctgcacagcatatatcgaaacagcgacttcttggtttgccaagtgaactaatgagtgaagggaagcactttatattgatacgcaatcccctcaacatattggtaagcttctcaaactcacttctggtgttatgttttcgtggagattcttctgggttggttttgtcttgacgtttatgggtctgatcctttctggtttgagatgtttcctctctttgctttcgtttctttgtcttttcttgcagccttcttttgagaagatacacccttcatcgtttcacgaattgggactgggagagttagtatcgatatacagtgatctctgtcagatgggaacaccaccagcaatcatcgatgcagatgagctccagcgagatcccgaggtttcattgctatattatgaaattttcacaaggaaaccatttcttttatgtaagaagattcttatgttctgtgccattcttctattttcaggctacactacgcagtctttgtgatgacttagagatcccctttcaagcctctatgcttaagtagaccctctatgctctagtgatctcttcgatttgacagttaatggcaaaagcaatgactgtatctttattgtttgcgttctcttaaagatgggaggctggtcctataccagaagatggactttgggctccatggtggtacgagactcttcataaatcaacagggttctcgtcgccccagaagtaccctcaggtacaagacctgttttcgctgcaatttaagatcctgaaactcagacatcattcaaactacaatgtgttttgttttgctttcagactttccctttaatgcattacgatttgctggagcaatgtttaccgctgtacaacattctgaggtgccacatgaagcacaagtcatcgctcttgtccagcaccttacctcctcccagtctcccagttcctgaaaatgctaaacttcttgcttgggttggtgatgagattgtgccacgagagatggcgaaggtgcttgagccatacatggatctctgtttgttatttcttgtttatgcttatgttctgatgttatttgtctttattcttgcttaaggtttctgtttttgactcggtcgtgcaaggcggtgactctgtatgggaaggtcttcgtatatacaaagggaaagtatttaagcttgaagaacatctagaccggtaagaagcaagtaagagaaagtacttcttcgaatcattcttagtaatatgttgaagtgttgcatataggttgtctgattccgcaaaggctctggctttcaacaatgtcccaacccgcgaggaggtaagtatatgatgaagataaaaatcattgtcattgtttggaatatgggacttttcaatgaagctatcacaactgaaaatgcacagataaaagaagccatcttcagaactctcataaccaatgggatgtttgacaatacacatataagattgtctctaactcgaggcaaaaaggtattaatcacactttgaccaacttcaaagtaaattatatgcaagaagatgcttctttctgtttccatttcaatcattttaaacctaaacagctatcaattttgtttcttttaaggtcacatctggaatgagccctgcatttaaccgttatggatgtactttgatcggtaaagtttcagatttttctcttgcaagcatacaactaaactctgtggaatatggttttttgagtattatcgtttttcaaaatattgtgtagtgcttgctgaatggaagcctccggtatatgacaatgatggcggaattgtgctggtgactgcaactacacgccggaattcacccaacgtataaaattgctctcattgtcttgcatttatatttatttgagaaacacatttgctcagaagtgtttttgtccattgttgtttaatcttcttctaaactttctttccagaatttagattccaagattcatcacaacaacctcctcaataatatacttgcaaaggtaccatcctttgcctgtcatcgagttgaatccgtgatcatgtgttattagggacgtcattgtgagatgtttttattggtaatgacacagattgaaagcaacaatgccaacgtcgatgatgcaatcatgcttgacaaggatgggtttgtgtctgaaaccaatgcaaccaacattgtaagatcctcggattgaacattttttactctcaaagaaccgtactgaatctctgtgtagcatttggaaactaacatggtggaggaactctgttggtgcagttcatggtgaagaaagaccgagtactcactcctcacgcagattattgtctccccggcattactcgagctactgtaagagagaagaagattcatattctttctgataacatatttcaggactataacatgaccagtcttattttctaatccatgtccaggtgatggaactggtggtgaaagagaactttatcttagaagaacgtagaatcagcttgtcggaattccatacagctgatgaggtttcctcatcttttccttaatcttagaatctcaaatgatcactaactaagtgttatcaatccatatcaaaactttctaggtatggactacaggaactatgggagaactcagcccggtacatactcaatctctattttacaatcaaggaatatgaaaatctcaatgttttgagtgaagatttccttcttgtgaaacactttctggttggtttttgtgccgcttatttatcgaggttattggttttaggttgtgaaaattgatgggcgtgtgatcggtgaaggaaaagtaggaccggtaacaagaagacttcaaaatgcttacaagaaactgacggatggttcaggtgtcccaatacctacttaccaagaagtcaagaaccttgaaccatgtgtttgatcgtagaacacgaatggtaaaccaggcttgttaaatgtgttcatctagattcgtaaactctaacaagaacgttgaacaaaaggaaccttattttggaaaaatgaaatcaacgttaacataatttcatcattggttttttatttttgaagtactgaaaaggttttgtgattgcaggaaaaaaacattgcatacgaggaaaacggcacgtatttcagaggaaagctgtggtgttttacgtttttgaatagaaagtgcgtgctgttttagctctcaaactctctcatattatgctgttgacctgttgtagcctgtgggtcaatgtaatcacagttggtcgcaaatccaagtcaagtcaggctctcttgtttgacttttcaatttttttttccacaataacgataatgctgatcaataaacaaaaccataatatcatcaatttttgctttgagttctagtatatataaaaaactataaagtccttagtttgggttgagaagcataaatttaaacctcccacaatgaattttttaaatatgcattaaaggagtttgaatcctgataacataacaacagtgtaaataccaaatactagactactatatgctttgatctaaaaacataagaaaataacattattagtaagtaaagacacttggtttaagtagtaaactccctaatggatctagtttttcactttccatgtcattttcaaatattatatcgactaaaataggtgataacaaaaaagtaacttatagagagaaaaaaaaattagttcatgttggagacataacttttgctaatttaaatcaaagatcaaatgaatttggtttgcttttgggactatagtgaccacacatataataaatagtgtgattccacgagatttgttattggttaaaaggtaaaattgaaaaattgcagatcattttgtctttgtgcagattgccaatttttattcccaacggattggatttgccaattcaaagtcaacagaaattgtaattaaaaaaaaaaagaagcatatttgagttagtgatcaggatagacctatgatggctaaagactttctagaagaatatgaatatcaaagtagtcgtctataaatgatgacggctaagactagtaaacataaatttgttaattttttcaagtaattttttcttcgtgtgatcacatatcattaacatgttccaaattcatggtcctcttatcttgaataagattttagtatgtattgtaaactagctcaaaacattaacatttctgtaataaacgaatgaatgaaacttgccggtgaaatagtaaattataaaaaagagatatgaaaatgaccattttagatgaaataaaagatacttttcatacatacatatacagagtttaggaccatttcaacaacttcttcgaagtcatcgaactattttgatttgtatgacttttcacttccatctccaattggaaacttctgaccgtccacgtggcattcaataagtaacacatttgcttatgacatatcccctaacttcctcgcttcttctccacgactttttcaaacttttcaaaacctccctataaacttcagatccttattcctcacaatattaaaccaaaaaaaaaaactaactttttgggactccagaactaataatggatcccataaaacacatctctttaccagttcttgtcttgtttctactattatccgtgtcggcgggtcaacccggaaccccggaccagagacatgacccgtatgcttacagcggcagtctaagtccagccatggctgttgtcgttgtagttgtcatcgcagctctcttcttcatgggcttcttcaccgtctatatacgtcactgtactggcgcagtagacggtagcgttactcctgcaggaggagctaggaggagagtgacgaacgcaacggttgcgcgtgggttagacgcggagacgatcgagacgtttccgacttttgtttactcagaagtgaagacacagaagattggtaaaggagcgttggagtgtgcgatttgtttgaatgagtttgaagacgatgaaacgctgcgtctgttgcctaaatgtgatcacgtgtttcatcctcattgtatcggcgcgtggcttcaaggtcacgtgacttgtccggtttgtcggactaatcttgctgaacagacgcctgaaccggaagtggtggtggaaaccgatcttgaggcgcagcagcaatcggcggttcctgtaccggtggtggaacttccacgtgttaaattcccgaggtcgcatacgacagggcattcggtggttttaccgggagagagtaccgaccggtttacgcttagagtaccggaagaattaaggaagaagataatggcgaattggaaattgaaccggtcgaatagtgtttttgttttaccgagaggaggaagctcgaggagtggtaaacaggttgaccggtcgagggctaaatcggaccggtggttgttccgtaaaactccgtcgtttctatggaggaaccgggatgatggttcgattaggctaggtggtaccggtagtgttagaggaaattcagtaacaagtccgagcggtgactcggtacgagcagaccggtgggcttttcttagaaacccatcgtttctctggaggaatacgacgccggttccttcgccgagagttgaagtcaataataaggacggtgaaggaacatcgtcagttcaacatatcggtacagttggttcaactagcggttcccttaggctaccggtttagtgttcggtgatgttttgtgcattgttcataaacacgcaatagattttacgtaattctttaattttgtttgtctttttctgtaagatatttaaatcgacaatccaacggaaaaaggagattgttttacttaatttattttatactcttcaaaagtcaaacaaagaacgaactggagattggtcttgttcttaaaaaaaaaaaaagtcttgttcgtcgaccaaagaatacatggaactggaagatagagactacaacattattttatagcggtaatggaatgtattatctagttctgaattcatgtgtttatttctcgatgaatacgatgaacgactaaaaaaagagaggaactatataacaaacaaatttgttaccaattaatgattgttttttttttggggaaatacaacgttttttttttctcaagtagtattgttgtcggaccaaaacaaaaatttgtactaatatatgaatcaagtagataagaacaatgtatcaaattaaaatttcagataacagtttccacagttaatcatttgagcgtcaaaaaaagtaatatcatttgaacattgaagcacgaggtactttactttcagagctgagactaaagatagttcgagaagatcttattttaatacttggaagttggaaatacggaaatgaaatcatatacattaaaatataaaacatagttacttcatcagatagaccacgactaagtcgtttcgatacggattggaagattacttgttcaacaatttgaatagttacgtagaaagttgccatcattcaaattttattctagaaacataaaaatgtaaaaattaccaaacacacaatatagccgttgttgtctacaatatgatgatggtaccattgtttatttgtttttatataactgcatacgagatgttggaaaatgtttacatatattttagttagttagtttaaataataataaaataatttgtactttttatttaatttactctattttttaataattttatgttttttgtttattttatgtgacattcgatctacgtccgtaatcagattgagaatacaagaacgtctcatacctcagaaaaaatttatagttctgcattttgctttttttttgcgagagtcggcggcatctctgtcacactgaacagtaaagagaaaaatatatttaggatttattttaatcgtgtatttatactgtgttttttgggctgggtcttaaacaaatctgcccaaaaaatatatatatatatatattttattttatctcttgtgaaaatatgtaaacaatttattctttttgtgctgaatgattaataagtgaatgcaaggttccaagtttaagaaaatatatactcgatttgatccgacgaaatcatatggaattgcgagcaatacatttatcaaggttttaaaaattgagatttcaaaataacgcttttgttattataacgacaaacaaaataaaccatatttcttatagaaaaaaaatagttcgttctaaatttgtacatgactcaatatcttattttttaaatcccatatagtatcaaaaagtattaaattattaatgcacacaaagtcacaatcaatgatttatattaaataaaattgcattgactaactatttggaataaatcatggattatgtatactgtatagtatataattcgtatgcacacaatccatgatttatgttttaaaagacatatgaacacaatccatatctctgtgtacaatctaacttttcgaaataaatctaaacaaaaattgaatagtttataatttcaaagtttgcaattcaaatccaacataaaataatattaatcaaaataattaagtagaaacaattttgattggttttatgcttagttttactaactttgccattacgaccaacaatttttcactaacaatcggtttggtgacagaaccgattaataactttgccattacggccaacaatttttcactaacaatcggtttggagacagaaccgatcaataattttctaaaccgtactattgtaaaccggaatgttggtttatatgattaagatcacattggtataactctacgtgtctcgtccaatcacatttcacagcgtcaaggaaataaatattagataattaataaattttaataagaggaaaaaaaaacattcatcttcttcttcttcgtcggagtcggagcagagaaaggttttggagatcgagaccaaactccgattgaaagaggatgcattcttttggttacagagcgaatgctctactcacattcgccgtcacgattctagctttcatttgcgcgattgcttccttctctgataacttcagtaaccaaaatccctctgctcagatccaggtatgcctaattgttaattgcagagatctcttattgtatcatggatctatgtgtgcatgttttacttcaagttgttttagatccttaattttgctggattctggcgttgtagttggaaaattgtaatggttagagggaattttaaggattgttctggaagtttgttctttgagtttgaagaaacttttgtggagcctgatttttttaatgattgttctgtggtttgcagatattgaatatcaattggtttcagaagcaacctcatggaaatgatgaggtaaggtttcatactcttgcctcttcttacggctttctgtgtcttcactgtaagtttctatgatttgagccaccaatatatatgctctggtgtgctgagttatgtttatctggtcacgcttagtgggtaaaattatgcttattttagcataaactttaatgagattaggttttgtatcacaccgatctttagttgtttagtaagatgacagaaattcttggtaaaacactctaaatcgtcttctttagtgaagttttccttagagtagcataaattttggcttttttcttgatggttgaataaggtggcacttgttggtatgagactttattgagagtcatattaagcttagcgttcattgaatttgatggccataggggtttagatgcaactgtttctttgaacattgtagaaatatataaagattttacattagcctactcttgaaagtcaaattgtcgaatttgattatattatactctagaggtgatattagttaatgagtttatactcggttatttacagcttattcatataccagttaacgtgtctcatatattctaacttcttagcatttaacgtgtttgcaggtcagcttgacactgaacataacagctgacttgcagtcactatttacttggaacacaaagcaggtatagcatttgacaatacaccaatccatctcttttgctataacctgaagttttcccaatgttgttgtataccactttgtatggtcggataaacataaaaccaacactaacgaaaacatttgcaggtatttgcttttgtagcagcagagtatgaaacctccaagaacgccctgaatcaggtataaatctatgttgcttcaaacgctttaattttatatagcctactgctctcgtcagagctaagaactagttaagggttatgtggctttagtgttactcgcttcttcatgcctgtcatatagattgggaccccttttgttaatataccattaacatttgacatttttcttaaggtttcactatgggatgccataataccagagaaagagcatgccaaattctggatacaaatctcaaacaagtaccgtttcatagatcaggtacataaagcactttctgtgatcccctcttgaaataccagtccttcatgtaattctgaaggtatctgatttttgtgaatgggattcattctagggacataacctccgagggaaggactttaacttgacattgcactggcatgtcatgcccaagacaggcaagatgtttgctgacaaaatagttatgtctggttatcgtttacctaatgcatacagatgaagatgaagagcctcctcctgcatcatctaaggttaacaaaaaatctcttaaattaggaaagaagagagttatatttcaggtgttaagttagacttgctgatctgtatactggcatgaagttaaaaacattgttttggaatgaattatgagccaagaacatatgagattgtcgtcgactctttgattagcttcatacgaacataactctgcatatacccgatcaaaatttgatcgcattcataaaccgagcctcgaactccataagaacatgtaacataagaaacaagaaagtggaaacaacatggtctgttgtctaatcatgaagataggtatgagttggtaaacaaaactggaatcgttcatcaaatccaattgcagacaaattcaacaaagtttagcaaaaaaaatctcaattgaaagataatggagtaaacaacagaatcactaatcttcctctctatttacactcttctacgacttctcttattaccaagaagaactgaagaacaagatctaactcttgaagctaacttcacaaaattctctttcttgtatccaaaaaccaatgaagcaacgacgcagagaaacccaaacaccaaaaatctagcttctctcttcaactctttaaccacagtgacaccaaataaacaaagccccaaaaccttcaaaaccaattcactcttaatctctatcccagagattttgcaaaaaccataaatccaaagaatcacacaaacaaaaaccaaaattggcactttgttctttttccttctccatccatcaaatcttccccatcctctccaaaaccctaaccctcctcttcctcctcctcctccatctacgccgcccaaatcagcaatgacaagatccaagggctgtggtaaaatctggagattaggtgccaataaagacagtgaattgaacagaaacctcgtgattcttcgatacccaactctttgtttcctcttctttgcacaaagaaccaaactttgaaactgggtccgatgtgaaatcgaagaagaaactcgagaaattgatgaaagtctcagacttttttgtggattaagaaaatgaaacctactgagatgcgatgtcagatgaagaagagtcattaccgcaatttctgtcttctcgtttcttttctaatcccagtttggttagagacaaaagaaatagccgttgctaatgcgtatgggatttgtttcttcgaaccataccaaaccaaaccgaaaatcaagaaccggtaaattcaaattgaaagtgaaactttcttaacaaaattctcacattaaaagacgaattgagtttaaaccacggttaaaccatgctaaaccgagtaaaattacatttatatatttttaaccggaaatgttaaaccagaaccggttatttaacactattatcctcgaagaggttacttgaacacgattctcgttggcttcagacattttccatcttctaggtttctttctttctcagcaatttccaggtacgctgtttctgtctattcaatttctgcttttctgttgaattcgcattgccggaggtaagaaaatgaagtcaatgagaagaaaagaacgatttttttttttaattcccaacttgtgttcgatctctgagcagctcttatctgatacaaccatttttttggatataatatctaaatttgtagtctttagtttaattcagatcccaattataataatgcccttttgatctgatccacattgcgtatcaaaggctattattattttattcccagagttcaattatttagttggtagaatctctctgtgttgttgtgaatctgtctgtttatgtaaatcaattcaaaaggttgtgacttttgtgtttgacttaggaaaatggaagtgaaagctagagctcctgggaagatcatacttgcaggggaacacgctgttgttcatggatccaccgctgtagctgccgccattgatctctacacttacgttactctccgctttcctcttccatcaggttccttttttttccatattctgaggattttttgtcttggtgttattgctactttgagatcaccaaacctgtcattactgtattgaactcatgagtgaattgtttagcaaaagatctgagctttttctaattcacttggggatatagcatatgcatgagtttacatttgttcaaatttggtttgggttctagactttgaatgttcatgttatgattgtctttgtgttagctaatgtcaccaagtaatagtattatcaaagggcttgaggctgtgttaagatggtagagtatcctgccttctatgtactacgggtggttaattcattctgcgctcgtgcttactagattcgagttcaaacagctaatgaaaatgtgatttcttaagtgccaataggcagatttgtagcaaatgacttgaccttattactgaattcaattcatgtttgattatactcttttgtcccatagaaacaaatctgaaagctttatgtttctttattttttctgacagctgagaacaatgataggcttacacttcagctcaaggacatttccttggagttttcatggtccttagccagaatcaaagaagcgattccttatgattcaagcactctctgccgttctacgccggcttcatgttcagaggagacccttaaatcaattgcagttttggttgaagagcaaaatcttccaaaggaaaagatgtggctctcctctgggatctccacgtttctctggttatacaccagaattatagggtacataactctaaatagttgacatttctatgttcttgcaaacattttttccgagttcttcatcttgttgtgtttcacgtttcttgttttttaggttcaatccggctacagtagtcattaactctgagcttccatacgggtctggcctcggttcatcagcagctttatgtgtagctctcacagctgctctccttgcttcttctatttcagagaaaacccgtggtaacggttggtcatctctcgatgaaaccaatcttgagttgctaaataaatgggctttcgaaggcgaaaagatcatccatgggaaaccttctgggatagacaacaccgtcagtgcatacggtttgttctaactgtaaaactccaaattctcggatcaaagtttcaataatatgttagagaaaaccgtttctgtttcgtggtggttgcaggcaacatgatcaagttctgctcaggcgagataactcggttacaatccaacatgcctctgagaatgctaattaccaacactagagttgggcgaaacacaaaagctctggtctctggtgtgtcacagagagcggtaagacatcctgatgcgatgaagtcagtgttcaacgccgtggattctataagcaaagagctcgctgcgatcattcagtctaaagacgagacctcagttacagaaaaagaagagagaataaaagaactcatggagatgaaccaaggtctgctcctgtcaatgggggttagccacagctcaatcgaggctgtgattctaaccacggtcaagcacaagcttgtctccaaacttacaggagctggtggcggcggctgcgtcctcactctattaccaaccggtaaactttgtcaggaactttcaatcatcctttttgtcaatttcggttctttattcttaaattaacccctctctgcaaaacaaactcgtttcagggacggtggtggacaaagtggtggaggagctcgagtccagcggttttcagtgtttcacggcattgattggtggtaacggagctcagatttgctattgatcaggtcggaaaaatcatatttggcctctcaccattcttaaacttgctgacgtgtacgtcaagaaggctgcaattagaaattcaaagagtcgattttttcttataaatgatgtgttgaatgtaaaattgctttattattataccatgtgacaaataattgaaaaaagcaaagattgtttagtttttttttttgtattttgaaattgttatgtttcatgatgggaaatataaaatgacaaagtttttacttagattgtcacattgatcacattatttcctcgtatattcatagtttgtccaacttcatcatttcatagatatcataagctggtcttttggcatgttcatgcattctaagtaacaatctgtataatggtaagcttgcaagaccaagacgatgcaaatctctaacatatgcagttgcttcttcaattttctcctctttctcaaagtactcggcaatcgccatgacgatgttatgggatggcctccaatgacaccgcctcattagtacaaacacttggtgcatagcatcaatggctttctccatattctcacatttcacccatccctccattaagatttcccaggtcttgtagtttggagtacctcctctctccaacacacaaccatgcaatgactcggctttccggatttctccattacgcacataagcacccaaaagaacattggagaccctaacatcatagttaaaacattgagcctcccactcactaaacaccctttcagcctcttcaagatcaccagttttcaccaaagacgacaatacacatatgtagttcacacaactaatcctaccacaaaccgatttagaaacttcccacaaacgaacaactccttccttattccctaaagacgcataaagcgtgataagaaagaaatatccaagcctattacttctattcaacatcttttccgcatcctcaagcaccaacctagccttctcatcaaaaccactcttaatataaacattagctaaagtacacaacgaactccacccaacttcaacactcttatcaccaaccatttccttataaaccgtttccacagccgcaactccagacacttcacaacatgcattcatccaaagattatacgaaagaacgtttcttggtatcttattccctttcatcatcgaaacaaccataactactttctcatactgaccactagcttcataaagcttcatcatttcgttaaacgggtgtggagtaacaagaaaccctaatccattcaacttctccattagagcttccgcttctttaaccattttattcttcacataagcacgaagaagcggaagataagccgatttcgctactctcatagacacagaactatgtagcagcttctcaaaatactcctctccttgtttcaagccatgagttttgatgatcaaatccaatctaagagcaatgtcataaacactaaattcaatatctttttgattctccatccactccatcatctgtatatacacacattactggcaaaatcaaaatcaaaagcttagttctcagttttaattaagggaaaaatttcaaacctggagagcgagatcgtaacgatttgatctaatgagacgcttggaaatcaatcggagctccgataaagagacggcatgacccgaatcgatccgttcctgaagcagagaggtaacgctgcgtcgtggaccgttctttctcagtatctccttcaagctattccgatttgcgactgatgacgtgtccgaaccatctgcaagtgaagacacgagccttgatactacgccggtggtgttgaacctcgtcttcgcaaccgcaacgcaacgaatcagcatttggattttggagccgccgcgaaactggttcggtctttctcgagaatctcagagaagagacggtgagagtggatttgggccgtattaaattaagttgggcttacccggcccatatcaatagttataagcccgtttaaagaaccgacgtcgtatggtcaaaaacctgaaacattagcttccttcttcttcctcaccttcaagcgccgacttcgttttcttcgaatccaaatttctgtgtctgcttttgattcacagagaaggagcaggaaagatgttggatatcaatctatttcgtgaagagaaaggtaacaatccggagattatccgagaatcgcaacgccggagatttgccagcgttgaaatcgtcgatgagatcattaagctggacaaggaatggcgtcagcgtaagtatccacgattgatccatttgctctcttttaacgaattttgagctttgatgctatcaaaatttgttgtgtttcaggtcaatttgaagttgatagcttcagaaaggagttcaacaagctcaataagcaagtggcgcagctcaaaattgttagtttaatctcaaattttatagtaatcttctgttagatccgtagtggttgcttttaggatctggaatttgaggatttacttattagtgtgaatgccatagttggtgaatgatttagttcgtttgagctgcaacattgatgggagttagtaatagtagggttttgtttttggtttctttggaatagaaaaaagaagatgcgagtgagattattcaacaaactgagaaaaacaaacaagattctactgcaaaggaggctgaagttcgtgaagcttatgctgctttgaaagccaagttggagcaagttggtaatttggtccatgattctgttccagttgataaggacgaggttagtgccatttctttccttcaaagttagaaacttgattcatgtggtggtgagagagagatatatttatggtgttttaatgtatgcaggctaataatcttgtgattaaactgtggggtgaaaagcggttttctacgcctggtctgaagctgaaaaaccatgtggatcttgttgagcttctcggtattgcagataccaaaagaggtagtattgacttgcactttgccgacctccttgctctgtgttaaagggtttttgtgctatagggtttcaattgtaatgctattttggcctcaggtgctgaaatcgctggagcaagaggctttttcttgaaaggagatggtttgatgcttaaccaagctcttatcaactttgggttaactttcttgaaaaagagaggattcacaggattgcaacctccttttttcatgaggaaggatgttatggccaagtgcgcacaattggcacagttcgatgaagagctttacaaggtatttaattgttacaaaacatctgtgtacttgtcttgttagagtagttttattcatagaagattgtgttttttttttgtccaggtgactggtgaaggagatgacaaatacctcattgcaactgctgagcagcctctttgtgcgtaccatattgatgaatggattcatccgactgagcttcccctaaggtataaacaaacatagtaacacctactcgcagctttaagacaattgtttctttaatgtattgggaaaatccgccaacattatgtatttttttggtccagatatgctggttactcatcctgctttagaaaagaagccggttcacatggaagagacacccttggtattttccgtgttcaccagtttgagaaaattgaacagttttgcatcaccggccctaacgagaatgcctcgtgggaaatgctcgatgagatgatgaagaactctgaagatttttaccaagcggtaatctcgataccttaagttaagaaaccttatacattttaatagtttctaaatagtcaactgtgtggtttctctgcagctaaaacttccataccaaatcgtctcgatcgtctctggagcattgaatgatgcagctgcgaaaaagtacgatttggaagcttggtttccttcgtccgagacattcagggagcttgtgtcttgttccaactgtacagactaccaggctcgcaggcttgagatcagatacggtcagaaaaagagcaatgagcagacaaagcagtatgtgcatatgctgaattcgacacttactgcaacagagaggaccatttgctgcattctcgagaactaccagcgagaggatggtgtcgacattcctgaggttctgcagccgtttatgggcggagagacgtttttgcctttcaaggccaagcccgtagttgctgataccaaagggaagaaatcgaaagcttgattgatgtattgattcagattaacgactcttctgttttcttgaaattgatgaaacacttcgataaatttctttactttgtggaatttttttggacttctgttattttaccaggaccgttatttatcatctgatttctgctagtatttgttccttttgtttggcgaatcattgttaactttacttcaatgataaatcaaagacgtaatataagtactacaaatataagttattttattcaatgagctaaatttttgtattaatttcaccaaacttttggcatattaacaaacttgagtttagatatctcaaaaacgtaaaaaaaaaagaaaaaaaaaaaagtctcaaaaattaagtcgagtataaccgtcaaaaactatatcaatcttattatataaagtacggtttcaaaagttactaactcacaagattataacacgtggcagtaaaataaaatagatatttaaatagtcgccaaaaactattatgctaattttaactaaagaaaatagatatttaaataaactatctatttaatatacatctaaatattatacttatttactttaaaaaatttatatataaaattatatttatatcagatcatatatatttctttgttgatattaaaaaaataattaacaataaaaaaaatttaactaataaaaaaaaaaaaatccatcaaagatatatttattatcataaaagttgaagttatttgtttttaaagacgtctacataggatttagaacgaccaatcgagagctgccacatcaatagttaacatatttaacatctaattagttagcatttttgaaaatagaaaatagcatctaattaatttacatttttgaaaataataattacttctactttaaaatgacctttcaaatgtacgagaaacgtaatagacgtacgagagaagtaagctgacctttcaaggctttaatagattctctcaagatattccactcctttgatcaacctttgttcttaatatttctcgttcattttatttcagtgctctagtatttcccgatcagagtcgacgttcgtacgtatcttactcttatttcgataaataattaaacatataataaccgtatgcttgtaatcatcaaaatctaattggagttttcatattttgacaacctcagagatttccagagtaaagaggtacgtaattagactaagcatattgtgcatgtgtgtatacctagctcctttttaatgaaggaaacaaaaatacatatattaaattcaattatacattttagattattgatctcgatttttttttgtcacgtgacagtatctactctaaacttttcagcaactgaaagctgagaacgatattgttcttcaactaaccaagtctcaaattctttctcttctttcattattgaataactatattatttgcactaattcggaagttgattttctttatttttttcttcaatatcactagataaggcctgccaatttaggcgggtgtaagatacaaaaataaattttaatcgatagtatttgaattttgtatagtagtcaatatgcacgccaattttaatcgatccgtttgggagacacgcggatcctgatttaaacaagatgggtctctattcagttgcttcagaacgcgttttaacatatttggcccattaacacttcattctctactcctaaagatcctgaaaagctcaatattttgcctccgaaaccaagatattcgctcaaggcaagtctgtttcttgaagatattctgcaaatcacaacgaaataggtatgattcctatattcgattgagatagtatatttagatatgatatagattacctaaaaatccgcaagtccaggaccaatcttaacgatcttgccaagctcaatattttgcctcatctccaagatatttactgtttcttgaagatattctgcaaatcgccaccaaataggtatgattcctatattcgattgagataatatatttagttatgattgagattaccaaaaaatccggttgtgatttagggtttcatttctaattcctaaccgtataaatactcaatcaataacatcaattccgtcagcattacttttattcgcagcctatcacatagtcaacgagtttacctttagatttaacgtatcttagtgatgtcaagcctttcaaaacaaattggcgtgtccgagtcaagatccttcatctgtggaggcaaaccaaagatgcatcaggagaaacgttaaatgtcatcatatgtgatgaaaatgtatgcttgagtgctattgattaaatatataaatctatatttattcaagaagtttgattgtaacatgttctaatgtatttttttatttggttttgatatagagatctaagatgcaggtcacccttagaaagcattatattggcaagtttcagaggtcaataaaggtcggtgattggaagatcattgataacttcactttgagtccttcgactggcaagtacaagatatcgagtttgagctatcgaatgggctttaaccacaacacagatgtgattaaatgtgatcctgtatcagatagtgttttccttgatcttgcagattttgaaggggttaagaccgagagttatgatgagaatgttcaaattggtacgtattttctaaattcccaatcattctttaactcaaacaaaccagagcacacagattttgcataatttaagagagtattttaataatataagacatattaggtcaagtggtcagtgtggggaaagtggatgagattgtggctcaaaacaaaccaaacaaaaaactagagtttcaaataagagatggcaggcaagtcttctcaattgttctacatattttgattcataataactatgttttcaaacaagtaatattgatatcgtttgttgctatattgaagcaatgagcgtttgtcttgtactttgtggggtgtgtttgctgagaaagtatttagtgctttaaaaagtgtaaagcatgacgagaagacagtggttctgatacgctatgctaaaatcaataattttaaaggtatccactctttccttaactatgtctaaattaaacctattggatgtatatgtgcatgtcttagttaacatatattgtataattctgttaactaggtgaaattagtattgcaagtgcttttgatgtttcagaagtgataatcaatccagttcatgttcctgaggttgagctgttcgtgaaatcgtatgtgcaaaatataatatgaccttctttgttctgtttaaatttacaaacatgttaaccagataaaagcttatttgcagactactaagtgatggccttgctctcactattcaggataattatgtgagccgtgacattattaagttaaatcagataattttttgtttatcctgccaaaacaattgttgatttacttcatgggagagatgtaagtatattttcactaattcctaaatgatgtcacgtttagtttaagtacctataattgttattgtattgaaaattaggttggataatggagaatacttggttctatttttgccattgataccgattggggatggttctattttggatgtcctaaatgtaacagaaaaactgagctggttaaagaatcaaccagcactgttaagaggatccaagcacctacgaaacctaagttctggtgtgacaaatgtcaggagagcatcataaatgtggaggcaaggtaagaattactcttttattttgtaaaagataaaaacaaattatggtttctagaagtccttgcagcaaataaacaggtttataagtgtatattaatttaatatgtacaatacattttactccacgtacaagcttcatgttcgtgtaatggacgagacagctgaaattaaactcatggtgtttaaaaataatacaaccaaatttattggaaaaacttttgaagagttactggatggacaatacaaagaggtattattttatatactgtcattcaattattagctatatgtctatggtagaatgaagagtactaatgtgagacatgtgtatagattgaagatcctacgatcatacctgatgtcattaaaaatttgtgtggaaagacattccattttctggtcagtgttgagaaaaccaatatttatggtggtaaggatatttacaaagttacaaaggtgcatcttagaacagacataaccaaagaagaatcaggtttgcttgaagacactcaggatgatccactaacaattgggtctgaggaacatgtatgataaaaaaaacttaatacaatttgttatggttattaagtgttttgtactcatataccatattatatttctgttctgtctaatagggtaaaaagctaaagaaggagtagttgaagagattgagcctcaaacctcaaaagctaaaggatcaaccaaagtgaagacaataagtattaagaacattttcaatttttatgttgttttatacatttacatgtatttatacatttacatgtatttctatttttcagaggtattttattgaaaagttttcactatctttgttctactatatatttttgaaattattccaaactctattttcttattgaatagtaaagaatcggtttcaaggttatactgaaactgatgaaaatatcaaaagatctttaaaattttatagtcaatatacttgcatctatattaaaaaaaaaatgaaaagtaagatgtgatatatcataatttttgtgattaatctgtattttcaaaaatagggtttatcaatgaaccttgaaaccctcaaaataattcaaaaaaaagtaatcattcattgggtgaaatttgaaaaatcagagaagatataattattttcggaaaaaagaagttacgtttattggaaagatcaatagactctcctcttatctcattcattttccacaaaaaagaaaacactaagaagaaaaagagttattctggaaatgtcaaatttcaagaacttctctgacttgcgtcctaaaaaacgaaaagttctgtatgtgttaagctattgaggttgtggaattggcctcctaattatttcggggaagaacctactatgattttagttgatgagcagggatgaaaaatctatttacagtttttatttcaagtttagttgttatttactggatctcttgaatataaacatccatacaatatcttcactgagattttatactttatatatttagaaaagacaatgcttatgattttgaatactttatatatcttcactgagattttatatatgatctctgggacatcgaatcgatgcattgtctcctctacatgcatacaaagaagaactgatttctacattaagagaaggaaaatggtatatactctcaaacttcaaagtggttgtacctaacccagttgacagattctcttctcatgtgttccaaattgagtttttgaaaaacactatattttgttaatacaaaataaataccctaatacaattaaaatgtcatagtacaatagtttccaaaaatcttcgaaatttatatatcaaattttaacactcgggtgaagcacgaattatcaatctagtatattgtaaaatttgaatgtgtatgattaaaattttgttaaatacaaaaattattaaaataaatattaaaataaatgtgtggatcatggtttactatttaaaatttaaatattataaataaatatttgaagaaattttatattacaaccatctagataggcgggacttaactagtttaatatacgatctctacattgtgtgtcaaagcatattctgttgatgataacaaatgaaagaagaatcgtgcatcacagattcagtctctagtttacaaaaattggacagtctccaaggtataataactctttccttttatgctctatacgggatatttgaattgtgccttagctaaaccaccggaaaagaagaaaaaaaaaacatagcttcttcccctgagggaataatttatacggtgacagtgaacagatatagcttcagcactactgagagagcgagctgtagaagaaatatgctgaccacaatcaagaaccatctctctcctgcagagttaatatgtgctttgagattcaatgctacaaatgtagcagacatgaatccagctaaacccgcaataacccatctgaagatctctaatggcacaacagagagacactgcagaaacgacattttcttagtctcgggtttttccacattggatgtctcattgggagtaaaaagaggaatttgtaaaactaactaaccaatgcagggatgaagacgaatagggaatatccgtatagacagaagagttggactaagcctgatggtgcagagaagtacttgagaacaacgtataatgcgagagggacaatagttacataaccgtagaaaactcctgcagaccaagtcaccagattaatatcgtagttccattcctgtttcttcaatttgtgtgctatgtatgtaacaaatgttcctatggatgctgctacaaagatcaatgttgtgcatatccagaatggcccgtacctgtaatccacgcaacaaactccttcaaaatcagtccacttagctaaaaaaactgtaacgactcgactcttacaaatcagggttgttggctgtcttttccgtaaatgttcctctaaacggaaagagcgattctttgagtctctctacgacatctgaagtgtccacatcaaagtaaggcttgtaagcaccaacagtgaatctatgaagccaaccactagactgaggttcatctgtagtaccattcacaggcctcgaaaatgtatctgccaccggttgaaagtcgataagattagccaataaggcatacaaaactcagtcaatcaacataaagaagtggatgaacaagtcctcatatcctacatttctcagtcaacttctaactaaaaaacgagcaaaactccgtaaaatcgtaactcaatcgaaaggagaagttaccgtcagcatctcgaggaggattagtaccaccagaaatctttccctgagtagcagatggaggaaacgtttgtagatttgagtctgcatttacaatgtatccctcaatcaaatcacagaacaatatataacacacacaattgctaaatcttatcgttattcaaattttataaaccttagattgaaaattccttcaacgcactaaatacaaaatgtctctaagctcttcctagttccgttctatcaccgattcaaaactaatacattcttacgagaatacgaaaatgtttacctgcgaatttgacggtgacatgtccaggatctggaacagcctacgatggataatggaaactagatctgatcagattgagataagaaacgagaatcgacaatgcaatccaatggacaagtgtaaagagaaggatcacagaaacatatgaacgaatcagataacgaaagagcttacgggtacagatccagaaactttctggtgatcgatgttcgtgtagcttccaccggacatcatcatcttcgttcttctttttctctttctcacagctgaaacaacagaaataacacaaaccctctttctcgtttagtagcaatcaaaccattttttttatatacagggtttttaattaggggaaatatcattttcttttttttttgtcatccgattttaattaaatctcaagcgagtcaaatctaatcaatgttgtttacataagtgatatgaagcgttcagtgcaaacttttcgcgccaaatctggagaaatattatttaaatcatgactttacaatttttgttatttgttattttggtggtttaaaacataaactcgaatcttgttatttaaattcttaattttatattgatttttattttaatcacgaatttttgttgataaaaccaaataagacaaattgttaactacgtaaacagagatgtcatcgacgaagtgtcatcgcccttcttctagcgtcctacgtaaaccagtaaggcttctaacgctcttgatctgtcgcatttgggtgttttaacaattagctaaagcccttctgctcttgcaacacattcttgtagaagaatagattcgaacgtcatcgcttcattttctcctgccgctttattgcttaggtcgagaagagggaccgaaaatttggttttaattaaccgattttatgtgtccatgtttttttattcttttttgctatggattcatacttttaggtttcaaattatgtttgtaacctaaactgttttcattttatgaaatatttacaatttagcaaaaaaaaaaaaaaaaatcttcttctacacgagtatgattattttcatctcactctttaaaaactaaacaatgatactatctgttagctccagttaacgatgtgtctcaattggcttagtcaaccagaattcgagattaaataaaaagtcaacataaaattgaagatttaaatcatcagattcatataaaattaaaaatttaaattaccaggtacagattttatgttttaaaccaataaaaacggtaaaataatatttaaataacattgattaaatcaaagttttttattatgttttttttattagaaaaacaaaatcacaaaattttgtagctttaccgtgcatataaattaagtacatcaatacatttaactcaaaaatcacatgctatataaaattagtaatcaattgtataatttcttatacatatatatcatcttaaaaaatagtataataattattttttgaggtttagtagagaataaacaaaagtcttcttataataaacaaaagttttttttataataaacttctctttcttaacatcaaatcatataattttttctaacatggcaagatatctctaatcgttacacttgatacgtattgtgatcgtgttaattactaactcttagaaaccaaaatatatacaataagatattactataaatacatatatattaatttttatataatttattatcaaacatatatacaaggacatttatttctacaaaaagatagtattcataagtacaaatagattttattgatcacactaatgttcaaatatttttatgtaagaaaatcatcctaatatagtttcttttgattataatctgaggagataaactaaaagattttcttgctttttcgtttttgacttcaaaatatatatataatacaaccatttgtaacaaagcataaacatcaaaaacaaaattaagtcaaaatcatagaaatgactattagcaagaaaatgttaatcgtgtttgtcctgactatcttcgttgtatcttttggtcattgctctgatagttttcctggtactatttttcattatgcaaatgtttacttttatgtgtaaataaatatgggtctattgattttttttattaacggttgtttaatgattattgttaaataggtttaggattaaagaagcaagcacataaacaatgctacagtccagacctgtgtacgggaggagacagcaaatgtgatatatgttgtgttcttataagtggtgtatactacggtaaatgtattcaaagcaaatgtcattgtttgaataagactaaataatctaatcaactatatgtatccgctaataatattataatctaattttctttgctaaaaacaaatttcataatctttaataattatgaaagaggaataaagataatttagaagtcaatgtaagataaataaaataaaataaagtttaattttttagaaagatgattcagccggactagatctggggttcaaaatattaacaagcggtggagcatgtagtttaattcgatacaacgcgtagaaccttaattacatcatctccaacaatgaccttcattttaagggtcataaactttcaaaataaggatttgagggttgagttagtcaattctacacaactctttgaatttgatgtaaagacaggagattttattccaaagatgtgatcttagagttcgtttacactaactataccattagtgggaactttgctttaatccaacaacaaaacctcaaattaatctatttctaaaacttttttgtgtttacataatagatctcaatattaacaataatttgttataatgataaaacttcataaaaaaaactaatatgtacatttcaaaaataattatataaaaaaatattagaaaaacaaaaatttacatgttactaaaaaattatatataaactagaaaagaaacataaaataaaacttgtgtgtttatttcatgtatatattattgtaatgttaattttaatgtttgttaaattgtttaatgtaatattattgtttttaaacgttatatttttttatatttcaataacttcaattttaattttaatatatttaaattcatatcaatatatttgaaataattgaattaaatataattatttgtaagatatatacaccataaagattaaaattcaatataaaaaaaaaattgaagatgtgaatagtgcactctcgaattatagtcatttctcaagtatatgatgttatctacaacgtttctcgtcattgttcgacttggtattaagacatttgcagttttcaaatgtaattcttactaactttattcgtgatttaaaatgagaaaaatgtcatttaaatcaccacttcgccatttgtggtgatttaaatcatgaattttgttgcttgtgattaaaatcattaagtatgtgttgacttcaaataaaagctataactttagttgacaaagccaaattagtcacatcgttaactaactaaacggagcaattaaacgcagtgatttgtccgttaataagtccgtttaagatgcaaacgacgtcgtcctgcttttgaaacaaaaactcccaaattgaatcgaaccctagaattcaaaattgaaatcagatatcgcaaacccccaaattctctcttgtctaattctttctgtttcttctcgaatctcgatctcaaatctcgatttcattttaattttttgattctgatgaattcgagctccgagacatcagtgggtggccgtggaatcccgacgaagtgtgtatgtgggttgggtgtaacgaaattcacctcgaaatcacaagacaatcctggccgaccgttcttccgttgtataagcaaaagagatcctagctcgtggaaaaacaagaaagatgtaaggaggtatttggttgtttatgttgtttttctgtgaaatgggaagctagatttgttgtttatgataggatcacttgtttaagtgggtggaggatgctgtgtatgaggaggttgaagatgtattgccaaacctaggaatcatggcaaatgagattgttaaagctagatccgaggttaatgagattgttaatgagttgagtgcttctattcaagaattgaaagaagatgcaatgtgtagcaaaatggaaatccggaagttgaaagtgttggtgaaagtctctttggtgtgtgtttgtttaatgacaattgtcattgcttaccaaatgtttggtaaagcaacagaaacaagctttgttctaggtcattagtgtaaggattgtattagtttgtcttggattttgtcttggtgtatgttcttgtcggatttatgttcttgttggattaagttcttgttggattaagttcttgttggattgtatgtttggtaatgaatgatggattttatctatgtttttgttggattctatgtttggaaatgaatgatggattgtgctagtcataagcatttctcttgtttttctttaattttgttagcaatggtttaactcttttgcatttcaacactcttgttaacaacacaaatcattctaaaacaagtcaacataagccgcatttcaacattcttgttaagaaaaacatgttttgaaacaaacttacaacaagtttcgtttataaaccaaaataagccaacatgttttgaaacaaacttaaaacaagtttagcaaccaaaataagccgcatcatagtcttgtgtttagaaaccaaaataagccgcatcatagtcttggttagaaacttaaaacatcactttcattcttcttatcttgagcattcaaaccatgaccgccaccctcctaatccttgttgcctcggctgtgcttgagtctgtttccattgtggtgcgtgtgtctgttgtgcttgtgtctgtggttgcgtgtgtggtgctcgcctccttggtgcttgcctcctctgtgtttgtggtgcgtgtgtctgcggtggttgcatatgcgatgactgagaggcctgtgatccttgcgaggcttgagatccgtcccatgtttgtctttggccaaacatgatattccttggttcctgattcaaagagaattagactatgtaaaagaaagtatgaagcatcattatattaggggttgcctgattttatagtcataaactaattgcattctcagcttttccccttatactttttgctcatgaaattttcaccataaactttgataattctttaaattacaacatgtactttcggattcatccttaaaaatacatttccaattgaaccggtcattaaaccgggattaactacaaatccgcgtttactgtaccgcgattgcgatttatttgattaatctcctatatccgttaagaaaagggttgactaattttatagccataaactaattgcattctcagcttttccctccacactttttgctcctgaaattttcaccataaactttgataattctttaaattgcaacatgtactttcagattcatccttaaaaaattcgtttccaattgaaccggtcattaaaccgaaattaaccacaaatccgcgtttactgtgccgctattgtgatttacccaactaatcacccacaccgttaagaaaacaacgttgttttgtaagcctacaatggagcttcaagaaacaccacatggagccgatagagtcacactcacacggagaagcagtctatgtgatcaatgagagtagttataattctttattcatttagattgtcattgaaacaatcttcaacctcttttgtctattttggatgatgtattttcggaagttgattttctttaggatgttattgtttaggttgactgtttgatttggagtcttagctatcctcatgattaggagttttatctatttcgatttgtcattttccttaccaattaacacaacacataacatatatagatagattcacattacaaaacaaagacaaaacgacgtcgttttcgtaacgggtgtgggattagtctggtaaatcacaatagcggtacaataaacgcggatttgtggttaatctcggtttaatgaccggttcaattagaaacgtatttttaaggatgaatctgaaagtacatgttgcaatttaaagaattatcaaagtttatggtggaaatttcaggagcaaaaagtctggggggaaaagctgagaatgcaattagtttatggttataaaatcagccaacctttttcttaacatatataggtgattaatcgggtaaatcgcaatcgcggtacagtaaacgcggatttgtggttaaacccgatttaatgaccggttcaattggaaatgtatttttaaggatgaatctgaaagtacatgctgtaatttaaaaaattatcaaagtttctggtggaaatttcaggagcaaaaagtgtagggggaaaagctgagaatgcaattaatttatggctataaaatcagccaaccgttatattagacaatataaagaaagtatcaaacttgatccttccttggtcttcctcttggtctttttggttgcacttcagcagtcgggtttgagcaagataacctattgtgcccgtcttgtttgcagtttccacatgtcatgaccctattcttgagtgacattctggtggttgtggttgatgtcttagcttcataccttcctctccgcctagcatggttaggtggtctaccaggatttcctttcctccatgatggtggcaagactcctaatctattcatcctagccattctatctgaccttgaacaggctcaataccatctgcatacgttagctgccacattcttgttgtgtaccattcactaacataatcttcaaccttctgcttctttgctatgatcactgaagcagcatgaacaaaaggaatatcagtcatctgccacttaatgcagccgcatgtaagcttgtccatatcaacagaatatttttcatcatgcaactctacctcatgtttattgtgcctagccattcttcttacgcaaaactgtgacccttctatcattttctctatcttcatatgagctctcttagtgaatctggtccttaatctaccagcaattatatgtctcttcccattcctaaccatacactgctgcctaatctcttcaagcatttccaataagggtttcctcctagcttgccgtatggttctattaaaagactcactgaggttgttcaagttatcattgcaacatgtacctactctaaagaaagctctagaccatgtcatcggattggtgcttaatagagaagtataggcaccgggattatacttctgcagtgcttccatattttttgcatattggcctgctgtgtagctgcgtgcaatcctccaaaacagtcgttgaagttccatgttatgactatctctcttccaattatccatgatatgttttgcacattgacgatgctcagcttctagaagaatgttgtgtataaccttcacaagtccctacaaaaataacacagaagttagaagatatagcattccaatttatcttcaaaaataacacatactaaccaattgtttgtcagatatgacagccatatcttttccatcttgaagccctaaagtacttgatagcaacttcataaaccaatcccaattgtcgtcattctctatctcaaccacagcccaagcaagaggcactatcctattgtctccaacaccaacttctttattcaagtcatcctgatttccgtcttcatcttcactgtcttcctcgccagcagcttcgtatccaatttcatcacaatcttcatcaccagcaacatcacagtcatcacaggttttttcagcagcaaaatacgaacactgctctaagggaacaggctcacctctgtaaagcataagagattgacattcaccgggagtcgattgcttacgagcatcgtctagagccgacgattttgtactagcatcgtcgagagccgtcgatttgggggcagacggttcgacaacagttggttcctcatccctctttcgtttgggacgaggcttactcttctttcgcggagccatcagtcaagttagggtgaatttgaagaagaaaagaagaagagatttggggattagggtttcttatttctgatttcaatttcgatttctagggatcgattcaatttggggatttttgtttcaaaagcaggacgacgtcgtttgcatcttaaacggacttattaacggacaaatcattgcgtttaattgctccgtttggtcagttaacgttgtgactaatttggctttatcaaccaaaattacagcttttatttgaaatcaatacatacttagtgattttcttcacaaactacaaagttcatgatttaaatcaccacaaatggccaaatggtgatttaaatgacatttttccggatttaaaataggtctcaattgatatttacatggagcttttatctatgtggtggacatatttttcatcgtattttaccaaaaacaaaaaaaaaaaaagttcgcatcgtaacgccaaaaaataagaggaaaaataaaacaaaagcctgaattacatcaacggacgagatctaacacacttatcacaaaaagtcaaaagagaatcgggatatatatttatccaacgaataaaaaacttctacttaaataaatgttgagatcgaggtcaccgacttaaagaaccctaacctctataaaatttcctttttcttctctcacactttcaggttctataactcgtttcgaatttgaagaaacaaaccctagatagaacacaactctgtatctgttgcattccaaagatgaaactaaacgaagaatacgtcaagtttttaggtgaaggtgcttatagtttcgttgatctcttcaagtacacaaaaagcgacggctcttcttttcacgccgccgtaaaaagctccgatgatgaaaactctctccttaaagaatttcatattctttccgaactcaaaggatgtccaagaatcatacaatgctttggtaacgacttggaagagggtttcgacgataaaggaaacagagtctacaagttgcttctcgagtacgcatccgaaggtagtttaagcgatttcatgaacaattgcgtggatagaaagttaccagacttgatgattagagacttcacgcgtatgattctccaaggtttggtatcgattcatagccacggttatgttcattgcgatctcaagccagaaaatgtccttgtcttcccttgtggagattcttacgaagtgaagatttctgattttggactctcattacaagtcggagaagttcctgatcactggaaaatcgaatacccgtttgttggaacgcttaactacatgcctccggagtctctacatgacggtgttgccaataaaaccctagatttgtggtcattagggtgtttagtgttggagatgtatgtgtgtaagaagccatggatagggtttatacctgaggattttgtgtatatcctctctaatggtaaccctccagagattcccgagagtttgccttgcgacgcaagggcgtttattcaaaagtgtttctcaaggaaccctaaggagagaggtactgcgtctgagctgctgtctcatcggtttttgcgtcaagaaaaatcgaaattgaagatgatttctccattcaacctgctaaagtttaagaaatttttaaacaagctcttgaggttgaagaatttcctctgaaattctgtgatgaatttactctattactcttagttagtatgttgatccaagttacatgttgatgttgtaagtagatcaacttacattacgatgcaaatatagatcttaatctcttaatctgtatgtaatgacactactaatatagtttttctctgaagaatttgtgtcttcgttgcttagtttatctctgaagaatttgttctgtctctctctatgcgagattgtggtgtttttaaaagctttgtgacatgggaatcagaagatgatgtctttgtttgtgcagagattaaactatagtgaagagtacatgaaaatttggaaaatagtataaatccccaattttattacagctgaagaaaacaaacataaactacataataaccatagaataatctctaagcccagaaactcaatctggcaacaacaagaagctttatgtggacctagtacaatcagatctttactaaaaaaaatcaatagttcttgaaatgagaaagactacaatacttgatctttcgattctgatcgccaaacaaatgactttgctcttacttggccttgggactcttgcggaatggtaatcttttatggacttttcaatctagcctttgtgacaaacagagttcttattgctagaatgagaatccatgtggttgcagtgattttctccttgatcattagtagtaatgctgagctcagaactgtctttaagatctgagcctgcaagcctttaaagaagcctaagatcccttcttttttccatatagcatagactaccccgggaatcgttttcctgattctttttcggggcttcttcgcttcattttccttcgagtcatctgctgcttgaatcataaccttgcacctacaaaacacatcaatgtatatacatcaatattactcgaaagagtctggattgatttgagtaattctccggtagcttaatacctgattgctggatatgtgatgacggtggcagcactttttgagaccgcacctaacacaaacgccataaaggcagagagaactacaggggaagaatctttgttggattttgcctttcctttttcaaggaggttctgtttcagctgatcaaacactgtatactagaaagacaagcttatatttcagctaagcacgttatcgcaagcttgagacagtagtaaataaatatgaatggggtttgaaatgaaaatggtacctgaattgctggattcgaggtcaataaaagagaaatcccaaggccatcaaatgcatttccccatgaaccatctgttagtgtcttccacaaccctttagattttccaaactcgcttgtttgcatcctcgatgaagctgtatctagaggctacaaaaacatacaacttaaagttaagcaaagcatatagttttgaagcagagctgagtgcaaaaaaacaaaaaaaacgtacttgagtcaaaacagaggtacaagcaccagcagcagcagcaatgaggagattagcctttgttccaatagacttagaaccaatcctttgggaatgtaacctcttgaaatagctataactatagaaatagatgaaggacgaaataaaagactgcaaattcttagtcccaaggccttgatacaaggagagaacatttcctgatgaaattgcttcccaaaacacatctgacagatatctgtaaacatcacaaaaacagctttaggtacctcaatattatctaatgacaatcacatatgaaccattataatacctaaaaaccttaaccaaaaatagtgattcaaaagcttaagctcattgagaagccttgatcagagaactgaaattttcgatttagacgaggatctacaagggatcaacatagaaatcataaacctaatccaaaaactgaaagttaaaaccgatttcaacaattcagcaggaacacagctaaaattgaagcgtgatgcagagacataaagaagcaattctcaaattctagatcatcatcatcgcgtcgcaatcaaatggaaaaagggaagaaggagagaaacctgtatttctgctgaccgcgaacacgaatctcggcttggaacttggatttacaggtatcaagagggtataaaatggtggtgctgagaagagatccaatggctccggaggtggcttcggagatggattccaaatccaaatcaacacccatatcttcttcttcttcttcttcttcgaagagagaaatgataattgatggtatgggcgatcacaagagaatgattttcgtcttgggattttaaacaaaaagccgtgtaagattgttttttgtgatggtgacgtcatccttttcaatttttcctttttttggtttagtcggtcaaatcatagaatgtaaacgataatatcaaagtcgggccacgtggttttcatgtttaaaaccggcctctacccaatattatttcgaattagggctaggcaaaaatgccgaattcgaatcttaatcgaaacactaccaaagaaggttgattagaaaattccccaaaaaaatatccaaatgaatcttagagttaggtattttgggtatcggataatatataattcgaatcgaaactcgaactagttagtatccgaaaaaaattaaaattaagtaaagtcatcaatccatattatatagttttgagtaattcatatattttcgagtaatttgagtgattaaattagttactttccaatattttagataatttgtttatttgttttttctaccgagttttatttatagaatttggacattttcaaatacttttcaatattttttcttgtaattttgaatacggatcgaatccagataaaagttaatctaaatagtaaaatctgatcgaaaacgaactatgaaaaactgaaccgtatccattccagcccaaatattacaaatatcctaacatgaaatatgagcctaaaaatccaaaaaaattgaaaaacccaaactgaaccctaacgtctaaccataatttaaatgatgtaaacgggtcagacggtatgatcaaacaaacaaaaaaatcaagtagttttaaaagtaaattatgaatattatacagaaaatatgaattaaaggataatacagtatataatatatgttgaaatagacaggtaaaaaaaatataatgaatgatgcgaaacaaattgatagtaaaaacatattaaaaatggttaaaaacataaatgttgtagctgaaatattttactgcataatatgattataagttaaaatcaatacaaattttagacgaaaaaataaatacacggactgtacatgaaaagtataacaacgacaaaactggtgtatcacacacccatgcggttcacgttcaccaagttttactatgtaaactgaaccatttttttcttttttctttttctacttttttttttaatcataaagcgcaatgttgtaagaataatcatgaatggaagacatggttacaatccaaaagaacggtgatatacccgcattcgtccgcgttaccactcaatggcatggtctcatgtcatttcctgtattataatgacattgtcactagctaggtgatattttgttgtataattttatgaaactaaatcataatcttgtaataaataaaacatattgctatagcgatgttgtatggaacatgttttttttgtttaacgtcactgtattcaacacttaataagagggagatgtctacttcaatgtattcaacaactagaaaagactttagtatgcatgattcaataaacgtaaatgcacatttttgtgcctaaattaaagtcattgattaaaaaaactagaatcatttgctttaattgtgcctaaatcatttgcgttacgttcattgatttaaaaaaactagaaaaagagactttaattgtgcctaaatcatttgcttcctaaattagatactcccgattgctgcctatatagtatatggacaggaggaagaatttttaccaaaaaaaaggactaggaatggagaaagaataatcatatgattcgatgaacgtaaatgcacatttttgtgtatatatatacatgatggaaacacatacatagagagacctaaactacctaatacctatacattcaatatattttcatcatctttatctacacaatggtacatatcaaatcaatatattttttaaaatagtatttgtttgctacttgataattctaactttttcattcttgtgagttttaggaaaccatactacgtatatccatattgataaattttatctgttttggtcttgtaaacggccaaatttacaatgtactcaaatttggtgctgaaggagatggtcaaaccgatgattcaaatgtaagttatttgtttttatcactaaaatatatgaatttttgataaatattttcttaaaattaattactatttctttttcaaatagtgttgctacttttaattaacgatattatattaaaaggcttttttacaagcatggaacgctacatgtggtggagaagaaaacataaatacactttttattccctctggaaaaacatatttacttcaacctattgagttcaaaggtccttgtaaatctacctccataaaacttcaggtatgttcatagttaattaatttatctaagaaatgttaacaccaacaaatttgtattttattttatgtatttgaagttggatggtatcattgtcgcacctagcaacatcacatcatggtccaaccccaaatctcaaacgtggattagtttttcaggtgtgcctggtctaatgattgatggttcaggaacgataaatggtcgtggttcttccttttgggaggtaacagtctgttatatcatatgttttttttttttggggtaaaatgtaaaagattttataccattttcgagtttcgacagaaattacagataatacaagtagcagagaaaaaagtaaaatctatagaaaaacagacaataacaaaatacagcaaatgaaaaaagtataagtcttgagaaaaaacaaaagaaaaaacacgattccgagttgccaaaactcagaaatttgcgtgatttccataactccaaaaagtttgagtctcatcttagttgacacgagttaaccctaatcatatgtttttatgtttgttacttactaatttgttttcttttattcatcggtatatcaaaatcatgaattttttgttttccagctaagcttgaaagcttctgaacggcctagagtgagtttatcaaatttactacgcaattttttgtgattttttttcccgcgataaaacattcactcacaaaagtattattttttattttatttgcatgcaggcactacatatatgcaattgtaataatctcacgataaacgggataacttcgattgatagtccaaaaagtcatatatcaatcaaaaattgccattatgttgcaatatcgaaaataaatattttggcacctgagaatagtcccaacacagatggtattgatataagttactcgacgaatgtcaatatatttgactctacaattcaaactggtgcgtacttatttacacgttttattaatacaaatatatataacacaattatatgaatttaatcattgaatttttaggagatgattgcatagcaatcaacactggaagttccagtatcaacatcacacaagtgaattgtggacctggtcatggaataaggtaatttcattatactaattcaatttcttagattacaaaattagtaaacatttataaatagaaagatttcattgaaagaaaacgtaactaataaaatttgttttataaacttggagaacagtgtgggaagtcttggagctgatggagaaaatgcagcagttagtgatgtttacgtgactcagtgtacttttaataaaacgacgaatggagctagaattaagacatggcaggtattttatactaattgttctctcgtttaaaataaactaatcatgtataatatgtttgaatttaattttgatttggattttttagggtggacaaggttatgcaagaaacataagttttgagaatatcacactcattaacgtacaaaatccaattataattgaccaacaatatactgataaagtacttcttgatgccactaaggtaaatactttataaatggagttatgttatatttgatatacattttgttttgaaagtactaataaattgttgaaacttatatattttgttttgttaggattcagcggtggcaattagcagtgtaaaatatgttggttttcaaggaacaacacttaacgaagatgctataatgcttaaatgtagtgccatcacatattgtaaagacatggtcatagatgatattgaagttaccatggaaaatggagaaaaacctaaagttgaatgtgaaaatgttgaaggagaatccagtgacaatgatttgatgcgcgagtgctttaatagtaatagtactttcagtggcggagttaggaattatttttatcggggtcaaaggatgtaaactttagttaatgggagagtcaatatagagatttctaaccatttcatatgtgtttgagtcataatcatctaagaattatgattattttctaaatcttacgagtgtcatctaacctagttcttaattaagaattttgatgagatgtatttttgtttgtcaacatcacaaaatgtcttgatgaattgtcgtttaaatcctatatttacttagaaacaatcaatacacacaaatgttgatgatgccttttacaagagacatagatttatgttgatttttgtagctgttgatttagttgcctcctataataacatctactagctctctgttggaacctcgtttggtttttcggttgagttatggacgttatggtggggcgatctcttgtccttctctttgtgttgcgtaatttgtctttagtctgtaggtggctttggctgggtttacgaatgtccatgtgtaaggatgggtggtcctaattggcgtttctcctctcggatctcaaggactttccttgatccttcgtcttttcatgttcattgactctaaagtggttgtggtggttaggttctatgctctcatcttcttgttatatcgtcttcgtttctgccgtggagatggtttttgtgaactcagtttaattctctcttctagacacctgtcaattgcctctccttagtgacaaactgatctatggaagtattagtcggctgcttataggaaagagttttcagagttgtggtgttggaggttttagtttttacctctttagttgttattttatttttcatctcttctaatgcttgtaatgtttgtctgcctttgtttggtcttatgtttttggggatttatatgtaccggtcggctttgtctcctaaacgattttcttttttgtcggctttgtataattcaaacgcattctatcaatgaaatcctttaaacaaaaaaaaatcctagaaaaaaatagccaaatacaatttttacaaaatatcttattatcaaagttaataacttatacgatcgtaacacatgacaaatctattgatcttatattttgacatgtatcgaaaaagattttaactttttttttcctcttagaagaaaaagaaaacttaaaaaaaaaacaaatttacatatactaatttatcactgtaatggaaaattaatagtaagatggaatgcatagaattaaattgttttctattgcaaaatcaaattgtatttgaattttgtacaatcaaattaaattttatttttattatcataaaatagatatttaaattgtattgcaaattcgaatttgtaagattgaaatttggtttaaggaaataataaattaaatactgaaaagtatgtaagttactatttaaaattcaaatatcatcaataagatggagtgtctagggactggatagtgcagattactcatgtgtgtatgtgcgtattcgttatcacttggtctgcatttatttgatgtttgtctgagtgttgtaagtctgacgttgttagaggatacatatgagacatcgtttccacgaaattcgtgttcgagtgtaatttttatgttatgatatatcgtagggagcttttgtcctctacagattacgaaaaatagataatgtatagactaacaaagtactttattatgatttaataaatatttaaaatatatagtaaaattaaatatgtataatattaaattatggattattatttgacatatttactatttaaaatttaaatattattattaaatatttgaataaatttatattttatctagttaaaaataaaaattcctcgtacaaaaaaattatcttatatgttaaaaagaaacaaggcttgtgtttacggaaataccactagactaaacacagacaaggtaaaaaaaaaaaacagcttaccaaatttttctcctccttcacggcaaatcgtcaccgccacattatctcccaaactaagaatctagggttttctaagggtttttaatcttcgtccttctctccttctccagttttaggtttcaggtttatctctcgtttctttcatcgaatcttttgatctttaggttagttttgcttctcgttgatgttactctttccattgttatctatggttctggattcgtcatatccttcacgatcttcatgtttctgggtttttaaaatcatgctgcgaagtttcagtaatcgtgtctcagactcgtcaatctttgtacttgattctgaattgttgagtgtttgattgtgttgcagtttcagatggcgagatacgctgctggtgcggttgattgtcctggttctcccaaatctgtgcgaatcgttgtggttggtgataagggcactggaaaatcaagcttgattgttgctgcagccactgattctttccctcccaatgtccctcctgttttgcctgattacaagttgcctattgaattcttccctgatggtatacccgtcaccattgtcgacacttcctcgaggtatatatccttatataagttcactgtattgctggataattactctcttaaataaagctactttgaaagaaaataatttctagtttagagaaaagagtgttgcttttatatacaatattgttgttgggattgcactgtgccaactgtttgtgggtttaggatattttaagctttgccagctttgttgaggttcttgaagtatgttttgatgtttttgttcgttggttcaggccagaagatagggacattgttgctgaggaattgaagcgcgcagatgcagtagttttgacatatgcctgtgatcgacctgagactctcgaacgtttgagtgaatactggcttccagagcttcggcgattagaggtttgattttcatctctctgttttcagtttggtcatgtcaatcttgttgtgtgtaaaaggtgtacaatatcttatctattgatcatatcattgtcataatgctagaaggtgtgacctaaacctttgctgtttcttattaagattggcttgtgatgtttttgaacaggtaaaaattcctattatcgtagcaggatgtaagcttgacttcagagacgacaataaccaggtcagcctcgaacaagtgatgtcacctataatgcagcagtttcgggagatagagacttgtatcgagtgttctgccctgaagcaactccaggtttcatgacttctgaattcctcttgatatgtgatatttttctttgttcaaacatggcacaaatattggtccgaggtagcttaggcatgtgcttgtcttactaagaaatttcaaggacttaagatgtgctaaatttttgcctgaaagtagatattgttgttattggtttggacttttatcagtcatgaactggaaatgcctagtcagaaattagcattcggtggtaattacaaattatattccaggtctaaactatcatcctaatgcacaagctttcctgtaggcacaagaagttttctattatgcacaaaagactgtccttcacccaacaggacctctgtttgatcaagattcccaggcactgaaaccccggtgtgtaagggcattgaagcgtatctttatactctgtgatcatgacagagatggtgctcttagcgaggctgagttaaatgattttcaggttcttatatttcctctttcgtgtttcatgtgcttcgctgttcgtcattgaattggcttagccctatccttcagattttaaaaagaagcttgaagtttaattatgttatccccatgacgcacctaatagttgttttacaataggtcaagtgtttccatgcaccattgcagccttctgaaattgaaggtgttaagagggttgtgcaagaaaagttgccagaaggtgtgaatgaaagaggactgacagtcactggcttcctatttttacatgcactttttattgagaaagggaggcttgagactacgtggactgtactcaggaagtttgggtataataatgatataagacttgctgaagaattgcttccatctgcaatattcaagcgagctcctgatcaggtaaatttgcagaaataacatccattgttcttcattattgtatttgttggtgtttcaataatctattactggaaagagctgtatatcgagcattaaattttgtaatcttatcagaaataagaattttggatgcctacattactggaaaacggttatcttacagctcacattaacttgccttccttggtattgtgcagctaatgtttgtgttcattgtttttgtagagctttgagttgacaaatgcagcaatcgatttcctgaaaggaatgtatatgttgtttgatgacgaccaggtatgtttcttttcttataaatggcgtagtgttgagttgacaaataaatttctcagactgaatttgcactttgcaggataacaatctgagacctcaagagatcgaggatcttttttcaactgcacctgaaaggtaccttttttacacctccagaaggcaaagaacgtgtacttttgattatggtaatctccattatattgccatgccatactaaattgtgaatggcagtccatggaaggaagctccttatgaagatgctgcggaaaaaactgcccttggaggactatcatttgacgctttcctgtcaatggtaatcaatactcttttacatgcttaacaacataatgaagcattcttgtgcatgcattatacacatactcatccttctttattttatttttctttgattttgttgactgacatacttaaatttcacacaattctctctttattttcttgtaacacatccaatttatagttggattatatgtcgttttgcgattttgaatggattttactctgggccaaagttttgttcatgaactaattcaaagtttaattgtgtgctaatctttcaattttatccttgcagtggtcactgatgacactattagaaccggctcggagtgtggagaatttgatttacattggattcccgggtgatccatcgactgccattcgtgttactaggagaagacgtttagatcgcaaaaagcagcaatgtgaacgaaaagttttccagtgctttgtttttggacctaataatgctggaaaatctgcattgctgaattgctttcttggaaggtttgtcatgttaactcgtaccacaacttgttggattttcaaaatacacagaagagagtataattctatgtttataagcaaggagacgtttaattttcctctttttcagttgatctctccatctggtttatagttttgtttctccatgatctaggtcatatactgataaccaggaatcaactactgatgagcgttatgcagtaaatatggtcgatgaatcggtgagtcagtatacttatgaaatttgtatcgttatgtttgtatgcgcgcataaatatatatgtattttagtttggttatattttgtctttgcaaagaaatcttccacgtgcaaaatactgaacaaaaatgacaaacttcagtgttgttttggggactgagatgggaactagctagatatctttgatgagttttctctatgggtggatacatgcttttttacttggaaatttcaaacaaaactgttcagagagattgaagatgttatttggatgtacatttttgggcaacatgcttcatggctactttctctaagtttcggtatgtaattggtcattattctgatagtggcaaatctctaaatgtagggtgctaagaaaactcttatcatgagggaaattccagaagatggagttcaagggctattttcatccaaggaatccttagctgcatgtgacatagctgtcttcgtgtatgacaggtatatgtcctgctgtttgattggttgaaatatacctctctgtatgtagtttgtacgtaataattgagttcattgttttctccagttctgatgagtcgtcatggaagagagcgacccagttgcttgtagaagttgcaaattatggtgaggccactgggtatgaggtcccttgcctcatggtttcagcaaaagacgatcttgattcatctcctatttccatacaagaatccaccagggtagggttcttattgaactcagactcaatgaatatagctcgaataattccatacatatatatttatgcacacggatcttttcgcagatgacacaagatatgggaatagagcctccggtatcaatcagctccaaattgggggatttcaacaatttattccgcaaaatcttaactgcagcacaacatcctcatttgagcattccagagaccgaagcaggcaaaagccgcaaacattacaacaggctaatcaaccgctctcttatggccgtttccagtacgttttctttcctagaatcctgaatcttgactcaatttttgtcccaaacaaagaaaaacctgtaacggcttcagacccatgttgggtatacttaaatttcgatctcatgctatgtaaacaatttatctaatttctacctcgtgatttgtaaacagttggtgctgctgctgtggtcgttgggctggctgcataccgtgtgtatgccacaagaaagagctcgtctgcctgagaagattgagaatgaacaatccaatctcttaaggtatgaacacggaaagaggatagcaaatctcgtgtactgagtttgtttatcgttctcaaggttttacaacttgatccagagtactgttgagtactgttcttagaagtttaatggaaatgggctttgtttgaagtaattgtggaagaagatctgtagcaaacacaaacatttagggacaagataaaaagagaacatagtcaatagacattgtgttgaatttcaataacaatagaactttgtctcctcgatgttgttaatcttgctcacgtttgctctgttctcggaattaaccagcaacactttaacatcaaatgaacaaaccattaattgcacaagatctctttagagtttaacaaatcgacaacaatttgaagataaaaagataaaaaaaaaagcaacagaaaatcctattttgaagttttaacaggcgaccaaacaaacactttcacaaagacagtgaataaagaatccagtcacgaagcaagccactattgttccctccgaagcaagtcagaggcggaagaagaagaagcagaagatcgtatcgctacgagggaaggtcttctgttcttgaacttaaggggactccacaccaccgccttcttctgcaatgcaatcactgtcggatggcttggcttccacgagctgcctcctcctccaagagggctcttcatgaatctgctgcttttcattgcattcggagtcaccagattgcggtctggagagaagagtttagagtatcttgcctttctcgggtcaccacggaatgaaggaggagggcgtgatggagtttccatagatgataatgatgatggttctggtcttagcgttgcaattgagactctccttctgggcatgatggttttattgcttgaagcaatggctgatggagcaggagctggcctgaatgcgatggagcttcttcttggtttcattagtgtattcacgtccatagatgatgatcttctgttgctgttattattctctttgaatgttgtgtctgagaatctcttagaatgaccctgagatggttgttgttggggcatgaagtttgtgatccttctgagtggcattcgcattcttgttggagccaaaggcggttttttctctataattgtcggtagtgtctctctcagatgtctagatgttgttgttgttgttgatgatgcagttgctagagctcgtgactcctgcttgattctggtctttctttcttctgctagttgaaattccagatctcgaacctgaaacatgatttgatttttaactgttagaagaagacaacatattgaatccagtagttaaagcggactaaccttatcttgaagtcctcggcatatgtgttctctagcagtgaggcgtagctgtagtgactgcacattgtcctgcagcttctttgtttccttttcctcgtgtttcagcttctcggcctgttacaaaggatacaacaaaaaatgaaataaccttaagatatgttaaagcttagatgaactggagttcgaggaatcaagttaccatttgttttgacttaaggagttcagagacatcagcctgttttcgggcaggtccactttcgattcctcggactctacttgcaaagttcaaggagcaaagggtctctcctagatcggcagaactcggactaatctggacaaacattaatgtcttgcaatctccacctgtataagtcacaatgaaatagaaacaccatggagatgaaaaataagatgtcttatgaatcatgtggccataacaacggaagaaaataggacaaatgttactttacccaaagagttttgcagcatatgggtcagctttgagtttctggagtttgacaaaaaggaaggaaaaaagtgtcatcaacatcaatcagaaaatctcatatgcaaatgtcttaacaaaggggaagaaagaagggaaaaacctgtaaggaatgtggcttgttttggatgcaagggcagagataacatcaccgagtgctgaaagcgacttattgataaattgagattctttcagcctttctccttcaacttctacctttcctactcgctcactgccagccaagtccactaaccaaagatgacttctcgttctctgaccatttatcaaattctctcccttcactgtcactcgcagcaagctgaacaaaaggaaatctcttgttggtataagtatggaaaaggtttagtttcacatgaatttagtttctaaactctagtttgcttaccaatgagagcggctgctttgctcatttgcagcagttgaacccacagatcgaacagcatatcctttcttgagcagatcccacactccatctgtattgtaaacttgagcttcgactaatcctgggacttcttgcgtcccttctgctgattgcttaacctccaacctttatcaacacagcacatagtgttattttgctttttaacaagaaagatagaaactgtaaggcgatttattctactaccaaataatataatggaagacctactttttagggggctggtttgagttatctaccaagaggtcccttatcttctcattataaacctccaacatgctaactgatagctcaaacttcatgagatgacttttgctttctgaacagcgaaatagttcttctaaggtcctatagttcactcctctattctctggtgttccctccatggtaaatgtcttgccagttcccgtttggccataggcaaatatgcagacattatacccatccagcaccgaagtaactataggttttgtctgtgcaaaaacagtctctgcaaaagaaggtacagtcagataagaagactcgttggtgtagtgttcaaagagcaaaggtttagcgaaataaagttgcaaaggtagcgtctcaattaccttggccatcgtcaggcttaaagacatggtcaaatttaaaatgcttcttggaggaatcagatgaaagtatctggagctcgttttcctgtgttgtatcaaactcagctacagaagcacaaccattggctatttcagcttggtttagaggtctgcatctgcaaaagactctgatatttcccttgagttcgatcacttcattgtataatcgtttcctctctgatgactcttccaagtactgtttttcaagagctccaagcttagtagcttccattaaaacacgttgaggcatattagttaaccaaatcaaacaagttttgtatttagagaatctttgtcgaagaaatcagattcaaagtactcactgagaagctggagagcccttgaaatttctggttctactaaggaacaattcttgatctcttgcacttggtttgataccaacgcatgttcatccttcaagatctaagacatgatatagaacataaaacactagcagagactgaaagcaaatctgttgaaaattcatatttaagttcatcttgaaataacctcaacttactattgcaactgagaactcagaaggaactattgtaactgtgtttattcaagaggatgacaaagaaagtagtagtaccttaattttgtcactgcagtcgataattttctgcaaaattggaagtgttggtccattggcaggagaaacttcttggtttccacttgtaatagtatcctcactttcttccactatttcagccaaatcagtaatgcatcatatcagagtcaaagacacaagtgaatctaaaaatacatactacagtctactaaacaaagtacttgttaacagagtttcagattcatgggataagttagggacccaaaacctaaatcgttgataactgaaggtgaaccaatctttctgaattccaaaacaaaatgctaaaacctaattggattctcttcagaacaaatccaaaagaaccaggaatctcagagatataagtgtttgagatgtcaattcacaatcagagactaccaattaacaatcgaacgacttgtacactaatttttcaattcacgacgagaaaaccccttaccagcgtcggaattgtgattgttgacagaaacttccttcgattcacacaacaaaccaccatcgttgcaaatttcttgatgttgatctggcaaaaaccgaagatgatcagcgaaacattaaaaaaaaaaaacagatcaatcaagaaaaccataaatctgtaagaacatgaatcagaagagcgacgacagaaacaaagtatagtacctctttccatggcggatttgtgcctagagaacccaaagaacgttgaatccaaaattctgaatcaaagagagcgagagagagaccaagagagagtgagagatttagagagagattgagaacgagtgtagacgaatttgaatttaggagaataagagccgttggatctaaagaagctttgtaacgtctatattttattaccattcgttccacaaagaggagcgtcataatccggatccgaattc

SEQ ID NO: 752 - DNA, 107931 bp, Arabidopsis thaliana
gaattcgcattgccggaggtaagaaaatgaagtcaatgagaagaaaagaacgatttttttttttaattcccaacttgtgttcgatctctgagcagctcttatctgatacaaccatttttttggatataatatctaaatttgtagtctttagtttaattcagatcccaattataataatgcccttttgatctgatccacattgcgtatcaaaggctattattattttattcccagagttcaattatttagttggtagaatctctctgtgttgttgtgaatctgtctgtttatgtaaatcaattcaaaaggttgtgacttttgtgtttgacttaggaaaatggaagtgaaagctagagctcctgggaagatcatacttgcaggggaacacgctgttgttcatggatccaccgctgtagctgccgccattgatctctacacttacgttactctccgctttcctcttccatcaggttccttttttttccatattctgaggattttttgtcttggtgttattgctactttgagatcaccaaacctgtcattactgtattgaactcatgagtgaattgtttagcaaaagatctgagctttttctaattcacttggggatatagcatatgcatgagtttacatttgttcaaatttggtttgggttctagactttgaatgttcatgttatgattgtctttgtgttagctaatgtcaccaagtaatagtattatcaaagggcttgaggctgtgttaagatggtagagtatcctgccttctatgtactacgggtggttaattcattctgcgctcgtgcttactagattcgagttcaaacagctaatgaaaatgtgatttcttaagtgccaataggcagatttgtagcaaatgacttgaccttattactgaattcaattcatgtttgattatactcttttgtcccatagaaacaaatctgaaagctttatgtttctttattttttctgacagctgagaacaatgataggcttacacttcagctcaaggacatttccttggagttttcatggtccttagccagaatcaaagaagcgattccttatgattcaagcactctctgccgttctacgccggcttcatgttcagaggagacccttaaatcaattgcagttttggttgaagagcaaaatcttccaaaggaaaagatgtggctctcctctgggatctccacgtttctctggttatacaccagaattatagggtacataactctaaatagttgacatttctatgttcttgcaaacattttttccgagttcttcatcttgttgtgtttcacgtttcttgttttttaggttcaatccggctacagtagtcattaactctgagcttccatacgggtctggcctcggttcatcagcagctttatgtgtagctctcacagctgctctccttgcttcttctatttcagagaaaacccgtggtaacggttggtcatctctcgatgaaaccaatcttgagttgctaaataaatgggctttcgaaggcgaaaagatcatccatgggaaaccttctgggatagacaacaccgtcagtgcatacggtttgttctaactgtaaaactccaaattctcggatcaaagtttcaataatatgttagagaaaaccgtttctgtttcgtggtggttgcaggcaacatgatcaagttctgctcaggcgagataactcggttacaatccaacatgcctctgagaatgctaattaccaacactagagttgggcgaaacacaaaagctctggtctctggtgtgtcacagagagcggtaagacatcctgatgcgatgaagtcagtgttcaacgccgtggattctataagcaaagagctcgctgcgatcattcagtctaaagacgagacctcagttacagaaaaagaagagagaataaaagaactcatggagatgaaccaaggtctgctcctgtcaatgggggttagccacagctcaatcgaggctgtgattctaaccacggtcaagcacaagcttgtctccaaacttacaggagctggtggcggcggctgcgtcctcactctattaccaaccggtaaactttgtcaggaactttcaatcatcctttttgtcaatttcggttctttattcttaaattaacccctctctgcaaaacaaactcgtttcagggacggtggtggacaaagtggtggaggagctcgagtccagcggttttcagtgtttcacggcattgattggtggtaacggagctcagatttgctattgatcaggtcggaaaaatcatatttggcctctcaccattcttaaacttgctgacgtgtacgtcaagaaggctgcaattagaaattcaaagagtcgattttttcttataaatgatgtgttgaatgtaaaattgctttattattataccatgtgacaaataattgaaaaaagcaaagattgtttagtttttttttttgtattttgaaattgttatgtttcatgatgggaaatataaaatgacaaagtttttacttagattgtcacattgatcacattatttcctcgtatattcatagtttgtccaacttcatcatttcatagatatcataagctggtcttttggcatgttcatgcattctaagtaacaatctgtataatggtaagcttgcaagaccaagacgatgcaaatctctaacatatgcagttgcttcttcaattttctcctctttctcaaagtactcggcaatcgccatgacgatgttatgggatggcctccaatgacaccgcctcattagtacaaacacttggtgcatagcatcaatggctttctccatattctcacatttcacccatccctccattaagatttcccaggtcttgtagtttggagtacctcctctctccaacacacaaccatgcaatgactcggctttccggatttctccattacgcacataagcacccaaaagaacattggagaccctaacatcatagttaaaacattgagcctcccactcactaaacaccctttcagcctcttcaagatcaccagttttcaccaaagacgacaatacacatatgtagttcacacaactaatcctaccacaaaccgatttagaaacttcccacaaacgaacaactccttccttattccctaaagacgcataaagcgtgataagaaagaaatatccaagcctattacttctattcaacatcttttccgcatcctcaagcaccaacctagccttctcatcaaaaccactcttaatataaacattagctaaagtacacaacgaactccacccaacttcaacactcttatcaccaaccatttccttataaaccgtttccacagccgcaactccagacacttcacaacatgcattcatccaaagattatacgaaagaacgtttcttggtatcttattccctttcatcatcgaaacaaccataactactttctcatactgaccactagcttcataaagcttcatcatttcgttaaacgggtgtggagtaacaagaaaccctaatccattcaacttctccattagagcttccgcttctttaaccattttattcttcacataagcacgaagaagcggaagataagccgatttcgctactctcatagacacagaactatgtagcagcttctcaaaatactcctctccttgtttcaagccatgagttttgatgatcaaatccaatctaagagcaatgtcataaacactaaattcaatatctttttgattctccatccactccatcatctgtatatacacacattactggcaaaatcaaaatcaaaagcttagttctcagttttaattaagggaaaaatttcaaacctggagagcgagatcgtaacgatttgatctaatgagacgcttggaaatcaatcggagctccgataaagagacggcatgacccgaatcgatccgttcctgaagcagagaggtaacgctgcgtcgtggaccgttctttctcagtatctccttcaagctattccgatttgcgactgatgacgtgtccgaaccatctgcaagtgaagacacgagccttgatactacgccggtggtgttgaacctcgtcttcgcaaccgcaacgcaacgaatcagcatttggattttggagccgccgcgaaactggttcggtctttctcgagaatctcagagaagagacggtgagagtggatttgggccgtattaaattaagttgggcttacccggcccatatcaatagttataagcccgtttaaagaaccgacgtcgtatggtcaaaaacctgaaacattagcttccttcttcttcctcaccttcaagcgccgacttcgttttcttcgaatccaaatttctgtgtctgcttttgattcacagagaaggagcaggaaagatgttggatatcaatctatttcgtgaagagaaaggtaacaatccggagattatccgagaatcgcaacgccggagatttgccagcgttgaaatcgtcgatgagatcattaagctggacaaggaatggcgtcagcgtaagtatccacgattgatccatttgctctcttttaacgaattttgagctttgatgctatcaaaatttgttgtgtttcaggtcaatttgaagttgatagcttcagaaaggagttcaacaagctcaataagcaagtggcgcagctcaaaattgttagtttaatctcaaattttatagtaatcttctgttagatccgtagtggttgcttttaggatctggaatttgaggatttacttattagtgtgaatgccatagttggtgaatgatttagttcgtttgagctgcaacattgatgggagttagtaatagtagggttttgtttttggtttctttggaatagaaaaaagaagatgcgagtgagattattcaacaaactgagaaaaacaaacaagattctactgcaaaggaggctgaagttcgtgaagcttatgctgctttgaaagccaagttggagcaagttggtaatttggtccatgattctgttccagttgataaggacgaggttagtgccatttctttccttcaaagttagaaacttgattcatgtggtggtgagagagagatatatttatggtgttttaatgtatgcaggctaataatcttgtgattaaactgtggggtgaaaagcggttttctacgcctggtctgaagctgaaaaaccatgtggatcttgttgagcttctcggtattgcagataccaaaagaggtagtattgacttgcactttgccgacctccttgctctgtgttaaagggtttttgtgctatagggtttcaattgtaatgctattttggcctcaggtgctgaaatcgctggagcaagaggctttttcttgaaaggagatggtttgatgcttaaccaagctcttatcaactttgggttaactttcttgaaaaagagaggattcacaggattgcaacctccttttttcatgaggaaggatgttatggccaagtgcgcacaattggcacagttcgatgaagagctttacaaggtatttaattgttacaaaacatctgtgtacttgtcttgttagagtagttttattcatagaagattgtgttttttttttgtccaggtgactggtgaaggagatgacaaatacctcattgcaactgctgagcagcctctttgtgcgtaccatattgatgaatggattcatccgactgagcttcccctaaggtataaacaaacatagtaacacctactcgcagctttaagacaattgtttctttaatgtattgggaaaatccgccaacattatgtatttttttggtccagatatgctggttactcatcctgctttagaaaagaagccggttcacatggaagagacacccttggtattttccgtgttcaccagtttgagaaaattgaacagttttgcatcaccggccctaacgagaatgcctcgtgggaaatgctcgatgagatgatgaagaactctgaagatttttaccaagcggtaatctcgataccttaagttaagaaaccttatacattttaatagtttctaaatagtcaactgtgtggtttctctgcagctaaaacttccataccaaatcgtctcgatcgtctctggagcattgaatgatgcagctgcgaaaaagtacgatttggaagcttggtttccttcgtccgagacattcagggagcttgtgtcttgttccaactgtacagactaccaggctcgcaggcttgagatcagatacggtcagaaaaagagcaatgagcagacaaagcagtatgtgcatatgctgaattcgacacttactgcaacagagaggaccatttgctgcattctcgagaactaccagcgagaggatggtgtcgacattcctgaggttctgcagccgtttatgggcggagagacgtttttgcctttcaaggccaagcccgtagttgctgataccaaagggaagaaatcgaaagcttgattgatgtattgattcagattaacgactcttctgttttcttgaaattgatgaaacacttcgataaatttctttactttgtggaatttttttggacttctgttattttaccaggaccgttatttatcatctgatttctgctagtatttgttccttttgtttggcgaatcattgttaactttacttcaatgataaatcaaagacgtaatataagtactacaaatataagttattttattcaatgagctaaatttttgtattaatttcaccaaacttttggcatattaacaaacttgagtttagatatctcaaaaacgtaaaaaaaaaagaaaaaaaaaaaagtctcaaaaattaagtcgagtataaccgtcaaaaactatatcaatcttattatataaagtacggtttcaaaagttactaactcacaagattataacacgtggcagtaaaataaaatagatatttaaatagtcgccaaaaactattatgctaattttaactaaagaaaatagatatttaaataaactatctatttaatatacatctaaatattatacttatttactttaaaaaatttatatataaaattatatttatatcagatcatatatatttctttgttgatattaaaaaaataattaacaataaaaaaaatttaactaataaaaaaaaaaaaatccatcaaagatatatttattatcataaaagttgaagttatttgtttttaaagacgtctacataggatttagaacgaccaatcgagagctgccacatcaatagttaacatatttaacatctaattagttagcatttttgaaaatagaaaatagcatctaattaatttacatttttgaaaataataattacttctactttaaaatgacctttcaaatgtacgagaaacgtaatagacgtacgagagaagtaagctgacctttcaaggctttaatagattctctcaagatattccactcctttgatcaacctttgttcttaatatttctcgttcattttatttcagtgctctagtatttcccgatcagagtcgacgttcgtacgtatcttactcttatttcgataaataattaaacatataataaccgtatgcttgtaatcatcaaaatctaattggagttttcatattttgacaacctcagagatttccagagtaaagaggtacgtaattagactaagcatattgtgcatgtgtgtatacctagctcctttttaatgaaggaaacaaaaatacatatattaaattcaattatacattttagattattgatctcgatttttttttgtcacgtgacagtatctactctaaacttttcagcaactgaaagctgagaacgatattgttcttcaactaaccaagtctcaaattctttctcttctttcattattgaataactatattatttgcactaattcggaagttgattttctttatttttttcttcaatatcactagataaggcctgccaatttaggcgggtgtaagatacaaaaataaattttaatcgatagtatttgaattttgtatagtagtcaatatgcacgccaattttaatcgatccgtttgggagacacgcggatcctgatttaaacaagatgggtctctattcagttgcttcagaacgcgttttaacatatttggcccattaacacttcattctctactcctaaagatcctgaaaagctcaatattttgcctccgaaaccaagatattcgctcaaggcaagtctgtttcttgaagatattctgcaaatcacaacgaaataggtatgattcctatattcgattgagatagtatatttagatatgatatagattacctaaaaatccgcaagtccaggaccaatcttaacgatcttgccaagctcaatattttgcctcatctccaagatatttactgtttcttgaagatattctgcaaatcgccaccaaataggtatgattcctatattcgattgagataatatatttagttatgattgagattaccaaaaaatccggttgtgatttagggtttcatttctaattcctaaccgtataaatactcaatcaataacatcaattccgtcagcattacttttattcgcagcctatcacatagtcaacgagtttacctttagatttaacgtatcttagtgatgtcaagcctttcaaaacaaattggcgtgtccgagtcaagatccttcatctgtggaggcaaaccaaagatgcatcaggagaaacgttaaatgtcatcatatgtgatgaaaatgtatgcttgagtgctattgattaaatatataaatctatatttattcaagaagtttgattgtaacatgttctaatgtatttttttatttggttttgatatagagatctaagatgcaggtcacccttagaaagcattatattggcaagtttcagaggtcaataaaggtcggtgattggaagatcattgataacttcactttgagtccttcgactggcaagtacaagatatcgagtttgagctatcgaatgggctttaaccacaacacagatgtgattaaatgtgatcctgtatcagatagtgttttccttgatcttgcagattttgaaggggttaagaccgagagttatgatgagaatgttcaaattggtacgtattttctaaattcccaatcattctttaactcaaacaaaccagagcacacagattttgcataatttaagagagtattttaataatataagacatattaggtcaagtggtcagtgtggggaaagtggatgagattgtggctcaaaacaaaccaaacaaaaaactagagtttcaaataagagatggcaggcaagtcttctcaattgttctacatattttgattcataataactatgttttcaaacaagtaatattgatatcgtttgttgctatattgaagcaatgagcgtttgtcttgtactttgtggggtgtgtttgctgagaaagtatttagtgctttaaaaagtgtaaagcatgacgagaagacagtggttctgatacgctatgctaaaatcaataattttaaaggtatccactctttccttaactatgtctaaattaaacctattggatgtatatgtgcatgtcttagttaacatatattgtataattctgttaactaggtgaaattagtattgcaagtgcttttgatgtttcagaagtgataatcaatccagttcatgttcctgaggttgagctgttcgtgaaatcgtatgtgcaaaatataatatgaccttctttgttctgtttaaatttacaaacatgttaaccagataaaagcttatttgcagactactaagtgatggccttgctctcactattcaggataattatgtgagccgtgacattattaagttaaatcagataattttttgtttatcctgccaaaacaattgttgatttacttcatgggagagatgtaagtatattttcactaattcctaaatgatgtcacgtttagtttaagtacctataattgttattgtattgaaaattaggttggataatggagaatacttggttctatttttgccattgataccgattggggatggttctattttggatgtcctaaatgtaacagaaaaactgagctggttaaagaatcaaccagcactgttaagaggatccaagcacctacgaaacctaagttctggtgtgacaaatgtcaggagagcatcataaatgtggaggcaaggtaagaattactcttttattttgtaaaagataaaaacaaattatggtttctagaagtccttgcagcaaataaacaggtttataagtgtatattaatttaatatgtacaatacattttactccacgtacaagcttcatgttcgtgtaatggacgagacagctgaaattaaactcatggtgtttaaaaataatacaaccaaatttattggaaaaacttttgaagagttactggatggacaatacaaagaggtattattttatatactgtcattcaattattagctatatgtctatggtagaatgaagagtactaatgtgagacatgtgtatagattgaagatcctacgatcatacctgatgtcattaaaaatttgtgtggaaagacattccattttctggtcagtgttgagaaaaccaatatttatggtggtaaggatatttacaaagttacaaaggtgcatcttagaacagacataaccaaagaagaatcaggtttgcttgaagacactcaggatgatccactaacaattgggtctgaggaacatgtatgataaaaaaaacttaatacaatttgttatggttattaagtgttttgtactcatataccatattatatttctgttctgtctaatagggtaaaaagctaaagaaggagtagttgaagagattgagcctcaaacctcaaaagctaaaggatcaaccaaagtgaagacaataagtattaagaacattttcaatttttatgttgttttatacatttacatgtatttatacatttacatgtatttctatttttcagaggtattttattgaaaagttttcactatctttgttctactatatatttttgaaattattccaaactctattttcttattgaatagtaaagaatcggtttcaaggttatactgaaactgatgaaaatatcaaaagatctttaaaattttatagtcaatatacttgcatctatattaaaaaaaaaatgaaaagtaagatgtgatatatcataatttttgtgattaatctgtattttcaaaaatagggtttatcaatgaaccttgaaaccctcaaaataattcaaaaaaaagtaatcattcattgggtgaaatttgaaaaatcagagaagatataattattttcggaaaaaagaagttacgtttattggaaagatcaatagactctcctcttatctcattcattttccacaaaaaagaaaacactaagaagaaaaagagttattctggaaatgtcaaatttcaagaacttctctgacttgcgtcctaaaaaacgaaaagttctgtatgtgttaagctattgaggttgtggaattggcctcctaattatttcggggaagaacctactatgattttagttgatgagcagggatgaaaaatctatttacagtttttatttcaagtttagttgttatttactggatctcttgaatataaacatccatacaatatcttcactgagattttatactttatatatttagaaaagacaatgcttatgattttgaatactttatatatcttcactgagattttatatatgatctctgggacatcgaatcgatgcattgtctcctctacatgcatacaaagaagaactgatttctacattaagagaaggaaaatggtatatactctcaaacttcaaagtggttgtacctaacccagttgacagattctcttctcatgtgttccaaattgagtttttgaaaaacactatattttgttaatacaaaataaataccctaatacaattaaaatgtcatagtacaatagtttccaaaaatcttcgaaatttatatatcaaattttaacactcgggtgaagcacgaattatcaatctagtatattgtaaaatttgaatgtgtatgattaaaattttgttaaatacaaaaattattaaaataaatattaaaataaatgtgtggatcatggtttactatttaaaatttaaatattataaataaatatttgaagaaattttatattacaaccatctagataggcgggacttaactagtttaatatacgatctctacattgtgtgtcaaagcatattctgttgatgataacaaatgaaagaagaatcgtgcatcacagattcagtctctagtttacaaaaattggacagtctccaaggtataataactctttccttttatgctctatacgggatatttgaattgtgccttagctaaaccaccggaaaagaagaaaaaaaaaacatagcttcttcccctgagggaataatttatacggtgacagtgaacagatatagcttcagcactactgagagagcgagctgtagaagaaatatgctgaccacaatcaagaaccatctctctcctgcagagttaatatgtgctttgagattcaatgctacaaatgtagcagacatgaatccagctaaacccgcaataacccatctgaagatctctaatggcacaacagagagacactgcagaaacgacattttcttagtctcgggtttttccacattggatgtctcattgggagtaaaaagaggaatttgtaaaactaactaaccaatgcagggatgaagacgaatagggaatatccgtatagacagaagagttggactaagcctgatggtgcagagaagtacttgagaacaacgtataatgcgagagggacaatagttacataaccgtagaaaactcctgcagaccaagtcaccagattaatatcgtagttccattcctgtttcttcaatttgtgtgctatgtatgtaacaaatgttcctatggatgctgctacaaagatcaatgttgtgcatatccagaatggcccgtacctgtaatccacgcaacaaactccttcaaaatcagtccacttagctaaaaaactgtaacgactcgactcttacaaatcagggttgttggctgtcttttccgtaaatgttcctctaaacggaaagagcgattctttgagtctctctacgacatctgaagtgtccacatcaaagtaaggcttgtaagcaccaacagtgaatctatgaagccaaccactagactgaggttcatctgtagtaccattcacaggcctcgaaaatgtatctgccaccggttgaaagtcgataagattagccaataaggcatacaaaactcagtcaatcaacataaagaagtggatgaacaagtcctcatatcctacatttctcagtcaacttctaactaaaaaacgagcaaaactccgtaaaatcgtaactcaatcgaaaggagaagttaccgtcagcatctcgaggaggattagtaccaccagaaatctttccctgagtagcagatggaggaaacgtttgtagatttgagtctgcatttacaatgtatccctcaatcaaatcacagaacaatatataacacacacaattgctaaatcttatcgttattcaaattttataaaccttagattgaaaattccttcaacgcactaaatacaaaatgtctctaagctcttcctagttccgttctatcaccgattcaaaactaatacattcttacgagaatacgaaaatgtttacctgcgaatttgacggtgacatgtccaggatctggaacagcctacgatggataatggaaactagatctgatcagattgagataagaaacgagaatcgacaatgcaatccaatggacaagtgtaaagagaaggatcacagaaacatatgaacgaatcagataacgaaagagcttacgggtacagatccagaaactttctggtgatcgatgttcgtgtagcttccaccggacatcatcatcttcgttcttctttttctctttctcacagctgaaacaacagaaataacacaaaccctctttctcgtttagtagcaatcaaaccattttttttatatacagggtttttaattaggggaaatatcattttcttttttttttgtcatccgattttaattaaatctcaagcgagtcaaatctaatcaatgttgtttacataagtgatatgaagcgttcagtgcaaacttttcgcgccaaatctggagaaatattatttaaatcatgactttacaatttttgttatttgttattttggtggtttaaaacataaactcgaatcttgttatttaaattcttaattttatattgatttttattttaatcacgaatttttgttgataaaaccaaataagacaaattgttaactacgtaaacagagatgtcatcgacgaagtgtcatcgcccttcttctagcgtcctacgtaaaccagtaaggcttctaacgctcttgatctgtcgcatttgggtgttttaacaattagctaaagcccttctgctcttgcaacacattcttgtagaagaatagattcgaacgtcatcgcttcattttctcctgccgctttattgcttaggtcgagaagagggaccgaaaatttggttttaattaaccgattttatgtgtccatgtttttttattcttttttgctatggattcatacttttaggtttcaaattatgtttgtaacctaaactgttttcattttatgaaatatttacaatttagcaaaaaaaaaaaaaaaaatcttcttctacacgagtatgattattttcatctcactctttaaaaactaaacaatgatactatctgttagctccagttaacgatgtgtctcaattggcttagtcaaccagaattcgagattaaataaaaagtcaacataaaattgaagatttaaatcatcagattcatataaaattaaaaatttaaattaccaggtacagattttatgttttaaaccaataaaaacggtaaaataatatttaaataacattgattaaatcaaagttttttattatgttttttttattagaaaaacaaaatcacaaaattttgtagctttaccgtgcatataaattaagtacatcaatacatttaactcaaaaatcacatgctatataaaattagtaatcaattgtataatttcttatacatatatatcatcttaaaaaatagtataataattattttttgaggtttagtagagaataaacaaaagtcttcttataataaacaaaagttttttttataataaacttctctttcttaacatcaaatcatataattttttctaacatggcaagatatctctaatcgttacacttgatacgtattgtgatcgtgttaattactaactcttagaaaccaaaatatatacaataagatattactataaatacatatatattaatttttatataatttattatcaaacatatatacaaggacatttatttctacaaaaagatagtattcataagtacaaatagattttattgatcacactaatgttcaaatatttttatgtaagaaaatcatcctaatatagtttcttttgattataatctgaggagataaactaaaagattttcttgctttttcgtttttgacttcaaaatatatatataatacaaccatttgtaacaaagcataaacatcaaaaacaaaattaagtcaaaatcatagaaatgactattagcaagaaaatgttaatcgtgtttgtcctgactatcttcgttgtatcttttggtcattgctctgatagttttcctggtactatttttcattatgcaaatgtttacttttatgtgtaaataaatatgggtctattgattttttttattaacggttgtttaatgattattgttaaataggtttaggattaaagaagcaagcacataaacaatgctacagtccagacctgtgtacgggaggagacagcaaatgtgatatatgttgtgttcttataagtggtgtatactacggtaaatgtattcaaagcaaatgtcattgtttgaataagactaaataatctaatcaactatatgtatccgctaataatattataatctaattttctttgctaaaaacaaatttcataatctttaataattatgaaagaggaataaagataatttagaagtcaatgtaagataaataaaataaaataaagtttaattttttagaaagatgattcagccggactagatctggggttcaaaatattaacaagcggtggagcatgtagtttaattcgatacaacgcgtagaaccttaattacatcatctccaacaatgaccttcattttaagggtcataaactttcaaaataaggatttgagggttgagttagtcaattctacacaactctttgaatttgatgtaaagacaggagattttattccaaagatgtgatcttagagttcgtttacactaactataccattagtgggaactttgctttaatccaacaacaaaacctcaaattaatctatttctaaaacttttttgtgtttacataatagatctcaatattaacaataatttgttataatgataaaacttcataaaaaaaactaatatgtacatttcaaaaataattatataaaaaaatattagaaaaacaaaaatttacatgttactaaaaaattatatataaactagaaaagaaacataaaataaaacttgtgtgtttatttcatgtatatattattgtaatgttaattttaatgtttgttaaattgtttaatgtaatattattgtttttaaacgttatatttttttatatttcaataacttcaattttaattttaatatatttaaattcatatcaatatatttgaaataattgaattaaatataattatttgtaagatatatacaccataaagattaaaattcaatataaaaaaaaaattgaagatgtgaatagtgcactctcgaattatagtcatttctcaagtatatgatgttatctacaacgtttctcgtcattgttcgacttggtattaagacatttgcagttttcaaatgtaattcttactaactttattcgtgatttaaaatgagaaaaatgtcatttaaatcaccacttcgccatttgtggtgatttaaatcatgaattttgttgcttgtgattaaaatcattaagtatgtgttgacttcaaataaaagctataactttagttgacaaagccaaattagtcacatcgttaactaactaaacggagcaattaaacgcagtgatttgtccgttaataagtccgtttaagatgcaaacgacgtcgtcctgcttttgaaacaaaaactcccaaattgaatcgaaccctagaattcaaaattgaaatcagatatcgcaaacccccaaattctctcttgtctaattctttctgtttcttctcgaatctcgatctcaaatctcgatttcattttaattttttgattctgatgaattcgagctccgagacatcagtgggtggccgtggaatcccgacgaagtgtgtatgtgggttgggtgtaacgaaattcacctcgaaatcacaagacaatcctggccgaccgttcttccgttgtataagcaaaagagatcctagctcgtggaaaaacaagaaagatgtaaggaggtatttggttgtttatgttgtttttctgtgaaatgggaagctagatttgttgtttatgataggatcacttgtttaagtgggtggaggatgctgtgtatgaggaggttgaagatgtattgccaaacctaggaatcatggcaaatgagattgttaaagctagatccgaggttaatgagattgttaatgagttgagtgcttctattcaagaattgaaagaagatgcaatgtgtagcaaaatggaaatccggaagttgaaagtgttggtgaaagtctctttggtgtgtgtttgtttaatgacaattgtcattgcttaccaaatgtttggtaaagcaacagaaacaagctttgttctaggtcattagtgtaaggattgtattagtttgtcttggattttgtcttggtgtatgttcttgtcggatttatgttcttgttggattaagttcttgttggattaagttcttgttggattgtatgtttggtaatgaatgatggattttatctatgtttttgttggattctatgtttggaaatgaatgatggattgtgctagtcataagcatttctcttgtttttctttaattttgttagcaatggtttaactcttttgcatttcaacactcttgttaacaacacaaatcattctaaaacaagtcaacataagccgcatttcaacattcttgttaagaaaaacatgttttgaaacaaacttacaacaagtttcgtttataaaccaaaataagccaacatgttttgaaacaaacttaaaacaagtttagcaaccaaaataagccgcatcatagtcttgtgtttagaaaccaaaataagccgcatcatagtcttggttagaaacttaaaacatcactttcattcttcttatcttgagcattcaaaccatgaccgccaccctcctaatccttgttgcctcggctgtgcttgagtctgtttccattgtggtgcgtgtgtctgttgtgcttgtgtctgtggttgcgtgtgtggtgctcgcctccttggtgcttgcctcctctgtgtttgtggtgcgtgtgtctgcggtggttgcatatgcgatgactgagaggcctgtgatccttgcgaggcttgagatccgtcccatgtttgtctttggccaaacatgatattccttggttcctgattcaaagagaattagactatgtaaaagaaagtatgaagcatcattatattaggggttgcctgattttatagtcataaactaattgcattctcagcttttccccttatactttttgctcatgaaattttcaccataaactttgataattctttaaattacaacatgtactttcggattcatccttaaaaatacatttccaattgaaccggtcattaaaccgggattaactacaaatccgcgtttactgtaccgcgattgcgatttatttgattaatctcctatatccgttaagaaaagggttgactaattttatagccataaactaattgcattctcagcttttccctccacactttttgctcctgaaattttcaccataaactttgataattctttaaattgcaacatgtactttcagattcatccttaaaaaattcgtttccaattgaaccggtcattaaaccgaaattaaccacaaatccgcgtttactgtgccgctattgtgatttacccaactaatcacccacaccgttaagaaaacaacgttgttttgtaagcctacaatggagcttcaagaaacaccacatggagccgatagagtcacactcacacggagaagcagtctatgtgatcaatgagagtagttataattctttattcatttagattgtcattgaaacaatcttcaacctcttttgtctattttggatgatgtattttcggaagttgattttctttaggatgttattgtttaggttgactgtttgatttggagtcttagctatcctcatgattaggagttttatctatttcgatttgtcattttccttaccaattaacacaacacataacatatatagatagattcacattacaaaacaaagacaaaacgacgtcgttttcgtaacgggtgtgggattagtctggtaaatcacaatagcggtacaataaacgcggatttgtggttaatctcggtttaatgaccggttcaattagaaacgtatttttaaggatgaatctgaaagtacatgttgcaatttaaagaattatcaaagtttatggtggaaatttcaggagcaaaaagtctggggggaaaagctgagaatgcaattagtttatggttataaaatcagccaacctttttcttaacatatataggtgattaatcgggtaaatcgcaatcgcggtacagtaaacgcggatttgtggttaaacccgatttaatgaccggttcaattggaaatgtatttttaaggatgaatctgaaagtacatgctgtaatttaaaaaattatcaaagtttctggtggaaatttcaggagcaaaaagtgtagggggaaaagctgagaatgcaattaatttatggctataaaatcagccaaccgttatattagacaatataaagaaagtatcaaacttgatccttccttggtcttcctcttggtctttttggttgcacttcagcagtcgggtttgagcaagataacctattgtgcccgtcttgtttgcagtttccacatgtcatgaccctattcttgagtgacattctggtggttgtggttgatgtcttagcttcataccttcctctccgcctagcatggttaggtggtctaccaggatttcctttcctccatgatggtggcaagactcctaatctattcatcctagccattctatctgaccttgaacaggctcaataccatctgcatacgttagctgccacattcttgttgtgtaccattcactaacataatcttcaaccttctgcttctttgctatgatcactgaagcagcatgaacaaaaggaatatcagtcatctgccacttaatgcagccgcatgtaagcttgtccatatcaacagaatatttttcatcatgcaactctacctcatgtttattgtgcctagccattcttcttacgcaaaactgtgacccttctatcattttctctatcttcatatgagctctcttagtgaatctggtccttaatctaccagcaattatatgtctcttcccattcctaaccatacactgctgcctaatctcttcaagcatttccaataagggtttcctcctagcttgccgtatggttctattaaaagactcactgaggttgttcaagttatcattgcaacatgtacctactctaaagaaagctctagaccatgtcatcggattggtgcttaatagagaagtataggcaccgggattatacttctgcagtgcttccatattttttgcatattggcctgctgtgtagctgcgtgcaatcctccaaaacagtcgttgaagttccatgttatgactatctctcttccaattatccatgatatgttttgcacattgacgatgctcagcttctagaagaatgttgtgtataaccttcacaagtccctacaaaaataacacagaagttagaagatatagcattccaatttatcttcaaaaataacacatactaaccaattgtttgtcagatatgacagccatatcttttccatcttgaagccctaaagtacttgatagcaacttcataaaccaatcccaattgtcgtcattctctatctcaaccacagcccaagcaagaggcactatcctattgtctccaacaccaacttctttattcaagtcatcctgatttccgtcttcatcttcactgtcttcctcgccagcagcttcgtatccaatttcatcacaatcttcatcaccagcaacatcacagtcatcacaggttttttcagcagcaaaatacgaacactgctctaagggaacaggctcacctctgtaaagcataagagattgacattcaccgggagtcgattgcttacgagcatcgtctagagccgacgattttgtactagcatcgtcgagagccgtcgatttgggggcagacggttcgacaacagttggttcctcatccctctttcgtttgggacgaggcttactcttctttcgcggagccatcagtcaagttagggtgaatttgaagaagaaaagaagaagagatttggggattagggtttcttatttctgatttcaatttcgatttctagggatcgattcaatttggggatttttgtttcaaaagcaggacgacgtcgtttgcatcttaaacggacttattaacggacaaatcattgcgtttaattgctccgtttggtcagttaacgttgtgactaatttggctttatcaaccaaaattacagcttttatttgaaatcaatacatacttagtgattttcttcacaaactacaaagttcatgatttaaatcaccacaaatggccaaatggtgatttaaatgacatttttccggatttaaaataggtctcaattgatatttacatggagcttttatctatgtggtggacatatttttcatcgtattttaccaaaaacaaaaaaaaaaaagttcgcatcgtaacgccaaaaaataagaggaaaaataaaacaaaagcctgaattacatcaacggacgagatctaacacacttatcacaaaaagtcaaaagagaatcgggatatatatttatccaacgaataaaaaacttctacttaaataaatgttgagatcgaggtcaccgacttaaagaaccctaacctctataaaatttcctttttcttctctcacactttcaggttctataactcgtttcgaatttgaagaaacaaaccctagatagaacacaactctgtatctgttgcattccaaagatgaaactaaacgaagaatacgtcaagtttttaggtgaaggtgcttatagtttcgttgatctcttcaagtacacaaaaagcgacggctcttcttttcacgccgccgtaaaaagctccgatgatgaaaactctctccttaaagaatttcatattctttccgaactcaaaggatgtccaagaatcatacaatgctttggtaacgacttggaagagggtttcgacgataaaggaaacagagtctacaagttgcttctcgagtacgcatccgaaggtagtttaagcgatttcatgaacaattgcgtggatagaaagttaccagacttgatgattagagacttcacgcgtatgattctccaaggtttggtatcgattcatagccacggttatgttcattgcgatctcaagccagaaaatgtccttgtcttcccttgtggagattcttacgaagtgaagatttctgattttggactctcattacaagtcggagaagttcctgatcactggaaaatcgaatacccgtttgttggaacgcttaactacatgcctccggagtctctacatgacggtgttgccaataaaaccctagatttgtggtcattagggtgtttagtgttggagatgtatgtgtgtaagaagccatggatagggtttatacctgaggattttgtgtatatcctctctaatggtaaccctccagagattcccgagagtttgccttgcgacgcaagggcgtttattcaaaagtgtttctcaaggaaccctaaggagagaggtactgcgtctgagctgctgtctcatcggtttttgcgtcaagaaaaatcgaaattgaagatgatttctccattcaacctgctaaagtttaagaaatttttaaacaagctcttgaggttgaagaatttcctctgaaattctgtgatgaatttactctattactcttagttagtatgttgatccaagttacatgttgatgttgtaagtagatcaacttacattacgatgcaaatatagatcttaatctcttaatctgtatgtaatgacactactaatatagtttttctctgaagaatttgtgtcttcgttgcttagtttatctctgaagaatttgttctgtctctctctatgcgagattgtggtgtttttaaaagctttgtgacatgggaatcagaagatgatgtctttgtttgtgcagagattaaactatagtgaagagtacatgaaaatttggaaaatagtataaatccccaattttattacagctgaagaaaacaaacataaactacataataaccatagaataatctctaagcccagaaactcaatctggcaacaacaagaagctttatgtggacctagtacaatcagatctttactaaaaaaaatcaatagttcttgaaatgagaaagactacaatacttgatctttcgattctgatcgccaaacaaatgactttgctcttacttggccttgggactcttgcggaatggtaatcttttatggacttttcaatctagcctttgtgacaaacagagttcttattgctagaatgagaatccatgtggttgcagtgattttctccttgatcattagtagtaatgctgagctcagaactgtctttaagatctgagcctgcaagcctttaaagaagcctaagatcccttcttttttccatatagcatagactaccccgggaatcgttttcctgattctttttcggggcttcttcgcttcattttccttcgagtcatctgctgcttgaatcataaccttgcacctacaaaacacatcaatgtatatacatcaatattactcgaaagagtctggattgatttgagtaattctccggtagcttaatacctgattgctggatatgtgatgacggtggcagcactttttgagaccgcacctaacacaaacgccataaaggcagagagaactacaggggaagaatctttgttggattttgcctttcctttttcaaggaggttctgtttcagctgatcaaacactgtatactagaaagacaagcttatatttcagctaagcacgttatcgcaagcttgagacagtagtaaataaatatgaatggggtttgaaatgaaaatggtacctgaattgctggattcgaggtcaataaaagagaaatcccaaggccatcaaatgcatttccccatgaaccatctgttagtgtcttccacaaccctttagattttccaaactcgcttgtttgcatcctcgatgaagctgtatctagaggctacaaaaacatacaacttaaagttaagcaaagcatatagttttgaagcagagctgagtgcaaaaaaacaaaaaaaacgtacttgagtcaaaacagaggtacaagcaccagcagcagcagcaatgaggagattagcctttgttccaatagacttagaaccaatcctttgggaatgtaacctcttgaaatagctataactatagaaatagatgaaggacgaaataaaagactgcaaattcttagtcccaaggccttgatacaaggagagaacatttcctgatgaaattgcttcccaaaacacatctgacagatatctgtaaacatcacaaaaacagctttaggtacctcaatattatctaatgacaatcacatatgaaccattataatacctaaaaaccttaaccaaaaatagtgattcaaaagcttaagctcattgagaagccttgatcagagaactgaaattttcgatttagacgaggatctacaagggatcaacatagaaatcataaacctaatccaaaaactgaaagttaaaaccgatttcaacaattcagcaggaacacagctaaaattgaagcgtgatgcagagacataaagaagcaattctcaaattctagatcatcatcatcgcgtcgcaatcaaatggaaaaagggaagaaggagagaaacctgtatttctgctgaccgcgaacacgaatctcggcttggaacttggatttacaggtatcaagagggtataaaatggtggtgctgagaagagatccaatggctccggaggtggcttcggagatggattccaaatccaaatcaacacccatatcttcttcttcttcttcttcttcgaagagagaaatgataattgatggtatgggcgatcacaagagaatgattttcgtcttgggattttaaacaaaaagccgtgtaagattgttttttgtgatggtgacgtcatccttttcaatttttcctttttttggtttagtcggtcaaatcatagaatgtaaacgataatatcaaagtcgggccacgtggttttcatgtttaaaaccggcctctacccaatattatttcgaattagggctaggcaaaaatgccgaattcgaatcttaatcgaaacactaccaaagaaggttgattagaaaattccccaaaaaaatatccaaatgaatcttagagttaggtattttgggtatcggataatatataattcgaatcgaaactcgaactagttagtatccgaaaaaaattaaaattaagtaaagtcatcaatccatattatatagttttgagtaattcatatattttcgagtaatttgagtgattaaattagttactttccaatattttagataatttgtttatttgttttttctaccgagttttatttatagaatttggacattttcaaatacttttcaatattttttcttgtaattttgaatacggatcgaatccagataaaagttaatctaaatagtaaaatctgatcgaaaacgaactatgaaaaactgaaccgtatccattccagcccaaatattacaaatatcctaacatgaaatatgagcctaaaaatccaaaaaaattgaaaaacccaaactgaaccctaacgtctaaccataatttaaatgatgtaaacgggtcagacggtatgatcaaacaaacaaaaaaatcaagtagttttaaaagtaaattatgaatattatacagaaaatatgaattaaaggataatacagtatataatatatgttgaaatagacaggtaaaaaaaatataatgaatgatgcgaaacaaattgatagtaaaaacatattaaaaatggttaaaaacataaatgttgtagctgaaatattttactgcataatatgattataagttaaaatcaatacaaattttagacgaaaaaataaatacacggactgtacatgaaaagtataacaacgacaaaactggtgtatcacacacccatgcggttcacgttcaccaagttttactatgtaaactgaaccatttttttcttttttctttttctacttttttttttaatcataaagcgcaatgttgtaagaataatcatgaatggaagacatggttacaatccaaaagaacggtgatatacccgcattcgtccgcgttaccactcaatggcatggtctcatgtcatttcctgtattataatgacattgtcactagctaggtgatattttgttgtataattttatgaaactaaatcataatcttgtaataaataaaacatattgctatagcgatgttgtatggaacatgttttttttgtttaacgtcactgtattcaacacttaataagagggagatgtctacttcaatgtattcaacaactagaaaagactttagtatgcatgattcaataaacgtaaatgcacatttttgtgcctaaattaaagtcattgattaaaaaaactagaatcatttgctttaattgtgcctaaatcatttgcgttacgttcattgatttaaaaaaactagaaaaagagactttaattgtgcctaaatcatttgcttcctaaattagatactcccgattgctgcctatatagtatatggacaggaggaagaatttttaccaaaaaaaaggactaggaatggagaaagaataatcatatgattcgatgaacgtaaatgcacatttttgtgtatatatatacatgatggaaacacatacatagagagacctaaactacctaatacctatacattcaatatattttcatcatctttatctacacaatggtacatatcaaatcaatatattttttaaaatagtatttgtttgctacttgataattctaactttttcattcttgtgagttttaggaaaccatactacgtatatccatattgataaattttatctgttttggtcttgtaaacggccaaatttacaatgtactcaaatttggtgctgaaggagatggtcaaaccgatgattcaaatgtaagttatttgtttttatcactaaaatatatgaatttttgataaatattttcttaaaattaattactatttctttttcaaatagtgttgctacttttaattaacgatattatattaaaaggcttttttacaagcatggaacgctacatgtggtggagaagaaaacataaatacactttttattccctctggaaaaacatatttacttcaacctattgagttcaaaggtccttgtaaatctacctccataaaacttcaggtatgttcatagttaattaatttatctaagaaatgttaacaccaacaaatttgtattttattttatgtatttgaagttggatggtatcattgtcgcacctagcaacatcacatcatggtccaaccccaaatctcaaacgtggattagtttttcaggtgtgcctggtctaatgattgatggttcaggaacgataaatggtcgtggttcttccttttgggaggtaacagtctgttatatcatatgtttttttttttttggggtaaaatgtaaaagattttataccattttcgagtttcgacagaaattacagataatacaagtagcagagaaaaaagtaaaatctatagaaaaacagacaataacaaaatacagcaaatgaaaaaagtataagtcttgagaaaaaacaaaagaaaaaacacgattccgagttgccaaaactcagaaatttgcgtgatttccataactccaaaaagtttgagtctcatcttagttgacacgagttaaccctaatcatatgtttttatgtttgttacttactaatttgttttcttttattcatcggtatatcaaaatcatgaattttttgttttccagctaagcttgaaagcttctgaacggcctagagtgagtttatcaaatttactacgcaattttttgtgattttttttcccgcgataaaacattcactcacaaaagtattattttttattttatttgcatgcaggcactacatatatgcaattgtaataatctcacgataaacgggataacttcgattgatagtccaaaaagtcatatatcaatcaaaaattgccattatgttgcaatatcgaaaataaatattttggcacctgagaatagtcccaacacagatggtattgatataagttactcgacgaatgtcaatatatttgactctacaattcaaactggtgcgtacttatttacacgttttattaatacaaatatatataacacaattatatgaatttaatcattgaatttttaggagatgattgcatagcaatcaacactggaagttccagtatcaacatcacacaagtgaattgtggacctggtcatggaataaggtaatttcattatactaattcaatttcttagattacaaaattagtaaacatttataaatagaaagatttcattgaaagaaaacgtaactaataaaatttgttttataaacttggagaacagtgtgggaagtcttggagctgatggagaaaatgcagcagttagtgatgtttacgtgactcagtgtacttttaataaaacgacgaatggagctagaattaagacatggcaggtattttatactaattgttctctcgtttaaaataaactaatcatgtataatatgtttgaatttaattttgatttggattttttagggtggacaaggttatgcaagaaacataagttttgagaatatcacactcattaacgtacaaaatccaattataattgaccaacaatatactgataaagtacttcttgatgccactaaggtaaatactttataaatggagttatgttatatttgatatacattttgttttgaaagtactaataaattgttgaaacttatatattttgttttgttaggattcagcggtggcaattagcagtgtaaaatatgttggttttcaaggaacaacacttaacgaagatgctataatgcttaaatgtagtgccatcacatattgtaaagacatggtcatagatgatattgaagttaccatggaaaatggagaaaaacctaaagttgaatgtgaaaatgttgaaggagaatccagtgacaatgatttgatgcgcgagtgctttaatagtaatagtactttcagtggcggagttaggaattatttttatcggggtcaaaggatgtaaactttagttaatgggagagtcaatatagagatttctaaccatttcatatgtgtttgagtcataatcatctaagaattatgattattttctaaatcttacgagtgtcatctaacctagttcttaattaagaattttgatgagatgtatttttgtttgtcaacatcacaaaatgtcttgatgaattgtcgtttaaatcctatatttacttagaaacaatcaatacacacaaatgttgatgatgccttttacaagagacatagatttatgttgatttttgtagctgttgatttagttgcctcctataataacatctactagctctctgttggaacctcgtttggtttttcggttgagttatggacgttatggtggggcgatctcttgtccttctctttgtgttgcgtaatttgtctttagtctgtaggtggctttggctgggtttacgaatgtccatgtgtaaggatgggtggtcctaattggcgtttctcctctcggatctcaaggactttccttgatccttcgtcttttcatgttcattgactctaaagtggttgtggtggttaggttctatgctctcatcttcttgttatatcgtcttcgtttctgccgtggagatggtttttgtgaactcagtttaattctctcttctagacacctgtcaattgcctctccttagtgacaaactgatctatggaagtattagtcggctgcttataggaaagagttttcagagttgtggtgttggaggttttagtttttacctctttagttgttattttatttttcatctcttctaatgcttgtaatgtttgtctgcctttgtttggtcttatgtttttggggatttatatgtaccggtcggctttgtctcctaaacgattttcttttttgtcggctttgtataattcaaacgcattctatcaatgaaatcctttaaacaaaaaaaaatcctagaaaaaaatagccaaatacaatttttacaaaatatcttattatcaaagttaataacttatacgatcgtaacacatgacaaatctattgatcttatattttgacatgtatcgaaaaagattttaactttttttttcctcttagaagaaaaagaaaacttaaaaaaaaaacaaatttacatatactaatttatcactgtaatggaaaattaatagtaagatggaatgcatagaattaaattgttttctattgcaaaatcaaattgtatttgaattttgtacaatcaaattaaattttatttttattatcataaaatagatatttaaattgtattgcaaattcgaatttgtaagattgaaatttggtttaaggaaataataaattaaatactgaaaagtatgtaagttactatttaaaattcaaatatcatcaataagatggagtgtctagggactggatagtgcagattactcatgtgtgtatgtgcgtattcgttatcacttggtctgcatttatttgatgtttgtctgagtgttgtaagtctgacgttgttagaggatacatatgagacatcgtttccacgaaattcgtgttcgagtgtaatttttatgttatgatatatcgtagggagcttttgtcctctacagattacgaaaaatagataatgtatagactaacaaagtactttattatgatttaataaatatttaaaatatatagtaaaattaaatatgtataatattaaattatggattattatttgacatatttactatttaaaatttaaatattattattaaatatttgaataaatttatattttatctagttaaaaataaaaattcctcgtacaaaaaaattatcttatatgttaaaaagaaacaaggcttgtgtttacggaaataccactagactaaacacagacaaggtaaaaaaaaaaaacagcttaccaaatttttctcctccttcacggcaaatcgtcaccgccacattatctcccaaactaagaatctagggttttctaagggtttttaatcttcgtccttctctccttctccagttttaggtttcaggtttatctctcgtttctttcatcgaatcttttgatctttaggttagttttgcttctcgttgatgttactctttccattgttatctatggttctggattcgtcatatccttcacgatcttcatgtttctgggtttttaaaatcatgctgcgaagtttcagtaatcgtgtctcagactcgtcaatctttgtacttgattctgaattgttgagtgtttgattgtgttgcagtttcagatggcgagatacgctgctggtgcggttgattgtcctggttctcccaaatctgtgcgaatcgttgtggttggtgataagggcactggaaaatcaagcttgattgttgctgcagccactgattctttccctcccaatgtccctcctgttttgcctgattacaagttgcctattgaattcttccctgatggtatacccgtcaccattgtcgacacttcctcgaggtatatatccttatataagttcactgtattgctggataattactctcttaaataaagctactttgaaagaaaataatttctagtttagagaaaagagtgttgcttttatatacaatattgttgttgggattgcactgtgccaactgtttgtgggtttaggatattttaagctttgccagctttgttgaggttcttgaagtatgttttgatgtttttgttcgttggttcaggccagaagatagggacattgttgctgaggaattgaagcgcgcagatgcagtagttttgacatatgcctgtgatcgacctgagactctcgaacgtttgagtgaatactggcttccagagcttcggcgattagaggtttgattttcatctctctgttttcagtttggtcatgtcaatcttgttgtgtgtaaaaggtgtacaatatcttatctattgatcatatcattgtcataatgctagaaggtgtgacctaaacctttgctgtttcttattaagattggcttgtgatgtttttgaacaggtaaaaattcctattatcgtagcaggatgtaagcttgacttcagagacgacaataaccaggtcagcctcgaacaagtgatgtcacctataatgcagcagtttcgggagatagagacttgtatcgagtgttctgccctgaagcaactccaggtttcatgacttctgaattcctcttgatatgtgatatttttctttgttcaaacatggcacaaatattggtccgaggtagcttaggcatgtgcttgtcttactaagaaatttcaaggacttaagatgtgctaaatttttgcctgaaagtagatattgttgttattggtttggacttttatcagtcatgaactggaaatgcctagtcagaaattagcattcggtggtaattacaaattatattccaggtctaaactatcatcctaatgcacaagctttcctgtaggcacaagaagttttctattatgcacaaaagactgtccttcacccaacaggacctctgtttgatcaagattcccaggcactgaaaccccggtgtgtaagggcattgaagcgtatctttatactctgtgatcatgacagagatggtgctcttagcgaggctgagttaaatgattttcaggttcttatatttcctctttcgtgtttcatgtgcttcgctgttcgtcattgaattggcttagccctatccttcagattttaaaaagaagcttgaagtttaattatgttatccccatgacgcacctaatagttgttttacaataggtcaagtgtttccatgcaccattgcagccttctgaaattgaaggtgttaagagggttgtgcaagaaaagttgccagaaggtgtgaatgaaagaggactgacagtcactggcttcctatttttacatgcactttttattgagaaagggaggcttgagactacgtggactgtactcaggaagtttgggtataataatgatataagacttgctgaagaattgcttccatctgcaatattcaagcgagctcctgatcaggtaaatttgcagaaataacatccattgttcttcattattgtatttgttggtgtttcaataatctattactggaaagagctgtatatcgagcattaaattttgtaatcttatcagaaataagaattttggatgcctacattactggaaaacggttatcttacagctcacattaacttgccttccttggtattgtgcagctaatgtttgtgttcattgtttttgtagagctttgagttgacaaatgcagcaatcgatttcctgaaaggaatgtatatgttgtttgatgacgaccaggtatgtttcttttcttataaatggcgtagtgttgagttgacaaataaatttctcagactgaatttgcactttgcaggataacaatctgagacctcaagagatcgaggatcttttttcaactgcacctgaaaggtaccttttttacacctccagaaggcaaagaacgtgtacttttgattatggtaatctccattatattgccatgccatactaaattgtgaatggcagtccatggaaggaagctccttatgaagatgctgcggaaaaaactgcccttggaggactatcatttgacgctttcctgtcaatggtaatcaatactcttttacatgcttaacaacataatgaagcattcttgtgcatgcattatacacatactcatccttctttattttatttttctttgattttgttgactgacatacttaaatttcacacaattctctctttattttcttgtaacacatccaatttatagttggattatatgtcgttttgcgattttgaatggattttactctgggccaaagttttgttcatgaactaattcaaagtttaattgtgtgctaatctttcaattttatccttgcagtggtcactgatgacactattagaaccggctcggagtgtggagaatttgatttacattggattcccgggtgatccatcgactgccattcgtgttactaggagaagacgtttagatcgcaaaaagcagcaatgtgaacgaaaagttttccagtgctttgtttttggacctaataatgctggaaaatctgcattgctgaattgctttcttggaaggtttgtcatgttaactcgtaccacaacttgttggattttcaaaatacacagaagagagtataattctatgtttataagcaaggagacgtttaattttcctctttttcagttgatctctccatctggtttatagttttgtttctccatgatctaggtcatatactgataaccaggaatcaactactgatgagcgttatgcagtaaatatggtcgatgaatcggtgagtcagtatacttatgaaatttgtatcgttatgtttgtatgcgcgcataaatatatatgtattttagtttggttatattttgtctttgcaaagaaatcttccacgtgcaaaatactgaacaaaaatgacaaacttcagtgttgttttggggactgagatgggaactagctagatatctttgatgagttttctctatgggtggatacatgcttttttacttggaaatttcaaacaaaactgttcagagagattgaagatgttatttggatgtacatttttgggcaacatgcttcatggctactttctctaagtttcggtatgtaattggtcattattctgatagtggcaaatctctaaatgtagggtgctaagaaaactcttatcatgagggaaattccagaagatggagttcaagggctattttcatccaaggaatccttagctgcatgtgacatagctgtcttcgtgtatgacaggtatatgtcctgctgtttgattggttgaaatatacctctctgtatgtagtttgtacgtaataattgagttcattgttttctccagttctgatgagtcgtcatggaagagagcgacccagttgcttgtagaagttgcaaattatggtgaggccactgggtatgaggtcccttgcctcatggtttcagcaaaagacgatcttgattcatctcctatttccatacaagaatccaccagggtagggttcttattgaactcagactcaatgaatatagctcgaataattccatacatatatatttatgcacacggatcttttcgcagatgacacaagatatgggaatagagcctccggtatcaatcagctccaaattgggggatttcaacaatttattccgcaaaatcttaactgcagcacaacatcctcatttgagcattccagagaccgaagcaggcaaaagccgcaaacattacaacaggctaatcaaccgctctcttatggccgtttccagtacgttttctttcctagaatcctgaatcttgactcaatttttgtcccaaacaaagaaaaacctgtaacggcttcagacccatgttgggtatacttaaatttcgatctcatgctatgtaaacaatttatctaatttctacctcgtgatttgtaaacagttggtgctgctgctgtggtcgttgggctggctgcataccgtgtgtatgccacaagaaagagctcgtctgcctgagaagattgagaatgaacaatccaatctcttaaggtatgaacacggaaagaggatagcaaatctcgtgtactgagtttgtttatcgttctcaaggttttacaacttgatccagagtactgttgagtactgttcttagaagtttaatggaaatgggctttgtttgaagtaattgtggaagaagatctgtagcaaacacaaacatttagggacaagataaaaagagaacatagtcaatagacattgtgttgaatttcaataacaatagaactttgtctcctcgatgttgttaatcttgctcacgtttgctctgttctcggaattaaccagcaacactttaacatcaaatgaacaaaccattaattgcacaagatctctttagagtttaacaaatcgacaacaatttgaagataaaaagataaaaaaaaaagcaacagaaaatcctattttgaagttttaacaggcgaccaaacaaacactttcacaaagacagtgaataaagaatccagtcacgaagcaagccactattgttccctccgaagcaagtcagaggcggaagaagaagaagcagaagatcgtatcgctacgagggaaggtcttctgttcttgaacttaaggggactccacaccaccgccttcttctgcaatgcaatcactgtcggatggcttggcttccacgagctgcctcctcctccaagagggctcttcatgaatctgctgcttttcattgcattcggagtcaccagattgcggtctggagagaagagtttagagtatcttgcctttctcgggtcaccacggaatgaaggaggagggcgtgatggagtttccatagatgataatgatgatggttctggtcttagcgttgcaattgagactctccttctgggcatgatggttttattgcttgaagcaatggctgatggagcaggagctggcctgaatgcgatggagcttcttcttggtttcattagtgtattcacgtccatagatgatgatcttctgttgctgttattattctctttgaatgttgtgtctgagaatctcttagaatgaccctgagatggttgttgttggggcatgaagtttgtgatccttctgagtggcattcgcattcttgttggagccaaaggcggttttttctctataattgtcggtagtgtctctctcagatgtctagatgttgttgttgttgttgatgatgcagttgctagagctcgtgactcctgcttgattctggtctttctttcttctgctagttgaaattccagatctcgaacctgaaacatgatttgatttttaactgttagaagaagacaacatattgaatccagtagttaaagcggactaaccttatcttgaagtcctcggcatatgtgttctctagcagtgaggcgtagctgtagtgactgcacattgtcctgcagcttctttgtttccttttcctcgtgtttcagcttctcggcctgttacaaaggatacaacaaaaaatgaaataaccttaagatatgttaaagcttagatgaactggagttcgaggaatcaagttaccatttgttttgacttaaggagttcagagacatcagcctgttttcgggcaggtccactttcgattcctcggactctacttgcaaagttcaaggagcaaagggtctctcctagatcggcagaactcggactaatctggacaaacattaatgtcttgcaatctccacctgtataagtcacaatgaaatagaaacaccatggagatgaaaaataagatgtcttatgaatcatgtggccataacaacggaagaaaataggacaaatgttactttacccaaagagttttgcagcatatgggtcagctttgagtttctggagtttgacaaaaaggaaggaaaaaagtgtcatcaacatcaatcagaaaatctcatatgcaaatgtcttaacaaaggggaagaaagaagggaaaaacctgtaaggaatgtggcttgttttggatgcaagggcagagataacatcaccgagtgctgaaagcgacttattgataaattgagattctttcagcctttctccttcaacttctacctttcctactcgctcactgccagccaagtccactaaccaaagatgacttctcgttctctgaccatttatcaaattctctcccttcactgtcactcgcagcaagctgaacaaaaggaaatctcttgttggtataagtatggaaaaggtttagtttcacatgaatttagtttctaaactctagtttgcttaccaatgagagcggctgctttgctcatttgcagcagttgaacccacagatcgaacagcatatcctttcttgagcagatcccacactccatctgtattgtaaacttgagcttcgactaatcctgggacttcttgcgtcccttctgctgattgcttaacctccaacctttatcaacacagcacatagtgttattttgctttttaacaagaaagatagaaactgtaaggcgatttattctactaccaaataatataatggaagacctactttttagggggctggtttgagttatctaccaagaggtcccttatcttctcattataaacctccaacatgctaactgatagctcaaacttcatgagatgacttttgctttctgaacagcgaaatagttcttctaaggtcctatagttcactcctctattctctggtgttccctccatggtaaatgtcttgccagttcccgtttggccataggcaaatatgcagacattatacccatccagcaccgaagtaactataggttttgtctgtgcaaaaacagtctctgcaaaagaaggtacagtcagataagaagactcgttggtgtagtgttcaaagagcaaaggtttagcgaaataaagttgcaaaggtagcgtctcaattaccttggccatcgtcaggcttaaagacatggtcaaatttaaaatgcttcttggaggaatcagatgaaagtatctggagctcgttttcctgtgttgtatcaaactcagctacagaagcacaaccattggctatttcagcttggtttagaggtctgcatctgcaaaagactctgatatttcccttgagttcgatcacttcattgtataatcgtttcctctctgatgactcttccaagtactgtttttcaagagctccaagcttagtagcttccattaaaacacgttgaggcatattagttaaccaaatcaaacaagttttgtatttagagaatctttgtcgaagaaatcagattcaaagtactcactgagaagctggagagcccttgaaatttctggttctactaaggaacaattcttgatctcttgcacttggtttgataccaacgcatgttcatccttcaagatctaagacatgatatagaacataaaacactagcagagactgaaagcaaatctgttgaaaattcatatttaagttcatcttgaaataacctcaacttactattgcaactgagaactcagaaggaactattgtaactgtgtttattcaagaggatgacaaagaaagtagtagtaccttaattttgtcactgcagtcgataattttctgcaaaattggaagtgttggtccattggcaggagaaacttcttggtttccacttgtaatagtatcctcactttcttccactatttcagccaaatcagtaatgcatcatatcagagtcaaagacacaagtgaatctaaaaatacatactacagtctactaaacaaagtacttgttaacagagtttcagattcatgggataagttagggacccaaaacctaaatcgttgataactgaaggtgaaccaatctttctgaattccaaaacaaaatgctaaaacctaattggattctcttcagaacaaatccaaaagaaccaggaatctcagagatataagtgtttgagatgtcaattcacaatcagagactaccaattaacaatcgaacgacttgtacactaatttttcaattcacgacgagaaaaccccttaccagcgtcggaattgtgattgttgacagaaacttccttcgattcacacaacaaaccaccatcgttgcaaatttcttgatgttgatctggcaaaaaccgaagatgatcagcgaaacattaaaaaaaaaaaacagatcaatcaagaaaaccataaatctgtaagaacatgaatcagaagagcgacgacagaaacaaagtatagtacctctttccatggcggatttgtgcctagagaacccaaagaacgttgaatccaaaattctgaatcaaagagagcgagagagagaccaagagagagtgagagatttagagagagattgagaacgagtgtagacgaatttgaatttaggagaataagagccgttggatctaaagaagctttgtaacgtctatattttattaccattcgttccacaaagaggagcgtcataatccggatccgaattcgtttattattcgtttcacttgaagtttcaaacctctcttttccagcagagagaaggataaaagttttcacaaattaagtaagacccctaaacttctattttatttataaagagccacaaatattataatttcacaaatacacccatgtgttccagttgtttgagtaaaatctacttcaattgatttgccaaaggcttgcctcatggcttattcttcagtaccaagctgtttccatggctatcttctccatcgttgttcgttctccaccacacaatttttctcgggttctctctcttgtggcttctctgcttctaccaattcaagactaagaacatgtgtcaaattcgagaagtttcagggtgactctcctcttgaacagaacacttcagtttcttcttcctcttctgtttcacaggaactaccattagaagaagctcaagaccaactagaagaagaagaagatgatgatgagttcagtaattttgtccgtttgttttctttattattcgattatactttattttctgtgaattgggttttcattgtgaaggaagaaccattgaattcaattcaaagttgatcacttttcatcagtttctttgttatttttgtgtgactattggaacataaggctaaaaaagatgtttttatcgttactgtttttcagctgtttgcctaatgatttggaaggagctgttaggcaatcaggtgaagcaggtgctgcgtttgtgaactcaggaggaaatagagctattgtaagggctagtagtatacaaatttgtaatctttggtggggaaaaagaatgagatttggtatcagctttaagattctgactctgaaatcttgtaggtggagcttttgattcctcagctgcagtttttagacgatgaaggtgcacaagctgaactttgggacctttcgcgtgttttcttggagactctcattaaagaaacaggttgtgaggtaagctaaaacagtttgtataatacctttacatgaaacattttatcagtcgatgactcgtagcgcttggaaatgttgttgccagagagttaaagctgtatttccagacgctggagctgctgcattgctaaaataccggtggaaagatgcaacgttcggatttgctaggtaagttggcttacatcttgagagcttaatagtttttcgttcgaaagagtctgtagaaatatgcagtcatgttctttgttgtgatgcagcttaagtgaccggaaacctgtggagaaagaagatgagatcattgtcatggttgttcctgattaccaaatgctggaatatgttgagaaaattgctaatgggcttgctgatgacccggtaactaaatctgtcaaatctttaatttcaactttgctaagaacctttagtactaacattaagaaggcatttctttgtgttctttcaagccaaggcctctcattatgtggaaccctcgtcttataagcgaggaagtcggggttgggtttaacgtgagaaaactaaggcgttacttcctaaggtaaaaggcaaaatccttaatgagacttgacaaggtttttgacgtaacatcaataactgttcttttcattttggctcttctagttcattcactacggtttactctatgagacctctggctgctggtgctgttttcaggtgttatcctgggtaagactcagacttggtttttcttatttgattaagtccatgtagatacggtttaacgagtacaagctgatcattttctatcctcatttatttttctagtaagtggaaagtcttctatgataacaaagacagaccaggccgatacctactcgctaaagaactcattggtcgacctgatgcagaggatcttgaggtcaattgagtactagatttaattgagttgaaaaattcttatatcatgaaaaaaattgggtgcaaatcctagttccatagcttgttttgctgcaatttcattgatgaaatgttttctttttgcagataatatatgggggagtagaagagaaatcagaagaagggccatctttaatgagtcaagctgctggaattttctcatccattaacaggttcatgaaatcaatgtgaagatgatttcttctctgcagtgtaatactattcacatgtcctggtattagaaatgtaaccaaagggtattactgtatatctttctatgctattacatcatgaagagtataatacgtactggtaaagagttctgttccttctatacttcagtgaaccactctggtcgagaaaattaatccgaatcaacccaaaagtcagttttgtacctaaactgcagtctgcagatactatgtactagttctatcatcataacatgaaaatatcgaagttttgcaacttgttctgtttgcgattgacactttgtctatcctaagctggaaatgctacctagagttcttgagagccttcagaatctaaaatgactcgtcatagtggtggtgatgacttgcacgacccaagagtttaacataagaaacgttttgtttctttcttatgtgttatacatgtttttatggtgtgtgtgtgtttttataacaggatttggatatgaccacagaaagggaggaactaaaactttcatcatccgtgcctctgtttgatgtcatcactcagagtttgcagatataaagaagcagcttccgtgaagttcaaagctaaaatgaaagtggcaaggtacactgtagagaactcagtggttatcaggaaattaacttgttctgcatttgagtatttccatgctagaacaagggtatctacaaggtttcataaatcattggtttgccaattataagagagatgacaaatggagactagattatttcatctagctttgaactaatattgttttggattctagaaaacgcaaaactcgaactgaactaaaagcaaatgtctttttttctagacctaccatcaaaacgcaacacacaaatccagaaacaccaacacacaacatcaagcgtatgtgtaaaaacaaagaatttggttctgcaatgaaatccaaaacagagcctttgatggggaaaaattcaatctttgaatcgaaaagagttgttcttccaaaaacaaattaagcttcagtaagcatcaacatcacagagttttacataaaaatctcataaagaaacatatactactactacctactctagttctgtttgactcaacagtttacatatatttttggttttgtattaagtattaactatataaaattcatgaataatgaatcaggaaaaaagatgaatacattgcttctctatacattattacctatcaatggttttctccttgttagtcttcacagtagattcacctaatatgattcacatgagcaaatggatccgtatatttttttgaagcagctttcttggtggtcttaggtggttctccaaaaacattccaaagcctgagagtctcgtcaccggctgcagaagccacggtacaaccatccggactctgtgccataaaaagaactcttgatgtatgaccattgagttcagccattttcaccatagatgggtacttccaaagtgtaagctggttctgtgtaaacccatgtgagctaagcaactctctttcacttttgctccataacaatgaacaaacttgagagccagtttctactgaattcaagcaagccccagtgtgtgtattccagaacttaatcttcccatcacctacaccaccaccagttgcaagcaaactcgcttggaaagggcaccaagcaagagctctcactgcagctgtatgttcctcaaacctatgcagccattgcctagttgggtttgaggaagcgacagaacgatgatcccaaatgtgtactacattgtcgttaccaccacttgctagtttttttccagattctgaccacttaagaccacaaacctcttctgtgtgacccaagtaagtttcaacaatagatgatctgatcctcacatcattgttgacgatctttccatccattcctccagttgttagaatgtgattgttccatgccaatgatcctactcttgactcgtgaccacctctcagtgttctcacttgacgattggaaacacaatcccaaagctggacttcactgttgtcaagaccaattgccagatcaagaccatcttgcgtccagttaatacttgtgacaggtccctcctcttcatcaatggtcacaagcttatatgtagaaccactagacgcatcccacaagtaaacagtgtctcccaaagcaatggctaagacattagaactgccccaatccaacaagttaaggtagaagtcatccgcaattccaggtgcatccaagactctctcactattctgaggaatgtatctacgaggctttacggatataggttgttggtgaggaggatcagagtgattactagaaagcagagctttaggtttgtttctgaaagcgagaatccgagtgcgattctgattcatagcctcagccaattgcgtcatgtaggcttttcttgatgctgaagttacctcatcgacattacgttttcttccttgggtaagagcgtagttagcaaagtcgaaatccatggccgatctattcggtatgaatctgtcgaagttttccttggaaagtttccgacggagaaagtgttctacaagtggacacgaagcttgtgcctttaaatgtgaagaagtgttcatcataactgtgattagaagaagactaaacgaaatatgacaaagagacaaataaaacctgcgaagaaggaaacgtaaagtagattcaaagcagagagacagagagcgaatagcgaatagtgaaggaagattgtggcaattttagggttttttgctttctttaattcattacatagaaattgtcaattacgtacaacggttagatattagtaaaatggaaatcggatctaattcagatttccgttaaaaataaataaaagattttcattacagttactgaagaaaaatgaaataaatatggaaatcgaatttaacaaattcaatataaaccctaatcccaattctctgactttattttctctttgcaagaaactaaagcttctttctttcaccgtgtaaacaacaacaatggattcttcaatgtcgacgaagaagaaaaccaaattgtctgtgagaaaccaaacttgtttcaagaaatcgtctctttcttcttcttctactgcaaaaaagaccacgaatttgtctatgagagaagagaccatgtttaagaaagccttggagctttcaactctgtgcgacatcgaagtctgtgtcatatattatggtcgtgacggagaactcatcaagacatggccggaagatcaatccaaggttcgagacatggctgagaggtttagcaaactacacgagagagagcgacgcaagaaaagaacaaacctttctctgtttctacgtaaaaagatcctcgacgacaataaattgtcggagaaagtcttagagatgaaggattcgctagaaagtggtctacgggtattacaagataagcttctgttactccaacccgagaaccagaccgagctaggtcagagccgtgcggtttcttccacaacgaatccattgtcttctcctgaggatcatcatcatcaacaatggacagaaccattggtgactggtgtgtcaaacacagagcaagacctatcgacgtcaccattgagtaaccatcagagcaaatattcagtctttgtctataaccatgacagcggaagcttctatcaagtccctgactcgatctgtttctagtttagattatgagttttaattgtctgattaagagtttgtgttgaattgtatgtttttcctaagtattatcattatgaatgctattctcaattcaatttttgtctgagtcaattagttggctttgttggatttagaagccaatggtgaatttccagattacaatgccttgtgattttccgattaaaattcttccaagccctaacaatggagatttgttcaagagatctcctaactctcctctatggtttgttacacacacatcaatacatgcataacttgtgcaataaccttctatctatttatatacaactcactagactctcaagctagtggttaaacaatctgtttcttcttgctctgttttcacgtgccttctctgcttctctttgcttattcacgagcctcaacgaatccgtttgagctaccacacgtgcctcctagcttatcataggtcttttgattcatgtttgtacaagcttaagtaaagtgtatccggaggattgacatatacaatagacattgaatgttagatatccataacttatgcagataatgcagataatacaactaattgagcttgcctctgtgaaatctttggtttaatttggtgagtgggttcaatcgaggaaatattttttgaaagaaaagcgattatgcaatgaaatcgaaaactgtagtgcaagacaagaggatatgatatgcaaattacatgacactttgatattcagatgctcttgttgcaacttccgacagaaggtgttgttaaaactagtgttttgtccaatggtttgattcccatggcttgatttagacgccaatgcattcccattttacaatgccttagtgagttttgttgttaggttactagattcctctagggattcatgcttgtaccagctcagatcaagcaatgagagtgaccagtcttgtgtcatgctgtagtaaaattgtggataagcgtaaacttaactacttaagcatcttggatctaagtgtcatgtgaagggttatttttagaggggattcccctaagtctttatgttagacacttgagtacttaagagtccatcatgttttgatgtgtgacttcgggtcagttttttttacttgtctcaagttcatgcatttagaaaataatgtatatgccagtgatgaagctatacagttgcttatctcgttttgcccggttcttgaagatttgagcattgcaagaaggctagatgataatcttgatgaggatttacaagtgcactcattctcagacgacattcaccaaactcagtgtagacgacattcaaatggaagctggtgctcttgtttttcagcatcaaggcagagttttttattgatgcccctatcctaaaatatctgaatttcaaagatgttatataacagagaataaaattaattaaaagaaattttcacataagtggatgaaacaagaattgcccctcatggtttgtcaaagtgagatatggttttcatcgtttgtcttttcagttgctttcagaccaaaatatccttaatgggagcaaccaaaccacaaaacacttgatttcggtttaatttatgtggttcagttttgaataaaaaaaaaaaaaaaaaactgaaacaaagaaatcgaagaagaagaaaaagagaaagagacggagaaattcgagagagaagtagaaagaagttcaaaattcattatccactccttcatattttgacatctctctattgaactccaaaattgaggaacaaatttcttattttcagagataaacaaaatgcaaaaaaaaagctcatagattcaaacactttagctttttaaactaaagatactctaggtttacaagatttatttataaataataatcaaaacgtaaaaaaatgagattttgagaaaactgataaagacggccgcaaaattaggtttgcagaaaaggatacacaggttgaagatgactggaaaattacaattatacccttcatcgaattttttctgtgtacgtatatttaatttacagtgtacgtacacaaaattatttattagaacgtatatgggacgatttctaataactcaaactattttattacgtattcttatatctcaataatctcaatacatacataataattaaataaaaatagatggtgaaataatgtacgtacatttttgttggtaaattaatgtatgtacatgtgtaataatatacgtacatctttgtttgtacattaaattattaagaaaaatttattgatacaatattaaaccaatattggcagtggctgagataagacattgtttgttgtatgatttttctgttcttaaaaatacttcccaatctatagtgtacgtacattggtacaaaccatgttgacacatacttcttggagtcacaactgatgtacggtcacccgagtgagaaatgttatctccgtcaggtacacgctgacttgtgtacgtacactctgccaacagacgactgaattcccctggtgtgagaatgacgttctcctcaacattccctattccatattcttctacaattacatcgttccacttgttgtaatcataatcttcgccactactttcactaccatcaatagtaggatcgagggtacttccccccatagatccatcgtcaccctgataatcatcatacccatcaccatcttcgttatccccatccttttcatcctcatctgttttatcgtcttcaacgtcgtcttgctcatatacggcctcattattttcatcaacatttgaaacacggtcactttcagcatcgtcaccatgagtcctagagacattattcttgagtgtcttgacggttgtaataaaagagacaaacaagttgagagaaggatacctaccacgaatcataaagaacgtattcaaccccacttgactgtcaatgtagacaggagggcgtttagtatctatcatcactaacatctctcccggcatccagtaactaattatgggattgatctctgtggacttcaaactgaaagcctcgcttagtgtacgtacaaattccgtgtacgtcatgttttccttaacacgtacacagcgaccaaacatgtcttcctttagtttaaatttccattcttcttctttgcatctccactcaccgatcataattaatacgggaatatccattacccaacaacatcataaattcaggagaaacccagtaaatgcaactgaaaacatgattatatctacaaaaacaaatagaatttcgatatacacacttataaacataagtatttacacatttatcattttcaaccaacaaaattgaaaataaaatatttcagggtttttctatagaaaacaaagttgatttcgaacacaatgaagatcatagtgtgttataacaaaaaaattctttaaaacttcattacttacacgataatgcttatcttggctccaaacttcgtaaataaacaagatcaacacttcttgagcatcaatgtttgttcgcaattaatgtttgttcctgggttcatctttaactcaacaattattatcaataattttataatattataacatgtaataatgattttgtattaattataacaagagtcacgtctaaactttttgggcattaaatgttgatgtcatttcgtttttaatggaaaaaatatcccttataacctatgttgcatggaaacggaaacggaaacggaaacgcggatacgaaacgtttcggaaacaggaaacaattttttcttaaaattagggattggaaacgttttggaaacgtatacacatttatacatatatatatatataaataacattatatatatatatataacattatatatatatatataacattatatatatatatatataacattaacataaaactatattaaagaaaaaatggtttaaataatacaagtccaaaatatcaatattaaataaataaactaaaattctaaaagataaaaattaaaaggttcaagttcaaatagttaatttagaccaacattttcattagttttatcaaagataatataaacctcttttcaaatctggtttaacaaaaaaagatcttaaaactcaaagtcttccaaaattagttatatgtattaataattttaatattttcaattttagttattaaatttttaaagtcaataaaaaaaatttgtcgtatgtctatttcggaaacgtgagtttctattttggaaacgtaagtttccatcgtgttttcaaacctagatttttaggaaacgtgtttccgtgatgtttttcgtgtttccggagagtttccgtttccgaaacgtttcggaaacgagaaacgcacctcagagcgagtttccatgcaacctagcttataactgtacagtcgtactcctcaacgtgaaacaaaaataattccaattaaaccggaacagtatacctaactaaacctgactaactaaaccgtacattcaacagtttctctgctgtagcagcaagggcaaaatgatcaaatttcagctgaaaagacaaaacgtgaaaaccacctttcactttgtcagtccttaaaaataaaacatgatcaaagggtgtggcctgcaaattaccctaaaattaaaagcatacaagttctgtaaccaaggttggcacaatgtattctcttgtgttacttaaactatgatggagatctttccgtttgcctagtttttgagaatttggttcatcttctgtgttgcagccgaacttaactgggaacttaaacagcataaccagtctacattggtacttaaagattcaggttattgcttctggcaatgccaaaaacaacaggtttcatggtctacaataataaccaacatgaacatttgttggtaaaagatcaaataataattttattgaaaaaaatggtaaattatccacatagggaagtgtgccttattttgacgtaagcaaaatacatgtgagaaacaaaagtacattactttagtgaaatgaggcgtttttggtgaggtgttaaaaaaaaaatggaaaacatgattaacgcctatccaaaatatgttgtttatggaattttatagccgtagcatcacacaatagttttacatatttatgctcattttcataattcaaagattttattccttttcttctatagtagatttgtgagctaaaaaattgttttcaattgacttttcataattttattactatactagtagatttgtgacgtcattgttttaaagttgaatttttataaaatggtaattaatcggtttatttcgtatattcctgaagacattttttctgaagaaagaagaaaagatggaatttgcttcgccggaacaacgtcgtctcgaaaccattcgatctcacatcgatacttctccgaccaacgatcaatcatcatctctattcctcaacgccaccgcttcttctgcttcacctttctttaaaggtaaagcacctgaaaattacctgaaagttagtctctccataatttgaaattttctctgtttcttgagtttttaagagctttggattgttttctctagaggatagctacagtgttgtgcttccagaaaagcttgatactggaaaatggaatgtctacaggtttttaaaaaaccagtcctttctttgttgttacgtttggttttttgataagtgtgtgtgattatgaatctctgtttttttttggctgtgacagatctaaaagatcgcctacgaaactcgttagtaggttcccggatcatcctgaaatcgggactttacatgacaattttgtgtatgttttgatgattacttcttttgaggttgttttaaattgattggctttagtttgtgactggcattacgtttttgtggaatcagacatgctgttgaaacatatgctgaaaacaagtatcttggtacacgagttcggtccgatggaaccattggagagtgagttttaaagctgttcttttgctttgagattttcgctatggagttttgagctgaggtaggtttttatgtttctgtgatatgtttttatgaaggtattcatggatgacatatggagaagcagcgtctgagcgacaagccattggttcaggactcttgtttcatggagttaaccaagtatgtttcactctactttgaatgtaaaacttatgcagctatggttcttgtaaagaaaaagtttcttcatttaatggaacagggagattgcgttggactctattttattaacagaccagagtggttggttgtggatcatgcttgtgcagcatattcatttgtctctgttcctttatatgatacacttggtaaccaatctaaatttgattttttctctttagttttcgagttttgcaagccttgtctcttcttaatatgattcttctggttacgcaggtccagacgctgttaagtttgtggtgaatcatgctaatctgcaagctatattttgtgtaccacaaaccttgaatattgtaagtgtgttttggtttgttaaagtgctagctattatcttctgagaatcagttcaagtatagtctaaattgcaacactttcgatcatgaattgtgtttgtctttttttgttgggaactttgcagttgctaagcttcctagcggaaatcccatccattcgtctcattgtggtatgtacttctccaatatgtaatttcactgtaagctaaaatatatactcccacttataaatatgttttgcactgtgattaggtggtgggaggggctgatgagcatttgccatcacttcctcgaggaactggagtcacaattgtatcataccaaaagctattgagtcaggtagccttttacaatgggttttaactaaagtactaaacatgtgttgttatcttggtgaatgatgtctctgttcctgtaatgagttttgcttggtagtgaaagagacttcatgttgccaccggttatcttgtagggtcgaagtagcttacatccattttcgcctccaaagccagaagacattgcaaccatatgctacacaagtggaaccacaggaacaccaaaggtgagtttcttctggttgaaatggtgcataaatcactttaaagctaaatactcaactatatagttgatttcatatgttctttgtttccaagggtgttgtgttgactcatggaaacttgatcgcgaatgtcgctggttccagtgtggaagcagaattctttccttcagatgtgtgagttgaacatttcccttcagaagtggcacacatagttttaatggaagagtctttgactcagatgtcttctatttatagttacatatcatatcttcctttggcgcacatatatgaacgtgcaaatcagattatgggggtgtatggtggtgttgctgtcggtttctatcagggggtatgtaagctcatgtcttgtgacatatgagattaacttgttttacgaaatcagactaatgtatatatatatatacttctttgacaggatgtcttcaagctgatggatgattttgctgtgttaagaccaacaatattctgtagtgtccctcgcttatataatcgaatatatgatgggtaaaatcactttatacttcccatgtcaagtacgtattgtggaactatgtggtttctatgtgctgactttaatctccacagcattacaagtgccgtaaaatcatctggggttgtgaaaaaaaggcttttcgaaattgcctataactcaaagaagcaagcgatcattaatggtactaatagaaacagttagaaaagtgaactaagtagtatacgtgtttcaagctttctgcattatatctgtctttctcattttggtttcttcagggcggactccttctgcattttgggacaagctggtgttcaacaaaataaaagaaaagcttggtggacgggttcggtttatggggtctggtgcttctcctttgtcacctgatgtcatggatttcttgagaatgtaagttttcttttcggtttgctatgtttgaacttttcttctgtgattccactctcactgatttctaagaatctgaaactaaactaacaaagaatatatggtctttgatcatcgtgatgaacagatgctttggatgttcggtgcgtgaagggtatggtatgaccgagacttcttgtgtcataagtgctatggatgatggtgacaatttatctggccatgtcggttcccctaatccagcttgcggtaagcaatgtgttattttaaagacagtgtatatatcagaatccaaacttttgtatccaaattgtatgactggtttttgtgttttgaaaatgttttttctttcttagaggtaaaacttgtggatgttcccgaaatgaattacacatcagacgatcaaccatacccacgtggtgaaatctgtgtaagaggaccaatcatcttcaaaggctactacaaagatgaagaacaaacgtaacacattttccagtatcattagtggctctagttatatgtatagataagtggacatgagtcttgacacatttacttgagcaggagagaaattcttgatggagatggctggctacacacaggagatatcgggttgtggttacctggtggtcggctcaagatcatagacaggttttataaatcaaaacattcttgttatttctttctttgcggaagaaaaagttgaaatgtttgttaaaacttcaatgtgcatgacaggaagaagaacatatttaagttggcgcaaggagaatatatagcaccagagaagatcgaaaatgtttataccaaatgtagattcgtttcgcagtgtttcattcacggtaagcaaagactctactcacactatacatggcttcttcttcacttgtgctatttctcaaccgagccagaatgtctctattataggtgatagcttcaattcctctctagtagctatagtttcagtcgaccccgaagttatgaaagattgggctgcatcagaaggcatcaaggtattatcttctaactcaatgatatcatcacttattagagactttaaaagcaatttatcaatgtgttgcaaacttttcttgatgattgtagtatgagcatctaggacagctctgtaacgatccaagagtgcgaaagactgttcttgctgagatggatgaccttggaagagaagctcaggtaaaaaaaaaaaaacctgccttaataatctaaaatgggattagaaaaccaagcaactcaacaaatttacaatttgtgcttaatacagttgagagggtttgagtttgcaaaggctgtgactttggtgccagaaccattcaccttggagaatggacttctcacaccaacattcaaggtaactaaacaacaatgtgaagttgaaaccgcaatgaaatttttgttacttacctcggaatctctaattcatgtgtggtaaaacttttctaacagataaagagacctcaagcaaaagcctactttgcagaagcaattagcaaaatgtatgcggaaatcgcagcctcgaaccccattccttctaaactgtgatgctttttgctttgcttaaaagtgtttctttttttttgtattacaaaggtaattgtagaactgttaaaagatcggattaggatgaggtagatcgatcatttgaaataaaacagattcatggtgtaattttctttgatactgttttccagaataaaggaagcagactatgtcctaatcctgaaatggatgatgagtgtggtcataagtttgagaaaccagtgcatgtccgtacagtttggtttagttttgctttggctaacgctagtgttgaaatagtaagccttattagaatagggagaacagcctattccaccctgaaccatgttgctttatcgttttcatataccgaactttttatgtgcttataactacatgaacttggatttaatttgaatttacaacacaaactatgaaaattcggtagaaaacctcaaattgctagacggtgttactgttccgttaacagctgactaggatgatatatttataatttaaaataccacgtaattatgtagtttcatttaaactaaaaacatttgacacaaaataatgccaagtccggatcgaactcatgaccattagaccatgtacatgggtggtatttctagaaaatcacaagtccaaaaattatttttatattgacaaaacaattagaatgagcttgatcagtatcagcccagtgatatttatgataccaatatcatctgacgcggcttctcctgattggttacatttgtcaaaagcaaaaaaaaaaatatatatttattaaacaaacattataaatcatatatatgaaagttggtcaactctcttcaaatgaatgacacatcaccaaacaagaaaatgacatgtgtcattcgatattttttaaagtaaaaattaataaaattaaataaaaaaattaaatgtgtcatcaatactactcttaattgatttcttaatgatagtttatgagtatcacctatgaacatgctcttacgttcaataaaacaccccgttcatctaagccaaggtaagtttttgactaacacatacagaggttatatatatatatatatacaaactcaaaattaaaaataacagacttaacgaaaaatcaaatagaaaatagacaaatccatcaaatgaagtcagattaatccgtcaattgagaaatcgtcttgtttcctctgcaacccaacctctacaatatgtcgaatctgcttgtaaaacctaagatttcgatccaaaagagaagctgctaaatggaatcaaattgaaaaaggggaaaagtgaaaaggcgagagtttgaatctagaacaaggaaggttcctgaagcaagaaattgaacgtatagtgagaacttgaatggtcgtaaagtattcatgaatataaagtaggaaaaggaaaaggcttttcgttttgttatttttaatatatatacatcttttcattaataaaatctacttggttcagttggttttaagttcgattaatgttctcaaaggtcttgggttctcccagtaattgtaatattttgtatcatttttatttcatttacttaaatgaaacaacgtcgtttcgtgatattacgtggcatcttagtcggcatttgttaacggaacagtgatagcgtctaacgatttgagacttttcaccggatttacatagtttgtgttgaaaattcaaattaaatcaaagttcatgtagttacaagcacataagaaagtttggtgtatgaaagcgataaagcaaattagttcatgggggaatatgccgttctccctattagaataagctaaaaaaatcgccggcaccaacacctgaagtaaaccgtgaaaaagaaaattaaaaaattagactggtttatttcgttacaatttttctttcaagtttaatccaattacttcaaattattcatctccaaatcttatattttgtatttagcttcattgcaaatatttcgaagtatagactgagtatgtttcaaaaattagttattggttaagtaatttctaaccagtaatagattttttgccgccttttttccatcaaacataacttatattaatttgaaaggtctttacacaacgatttattttccttctttataattatataaataagcattaaacgaaataaaacagattaaagatcgctaaaaacaaacaaactagaatcgaccaaaaattctcgtgataggaaaatttttggtaaatttctcgtgatattctatcacaagttggttggaagttttagaaacttctcgtataaactgaaagtttatttgaagacaatttctcctgataaatttagctaaaatacattttactctaacttctgcctaatttttaccaattaagttgaaggtttagtagatcatattttattcttttacactaaacattgtgtatacaaaggtataatgtttctattttcttctcttactattaagaactgaaaaataattatagttacttttggtttttattcttacttttcagctactaattagatttttatttttacgtaaaacaattttgtactgacacggtccaatatatatacatgtctctatttaacacattagagtataaaaataatttttagttagaaaaaatatttaaaaaattaaaaagcaacttgtgtaccatctactgtacaaaaccaagagcaaaatatgtatatgttccaccttgaacaatataaacactggataatggaggtgttttatgtgcggttcatatatattatttgttttatttgattttacgtttttgcaaatcaaatttatcaactaattcttaaactttctaaacatttgacggttctctctcttttcattttttaataaatataaaatataaaaatcatttgtataagttacacaaacaactatgacctatatcttgaaatattaagactatatatattaagctaaaagttctaagatagtgatttaaaatatttgaattacatgtattatatttttcactttcaatatctaactttttatcttattaataataatatgactttatagtattttataaatattttagtaataataattctatatctaactcttagtaataataattacatatctaactttatagtattttgtaaatattttatctagaattaaaattaatttatagatattttactgtatttataatattttttaaatacatgttcaaaatatgttaaatcaatgttgcaaaaaaattatttttttattattatgtatagtttatagaaaattgatatttcttataattataaaaatttaatctgcaccgcttgatccactttcaccattcaacacatataaagcgtttgaacagggtttgaatgtagggcgcgtatcgagtggtttagggacggttcaattattatgttaccattcaacatcactttattatgttatctgtggtttgataattaaaaagtaaaaaataaaataacactgatgcggttcaaaagtgtaatcgaaaaaacaaaactgtagttatcaaattatacggcatatgtggtttcaaaacttttacgtgcggttacatttttttattaattagttattttatttttaacagatttataatatggtagcttaataatagctaaaagataaggtgcatatttcaaaacgctctgaaaacgcagaagatagttatgtttatacattattttattattttattaatcataaaagggaaaaaaaaggtttttgtctatataaagattgcatgcgttctattagttcatcacaaaaaaacattgacaaacacaaaacatataaaaacagcaaaacaaaattccttgtctgatttattcacttataaagataacatcaaagttatacaaagctttcacttttaaaggtaaacaatgtttaattattttttattctatactaaatttaaattctaaactataactatcaaattattatatttatatatattaaaagcaatgacactagtctttttaagagatattatcatgtaaatttatagtaatttcttaattatgtatagttaaataatttaaatttatgtaattataatttacaagaattgtttaatcgatgtcatgcttcactacgttctattatcgagaggacatttggagtttggaaaaattatggaggactctttgtgattttccaaaatatagtattcatgttcaaaagagaatggtaatggcgacaatgagattacacaatttcatcaagatttcaaatttttctgatgcagattttgcagaagtaataatagagcctgaaataaacaacactgattgggagcatgatttagatgacatggaagtagctgaagaagcagacagagaacatatgacataaataacagataatactgcagatatcttgtgggaaaatcaatatttacgatagtactattttgcattgtattattttgatgttgttatatgtattatttaaccagattttaataatattttaaatctaaaataatatacgaaaggctttttaatcaatataaaataaaatataacaattttaatttttagttacattatattagttttatttataaaatatttatacagaactgcttacaatattttcaccattcaaacatttgtattgaaccgcatgttgtttttcactattctaaattatctgcattagtagatccgcttgatccgcacatattccacatattgcgtttttccttaataaaccgcagttaaaccgcaccgcactagtaaatctgcttaatccgcactactcaatctgctgtttccattcgaagcctcaggatgtgaatgtttacggcgtttaggtgcggatcattatatgtgtcaccatttaacactactttttgtatttcatttttatttagaaaaaaataaaaatccataaaaatggaaatgcacactataatatatgtgtttagagaattgttcaagcgtttttagctgtggtgtctttgcatatatttttttattttgttaacttagaaaaaaatataatttaacatcatactgtattgtttgatttatattaggggttaaaaagataataaggcatagaagtcgagatattgtagaatttgggaagcgaattaaggaaattatttctctcttctgccgttcataaacatgggaagattgcgccggtgggaagactgcgcattaaatgctcgtaaaatctctgtggaaagattgcactggcgttatggggaagcgaaagaatttaggaaaagaaaatgattacggagatatttctcgatttgtgggaggagctgtatacagagttcatatatttattatcgccgtagaggcgttgcccaaacaacaaaacaaacacaccataaaggttctgagaccaagttaatgagacgaagaacaaagtagagataggaagaatctggagatcattaaagagcatcaataaatacgagaaggtatatatatatatatatatatatatatatatatatatatagtctcccccaaatcttcttaatcttaactattgttagtttgataaccctttaatcggtaatgacgaagttataactggattttctgcaggtagattatggttatgatagtgtgttagttagaggagaattgagaaaagacgatgaaggttgttatgaacatgtctccgccttagaaagttttacgatggcagttcgggtgagggagatagatggatttaataaggttgttactgcggtaaaggaaagattgtcgttaccagagaaagacgatgtcgagctaagttatcagtggcctcaatggatgatgggactcgactggaaacgagcaaaccgatatacatccttgatgatgaagatatgaccctattcatggcgataagagctgatcttgaagatgtacatctgcgagtaaaaatgataaggggaggcctgggtaagaatgtaaatttttacaagagccatttacatttgggaggaatgacagcagatgagatatctgataattactgaaattctacggaaactaggttagtttgggatagataaccaggttgttaacgcggaatgttagctccagcgatctccaaccaagagggaacgaaactgttgaatgaccgagaagagtgaacctaaatgaagggataaggatagaggaaccgttaaacgcaacacctcttagagcatcggtacccaagcagtcctttacacagagaaataaaaggcaacaaccagcgagaaaggcaaatgccaagttaccgagtcaatattgtctcaacctgcattcaagaatgttttaccatgtaacaacatgtttgaggtggaacaagcttctacagaagcggaatttgacgcttttaaaagaacctacgtcgcggaaatgtggcgagatgtatgtactacagagaggactctagaaggacagcaaatggagacagttgtggcaaacgagggaacaaagacagctagaacattgaattgtggggtaactatgtcacaacaaactcccgttgaagacgaaaacctagctgacacttgctggcgcatccatggcaacaccacaaaccaaaatcttaatgttgtcgtcattagactcttcgtttggaacaccgagttccccttctaccagttttaagacacctattcccaaagaattctcgaaaattaaatctttgggagagatatgatgtctctcggttctgacacgcttactgtttagcatatatcgcactttaattttgataggcggataggggttaataggtcattattttgctacatagacgatccaaatagtgtagatttcagttagttaaataacgagtcttctttggtcatcgagtatagaaacccttattttattatataaaatatggttttcaaagttactaactcacatgattgtgccacatgtcaaatcaaatgatcagatgtttacatgtgtcattaaagatttaacgtttttattctttagaaaaaatagaaaatctaaaaaattaaacaaatttacatataccaatttatatgtatatatatatatataaacaatttacttttattcaacaaaaggaaaattaataaagttgttttacatgtgttattggtcatttaaatgtagcacatatttttttaaaagataatttaatatggataataatactaattaaaaagaccattgaagtttaaaataataatataatttatttaaaattagtttagttggataaaattatatttgccaatgcaatataatattttcattcgttaaatgaaaacacaaaatattaatgaatttaagagaataattttttgaatacttatgttttattctaagaattttagtgcatcatatggagcgtcttgcatcatttgatgtgttactatacctaatgaatctataagaaagtttttttaaatacttatatatataaacaatttacttttattcaacaaaaggaaaattaataaatttgttttacatgtgttattggtcattgtagcacatattttttttaaagataatttaatatggataataatactaattaaaaagactattgaagtttaaaataatataatttatttaaaattagtttagttagataaaattatatttgccaatgtaatataatattttcattcgttaaatgaaagcacaaaatagtaatgaatttaaaagaataattttttgaatacttatgtttgattctaagaattttaacgcatcgtatgatggagcgtcttgcatcctttgatgtgttactatacctatgttttattctaagaattttaactcatgtaatcataagtgaaaatggaatattttgagaaaatagcttataggatttaagttctcaattccttttaatgagaatattttcatttattaattttaactcattttatattaatttgcatgatgtaaaattatcttacgagattacagcatatataaaaaatatatatttgtggatttctgttttttctattaattatattttgtttgttgttaattatttttatactaactaactaggatataaatttgatatgtcataaatattattttgatatgaaaatgttatcacttaaaatgaagtatgtaaaatttaaatcgagtttattatgatgacatagataattaaattccataacaaaattgaatgtgtaagatagaaatttgttttttcttttcttttctagatactaaattaaatatagaataaaggtcggttactatttagaattcaaatatcattgacaagattgagtgtttataattacaataaaatgcacaagactgaaattttgtttaaaacaataattattaaaataaatatcaagaaaagtatattaattactatacaaaattcaaatactatcgataaaaatttatttttatatcttacacccgtctaaataggcgggccttatctactattaatataattacaaataattagtctctaataatcaaatatattatgtaaaatttattacatctgatagtgaaataactttatcatatgtataaagtttaatctcattaattaaacaacaaattaatatttctattattattatgtatttttcttattaatataccttttaaaaatatatatttcaaaccacttatactactttttaccattcaaacaatttgaaccgcaccgcatgttgtatttgtttatcattcatgtattgatcaataccgcttgttatgtagtaaccgcacttgttccgcataatgcgtttttttgaactacaccactgttaaaccgcaccgcacttccataactacttgtcccgcaccgtccaaaccgatgtcaccattcgaagcctcaatacataaaatgttcaccaatcatgccctatttatactttccaatgcccatagtcaatttgtttactgaaaaatataagaaatttttttttgactaaaaaatatggagcatgatatatccattacgatcaactctttttcgtttggattttgttattaaaatatgtacaaattgttgggtgattgtaagcatcaaagtgagtaatccaaaaatgagtaatatcaaagttaataacaccaataattggtttagcttaaccaagtttattatgagggaaggtttagctttcttggtttcgttattgtctatatattatgtgtgagagatctgtaagagctttataacaaattccttttttttttttgaaattccggttctataatctatcaaatccattttctaaaagcaagagtatcataatatctaaaagctatagactaaagacacttgaataattttacctcccttcttggaacccctttcagctctatttgcctcttcccttgctaaatattctacaatcaacaaatcattttctgctttttgtatctcatccaaagcttccaacattttcttggggtaatttattgtagtggaaacatcctcactttgcttcttcaaacccaaaacaatccactttgaaaccatcttaatcatggcatcatctctctcttttttcttttttgaagacagtttggaagcttgcctaaggcatctgatttcttggagttctcttcgaatatgattttgccaaaccggagtttaaaggagaattttccaactttgacttcatcatcatgaccaacttcaatggcatgaagaggagcatgaggagatgaagatgaagcttcttctttcaaaagattatgcaccctttccacacctttgtaactaaagaatccccaattttctctcaagaaaaactgccttttggtgggatccctatcacttcatgaacaacatcaagaaaggttttaaaacttttggtgttctccccatttttctctcgctaatttttcgtttcagagtgtttctgatgaaaagtagagaagacgaagaattaactttgaactttaaaacaatgtaaagcaaaaattgaattaaaggagtcattgatgatcagagcgcagagctgctcaaagagcaaaagatcgggacttggagaagaatttctgtttatgggaagaacaaaaggttttcgtcaatgaagatagagagaccttaaattagggcatctccaaccctactctattttcgattaaaaattcaaaattattctccaaccctactctatatttgactcatgaaaatagagatttatacaaaattgctttatatgaaatagagatttatgcagaattgctctatatatagagaaactatattctctactctattttagagttcaacttttttgtttatactttagtccctcaaatttaaattttttttatttaatacatattatcgttttacaaacaacaattcaacacttagttttatgagggatgtgacagaagcaattaataacatcaataattggtttagcttaaccaattttattatgagggaaggtttagctttcttggtttagttattgtctatatattatgtgtgagagatctgtgagagctttataacaaattcctaattttctttgaaattccggttctataatctatcaaatccattttctataagcaatagtatcataatatctaaaagctatagagtaaagacacttgaataattttatatcccttcttggagtctctttcatctctatttgcctctttccttggtatttacgaggtacgatgagtaatacatctcaatgttgctctatacgactcataaaaaaatttatacatgatctcagaaaactataagctgtgccggcgcatggggtaagcaacgtaagctgtcgcttaccgcccaacttttcttttctatttttttttggtttgttgctaaaaaaaaaaaagtaataaagctgtatgtgattttgattttttcaaagatgtattcattaaggtttctaaatatgattatttctaagttttggttattagttttgaagctttatgttttttgtatgtctaaatttatgttttttgtttaaaagtttgactaaaaaagcatataaaatagattaattattaaaattataagaattttacaatatcatttggaaaatatgaaatttaattattatttacaattttcctataaaagttatcatttttgtttttcaaatatttagtcgtttaaagtcgaagaaaaaatagtattatggataaatttaaatagtattttaaaaagaggaattaaaagttatcttgattagggccttcccaaacattggagcggcactaactataagtacatgccgaagtagaggaaaatgcacatgaaatttacttgtttcttttttggctgaagattacccgggtaaattcgacacaccatctccaaaagattttactaatttgttcaaaggaaacttagtgtgcaagtgtcatactagactgcatggagagacaaataaaataaggtgcatatgttctattttcttatatttctattttcttatatattcatgttagagaagatgaatccttgtacggttttctatgttgaaagtggatgataaacgaaagttttggtacttcttcacattaggggtttctattgaagactttctagtcatggggaaagtaataattttggatgaaacccatccttaagacaatatatgatggagtgctaattattactacagctccggatcgagatcatcaccattatctgattgcttttggcgtaattgaaggtaagaaagatgtcagttgaacttggttttacaaaaacaaaaaatcaaattgcttatgctagattgtcctgaaattgtattttattttaatataaaccaaaatctcatcaaaacaatagttatggtctatctgttgtctcaccatgggtattgtatttatcatttgtcttagaatgtgaaacaaaggatttgcacatattgcacatattgaacaactgaacatatatgaagtgagatttaatagtgaataaacgcgatggaagagaagaaaatagaagatatggagattcaaaatcgaaactatagaagaagagaggaaatgagatccaaaatctccaaattcctttttgttgattattagagaggagtgagagtgtttcttatgggttacttttagagtattatgactatctgtgctcaaataaccaaataattaagtatgtttccatgcttttttttttaattaagtggaaaagagagagattgatgttttgatatttttacgcttttcttctatacacctttttcatattatgtggatcttctttaacagagttcgaggctagaatgccagtaaatatttttttttcatattctaaatggatattcttttatgatttaagagccactgtaaatgtgatatctccaaattaagcttaatgaaattaatgacgattgctacaactaatgaagaagaagaagattagaattgcaaggatacgtaattattagattagggtaagagtcttttgttttttcatattaatttgatttaaattcgtttaattttaattttttcagaaataagaattagaaaagtgatattctaggtttattttcctcacatagtggtaaactagccattgcttctttttgacactatctccggtgatttttcgagcgttaatatctctgatcactgtctctcttccaaatcctcatttgttttcgtcgtcaccttcatttctttataaaagaagaaaggatagagaggaattttgatgatattgtagaacaactagtgataataagtactcgcttttgaaaatggatttagagctaaatgggttggggagattaaaattggacaaccaatgatgggcgttttcaaagcacattaaaaaagcatgcattagctaagattatgtaccattaaagaaatttaatattttgaagattagaaaaaattcaagtgtaattttttttcatagttacattatgaaaatatcaaacatcaataaattaattatagatttttgcatatatggatatatattagagacaatagatgtatattatagacaaatcttgttttatagtaaataaccaatcgtaaaataacgcgtgactaaataagttagccagtgtaaaaattgatacaaatcgataaattaataagataataattattttgaaaattctatgtaaatatatggtcccatcaatattataaattaataattgtataaatttatgaatatatatatatttatatttatgaatatatattatgtaaaaattagtaaatgtgattttagtattgtttttcttcaatttatattaattctttgtaaaatttaattctaataattttactacgtataaaaaaggatttattttttttaaacctaataatggttttctacttgtaattgatttttagaaaaattattgattgtagagaggaactaccttttggatcaaagttttgtaaaaaattacaaattttttaaaatctctccataaattaataattatcaatttatcgataaattaatacctctttaaattaataaattttcttggtcccgacattattaatttatagaggatttatagaggttttactatatttttgtaagccatgcgattatgaaagtcaatagaaggaaaaaaaaagatttgtgaaaccaaaacaagtatgcacatcaagttttcttcatgacaagttgactttatattttgtagtttgtttaaggtatatatatatatatatatacaccacaaaaaataagatggaagacgtcggtttattaatgtcacttgttaaaccgactttaagaattttaataggaagggatttcacgtcatttaataaaacgacttaattttaattagaatggcgtcacttaataacccttgtaactatagcctgttttaatcaccaaatgtcaattaaggtacgttctaaatttctaatgccgccgcagcttccgttgtattgtccgtcgtactccgtcagtgtattccgagctgttcttctgatgaaaagccatcgcaactttttgtcatattcttctgcttcatcctctaaagaatcgctggttctctcaacatcgtatatggctcttcctcgatctctcgcatttttccctttttcaatgattcttcttcgtctccggtgagtgttctattatttggtcttcgatttagggatttgatttagttcttaaatgaaattggaatcaatttggcgatgattcagtagaaagattttggaactgtgttttcgtgcatagaaatggtgctagtagtcgcatttgagttcaatttctggatttcaaaaattcttcttgacgttaccgtgttctgcattctgattcttggtttagttgagaacctgaggtagaagatgtgatgagctgcatagagatgcaataaagatgctgattattgctttggatgctaaagcgaattcacgttgcaaagaaatgcataagcattgttttagacttgaaacataaggtgttgattttcggtggagaggcttatttcatgacttattcttatttgaaaatgatgtggagaagaatcgatttccttcaagttgttcttgaaaagggttaaaaccttttttcattgaaagcaagaacttattggttattcgatctattgagtggttcattgtcttccctttctggtcttcaatatgatatgatctaatgtttttttttgcttcagaactcagaaaaatgatgttaatagaattctgttatgagttagaaatttagacaagaagatcatgaacacatacttgtagatgttggagcatagagaagtaagatcatttacacgttggtgagttttctatacagaatctgttttggatctcatgctttttgtatcttgtttcaaacctgaaatggtggttggttggtatcattcacatcctggttttggcttttggcgctctggggttgacattaatactcaacatgtagatttttctttcctcagtttacatactgtagtaatggctcaaaacactaaataaaatgttagtcattgtgttctataccctgttgtgattcactttgcattgtagaggttgtaatcgatagtttggaactttgaatgggactatatgaatgtatgttcattgtaaacttctttgtacttttgtagagttttgaacctttgaaccagcgagctgtagctcagttaaaagaaaatgagtagaggacttgaagaagataaaatgatgcggaaggagaagctagcaagaatgtcgtgacagagtggtggatttaatggatttttatgtaatgtttaaaacttatatcttatgttttatgttggtatccagataattgacaattgttatgtgtgctatttatttcaataaattaatttttaataaatttattgttttcttaccgtttttcctaattataatttaatttaatgcaaaattagtattaatgtgatacttttgaatcattttgtaaaccgtcgttaaaatatataaaaagtgacgctagtatatttaaagtgaagcaaaataagttaacgtcggccactaatatgtcaattttgtaaatgactttaagttaattaatgtcggttaataagtgacgttaaggtaaaaataaactgacgttaatagtcttctttttttaagtgatactagattttgacccgtggtataccgcggggttagtttttaataaaattagttatataaaatgtatatatagatatttgttttattaatattgtttgctttgtttagtgtttaggataatgtatatatagattttaattgttatatctatgatttcatccgtactatatcggttcgtattactatcgatccaaatccatcatactatctaatcctgcacagtaaaattaaacatatctaatggatttcacttgtggtataccgtctcgtaatactatcgaccaaacccgtcctaccactaactccgttcagtaaaattagatattattttgttatttttgttttaataatactttaatttaaaaaatatttaattcaaatcaatttaaaagttttctttcaaatggttatttaattgttgtaaagtttatatattataatattataaacacgtcctaccatctagtcctactatctaatcatgttcgatgaaattaattttttatttttttaataatatttttattaaaagatttataatttaaatcaatttaaagttttctttcaaaatgattatttaatttttaaatatttttaactattttggcaaaaataattaggacatagaataagagcatattcctttgaataagatttgctttgattttgtagttaatttttgcattgaataaaccagtggcagccattgtaaataagttctaactccaagatttatttcacaaaatggctgcaaaaatgtatatgtagatatatatatatatgtatattcattttatgttttcaatataaatattgttttagaacattgtttataaatatagatctgaaaaagtatgttcaaatgtagatttttagtcaaattatgaaaatatcaataagtaataaattaaattttgcatttttgtatatggatatatattagatacaaatcttacttttttataaaaaataaccaaatacaaaagatgcgtggctcaatcagtcataaaaaaaacaattactatatgattgatacattatacatatatgacaactgatacacaccttataaatgctctatttatgtttgactataatatacaatctaccataacacaatctagtaaattgttagtatcatcctcgtgtcaccacctcaatttaaattcacatactacatggtatctcatatttatttattttggttatgtttctaatataaatagtgttcttaagaacactgtctacacattcatatctgtaaaccaaaaaaatacgcacaaaggtaaatttcaattttttttcttcatcatatgatgattttatatttttttcaaaatatattcaattttatgatgtcaatataaatagtgttttaaaacactgtttatacatatataaatctgaataaaaggtgcgcacaaaggtaaaatttcaatttttcttcatcacaagatgattttataacttttctcaatatatattcattttgtacacaaagatctgaaaaaaaacaggtaatgcacaaaggtaaaaatttcaatttttcttatcaatagttgattttataattgtttcttaatgaaatttgggtaatttcaaatataatcacatgtatccgttaccacaaaccctaaaagaaacccaaaagcatctaacggtgaaaacactgaaaagccacgtgtacgtttcagatcacgcacagcaataaaaaaatatgaaaaaataaaaacggaagtgcctattggcttacaagttacaagtatcaagtcgtctttttattcaagtttcgcggcaacgcctctcttctcttctctctctctctcttctctctaattcaatccaaaatcctcttttatctctctctcgctctcgctctctctttaaacctctcttcgaatatttgtcaccgatctcgaacaaggtttttgagctttctcttctccgagtcggtttctgtgttgtttcttcgtcgattcttattgagctccgtgattggtgagtagatctgttgatttgatttagggttttttaaaggttttaaacagaagtaattgggattgtttttgaacttcactttatcggattcttctggggaaatttgggatttgtggattccggttcggcgatgcgatttttgatttcgaagttctttcaaaaaggaaaaattctttgaaatttgaattctaacttttgaatttatgtttgggtttcgttgaaacgagtattggtatttgaatctggggttttttttttttttttttgaattctcaaagttgatgattctcgattcgtgattctttgttttctttattgattgatgcttcgaatttttcagagatttgttagtaaagtttataaatttcttttctggtgaaaaattgaatctgagatttttgtgaaagagagcaatttaatgtcgtatcttggtcagatcagttttcatggtttccttaatttgatctttcgttggaatttttctaggcagagaaaacagttatatggcgcctactaggaagtcgaagagtgtgaacaagcgtttcaccaatgaagcgtctccagatatcaattttgggagcgcaagcaaaaccaagcaaagagtgagttttgtttgtcttcattgaccaaatcttatttgggataatcactttgttgtttgtcttattgaccaaatcttcacttggactcttcttgatgctctttggtgtttttctcattgtagaagaagaaattggctgataagctgggacctcagtggaccaaaagggagcttgtgcgtttctatgatgcttataggaagtatgtgggagactggaaaaaggtaaactttgttgcactatatggttttatgtatgtgtttcctcaatctttgtatgacttttaagttcttctctggaaattgcttaggtagctgctgcagtacggaataaccggtctgttgagatggtcgaaacactcttttgtatgaatcgggtatgaagtacaagaatatctcactgttcagttttgttttagtattgagccggatattatttgcctaggtttcgttctaaacttagtattgagatggacattatgttacctttgattcgttttgatatgcctttttcttccaggcatacttatccttgcccgagggaactgcttctgtagctggccttattgcaatgatgactgatcactacagcgtcatggtgagttgtttatcttattagaacacctttaaagttcatgctagatgacttcctgtgtgaaaactcaggtggaaagctgaagagtttagtaatgtcgatcacattagtgaaattttagttttatacttttttctgaaaacaagggagagatgtggttaattggtttgttcagatcgtctgtttagtaaagttgtgtggttcagtttctatatgcttatagtaatttttgtaggaggggagcgaaagtgaaggagaagaccatgatgcttctgaggtaacgaggaaacatctgaagcgcaaacgtcctcaagttctgcctagtgattttcgagaagaagttgttccaccacattcagttgcatcagtagaaggatgtctctcattcttgaagcagacacaagcttatggtacaatcattattttctgctaaaaacaaatgattattctgcggttttatacgttttttagttcacaccctttatagggtaaccatgtctcacgaaattctgtgtcagcctaacaaattcatgtaaataaatctgttcaagatcgtgtaatgtgctacttttttttatgtagaaaaaaggcaacgggccactggaaaacgtacacctcggtttcttgtcgcaattacacatgagagggatgatatagaagattttagtccaccaaataaaagagccaagaaacaacttgatgccgatgatgatgcatcaagaaggggaggagggtctccatacagaagaaaagaactcagtgaaatcacaccaactaggcttaggaaaacggtatttatatagctctagcaatttaatgttgtcatgattgatcagtgaaaaaaacaatttctaccctttttctcttttgccagtcacaagcacaggaagcacaattcaagcaccctgatagttccatgtttgagaatggggtgagagatagatggcataaaaagggagctgctgatagagatggtgccttgttgatggatatggaaggacttgttacccaaaaggaaaaaattgtgagagttgaagaagcagaaggaaattattctgatgatgatgatggattaggagctctgaagacattggctgaaatgtcagcttcactggctccggctggtttgttggaatcaggttagcatcaaatggttgtgccactaaagatatatattgtgcgggttaatagaagacccattaattaatatctgttcacctttcacatcgaggtacatctctttatattttctcctttattgtgttggatacagaatcatctccacactgggaagaagaaagaaaaactaacaacgtggataagaaatctaacactctggaaaccgtgtcaacaagccatcacagagaaaaagcaaaacaagcaggactagaagataatctcctgcatgcaatttcagcccctgataaaagaaaaccgaagtctgtgccggaatccgttgatggtaatgttgtttccatcgaggagcttcgcacttcaagcagaaaacgtaaaccaaaggtttggtttacaagacagtttttctctttaagttctttgttatcgtgtcattcttctgtgtatcacatagctatatgcaaattacattcagtttcaggtgctagatgttgtagctccaaaagagtctacacaggacaaatctctatatactaaggtattcttttaaacctatagatatgcaaaacccgcttctctcctatttaatcgtactctgtgatctgcggttactccttgtaattttagaatccttgacaaattcttttgatcaaagaagcttatgctttagtagtttttgtttgtgctttctctaatgatttttgtttattgcattgcaggaatcggctgaagttgatagtttgaagactcccgtcaaagcaagacgttctagtcaaggtccagcaaaacagctgaaaactgcaaagaccacggtagaatcttcttcagctagtgataagaaaataactggaccggatgcagtagtgccagctacacaagtttcagcttcgggtccagagactttgccacagaaaccaccaaacaggcgtaagataagtttgaagaaaagtttacaagaaagagctaaatctttagaaaccactcatgacaaaccacgtagtttcaaaaaactttcagaacatgaattactacaggtgagtctctaacttcatttttcttatacaaatcaaataaatctggtctcttatttgcttattccatttacaggagaagttgtcaaattgtctgtcatatccattggtacgtcgatggtgcatatatgaatggttctacagtgctattgactatccctggtttgcaaagatggagttcactgattatctaaatcatgtggggcttggtcacgctccaagacttactcgtgttgaatggagtgtcattaaaaggtttgttaaagtttctgtgtatgtatgtcgatggaattataaagatacaaaaggttactcattctgtaattttttcagttctctcggtagacctcggagattgtctcagagattcctacaggatgagcgggataaactccaagaatatcgtgagtctgtgagaaagcattatacagagctgcgtggatgtgctacgggagtgcttcatacagatttggcccgtcctttatcagtcgggaatagagtgattgccatccatcctaaaacacgggagattcgtgatggcaagattcttactgtggatcataacaagtgcaacgttctctttgatgaattgggtgtcgagttagttatggtaaatcacaaactatatcaattccgttgatagtttgtccattttttgtatatctcagatgatctaataaatccttttttctgacaggacattgactgcatgcctttaaatccattggaatacatgccagagggtctaaggaggcaaattgataagtgcttggctatatgcaaagaagcaaggcttaacagacacccaagctctgatgcatctgttctgttctctccttctgtgcttgaaaatgtcaacttttccatgaatcctcctcctgcgaaacaggtaaacaaagattgacgtttgactcgtgtgtcaaagctttgatcttcgtctttctttccatacattttttaatctctgtggataattccataattctctgcaggatgatatcagagagccagttttgtatggtaaagtaatagcaaccaacactactgatcaatctatcgtaatcaatagcaaagtaacaggaacagaaattcaacggactctggcactgcagcatacttccgatgcgcaggtaactaaaaagtctatgcctgtggaaactttgtctttagattgctcatgttcgaataagtatagacttattttgtgtactctttttgctaatagtaacagctacagaaattcttttctcatgattctgctttccaggaaatggagccagaaatgattgaaattgtcattgaatcaaagtcaatagcgcaagcaatggtggatgcagctataaaggtatttataatatatctagagacttcagagtcttctaaatacagagaagccaaattcatacaactctaacatcttttgtttaaatcgttgtcaaccgttttaggctgcatcgtcggggaagaacaatgaagactcagagaatatggttcaccaagctttaagctccattggcgaacatcagccattagacaactctatagtgcctggtatcaagcatcaagagtataccaatggcagcttggatcatcattccttaaacacagcagagccgatgagtaacggtttcatctcacaggaaggatcaggaaaaaacaaaacaccaatgccttcagagcttatcacctcttgtgttgcatcttggctcatgatgcaggtaaaggaaataattttgtcttggactaacgaaagtgtaatctaaatcaagaataccaaagttttcacttgatgcggttttgattagaactctttgtgtgttatttacctgcagatgatctcaaagaagcagtacccaccagcagatgtggctcagctaatggatacagtagtgaatgacttgcagccacggtgtccacagaatatgccgatatacagagaaattcaaacttgtatgggattgatcaagactcaaataatggctcttgtaagaacgtcatgaaacatttgtgtcctttgtaattaacctgacatcgaagataacacttggagatcagatttaattgtttggattgtagaggttagtttagtttatagttagttaataatttgaacagctccaaaggctgttgataattagttaccattgattctgtaacttttttttgtcatcattcattgtaactttggttaccttttactttggagctgttttttttttctttctttctcagtgattattttcttgggtcattttggatcctaatggctgaaataatttattcccaccttaatacaaaatctcaaatatatactattccttaactaaaattctagaacaatgccaaatggatatgtttgaaatacctttaataacaactaggatttaacctgtggtgtaccacggacaaatgttttattcatatataataatattaaattttacggtttttaatttagtatttaagttttataattttatattaatgttataactaaaacaaatggtgatgataaaataataaaataaatatttaacatgtgctatatcaatccaaactcgtcccactatatttcatatcaatccaaacccgtcccgctatatttctcatctcatgatatttttttataagtttaaataataataatgttttataaagttaaaatatatctataatatttaaaaataataattattttttacttaagttggaaagatttttggaaacgtttgttgagcgcaatataaagtatttaaattttcaaatctgaataattaataccaattatatatcttgaaagatctttggcaactattgttgaatataatatcttgtatttaattatcgacaggaaatatttaatgtcaatggcatgacattgtaaatacaagtacaaaatttatttgctaaaatggctgcaaaaatgtatatgtagatttacttctaattttaatgtttcaaaggacaaaactaggcatgaccataaaatccgaagcccgaaaaacctagttcgctttggttcgagtggatctaaagtgtttattttggggttttggtttggttcgtgtaggatctgaaacctgaacagatacctgaaatatcgaaactcaaacggatacatgtaactcgaaataatacgtatacataatttgtcggtaaattcaggttcaatatcaggtttcaattaaatttgagaaccagcccgaacccgaatagacctcaaccgatattttcagttcctaaatgtattttcaatctctttaccaaagtaacccaaaaacccaatctaaacagacccgaaaatccgaatgtccagacctaactaaaatcgtgagtcaaactcaaaaaatgattgattaacactatattatacttttacttagattctataaattggacacatgtatgggtgttattaagggttggaaacataaatttaagccatgaccttatttttggttggaaaattcttgttcttttttttgttagtaaagggctgttaataagggttttaatgggttagcgaacgacaccgtttataataaatatgtttgctaaacgacatcgtttgaccttagggtttattgtttaacatgaaagaacgtcgtttcaccaacgtttcttcttcctcgcaagtctcaaagccaggaacgatctcgccgtatgagcaacttccgacattaacactgtattgctctgccgtactctcctctttttcccttcatactcgtcttcacatctgaattccgacaagatattgcgtctgctctcctctcttccctcattctcgtcttctcattaccaaaaacatcttcttctcgtagctaactcaatccaattccaatctccattcaaatcgagcaccagataattttttctcctaaattctaatataagccctaaaattcaaaattgaaatatctatagaatctccttccgattcagacggataatcgccatcaacagcgtgtgaattcgatcaaaaatctgaactttccacaaagaaattcgaaagctcagatttttcgatttcgaaaattttgaaaactcagttaatggcggattttcagacatcaacacaacgggccaagtggattttcactccccagaaactggtaatccccttctccttctgatcactacaatgcggctttataattatattttgttcatctttggattttctttgctttgattgcttcatagagagtcggattaatcgagcatttggaactctttgttacttagttatgtgtgttgttgttgttattatcttacttgttgtgtagagatattggtattgcaactaagctgtaatgttgtaattgtaggcagagagatataaagctgctaaccagagggcagtgcaaatgctggagaaggtttgttagaataattgttgatatggagctttagtcctgtattcatgtttagattttaacttattgttattcatagtgtggaacaactcaagttgaagtagatgctagtggatcactaacatatcctaaagataaagttggttcaggagatcaaggtaaaaattttggttccttcaatatctacttcatacgtatcatagttttgtttgtcgaagtttaaataatgttactttttgctttgttactctcagctgataagaagcttaagcctttgagtgctgatgaagaaaggttcatgagagcattttatgaggcaaaggtccaagaagtgtgcagtgcctttgcatttcctcacaagattcaggtgcatttctactcgtcgagatagaagtttatgatgaagttaaaaataaaatacctgatttttgtttgctctctgaatttatgtttcttccttctaatattttgcaggcaacagccctccaatactttaagagattttatctgcaatggtctgttatgcaacatcatccaaaagagataatgtatagttcttttaaatcctcaaaatggtcaaaagctttgcttttttcaagagaatagttttgaaattgtttaccaaatggagctaagcattttgtatttctgagctctgagaggctttttaagtcagtcataaatggtccattgttgtaatttggactaattgttacctttcattgaacaggttaacctgtgtgtatgcagcttgtaaaatagaggagaatcatgtatctgctgaggaaattgggaaagggattaaccaagatcaccgaataattctcaagtacgagatggctgttcttcaggtatgatatgagtcaattaatttgtaccaacttccctatgtttatttttccctggtgttcttttctctctctattcttttgttcatattatattaactctatgtgcagagtttggaatttgatctgattgtttatgcaccgtatcgtgcaatcgaaggttttgtcaacaacatggaggtaaatcagtcctgtctaaatttcttagtaggttttcttatttcaactggcttttctctgtttacatcttatagtgatgagactctttttcagtttattggcaattgttttgttgcaaacaaaattctgaatgttaacttaacgccaagaacttggtgaaccataataggatataccaagattttcaatacttttttcggtgtgttatttttcatccttgttgaacttcacgctatcttcaaaagtaacctcatcttttcatcctataggaatttcttcaagctagagatgatgaaatccaaaaactagaggtagatctatcttcagatatttcctttatcttcactagattttaagcatgtggtaactgaatgtgggatcaaaatgtaaattttagtgtaagtttgtgatcatagctgtaagtctatttacttaacaggctttattgaaatattattttctcatactggcataacttttcaagtattctgcagagtttgctcaaaggggcgacagcagaagccgataaagttatgctcacagatgctccactcctctttcctcctggccaggtgggcatgctagtttattttgtctccctagcctcttattatcagattaaagatactgaataatatccatcaaagaatctggttaaactcattgtttgggatatttcagtaaagctttaaatatgctactcaagacataaatttaggatgaaagttggtgctttgttttctctttgactgatatttaagtgaaattaatgaatgtttatgatatagtagtatagcttatcgatatatactcaccttgttccttctttcaggatttttcgtttttctttagcgtatatgtaacaaaagaagtatcacaaattgttgtactgtctctcaactcttgaacgtgtgcccttgtagttggcattggcgtcgttacgtattgcaaatggggttcttggagtgattgactttgataggttatttctcttattctatatccatcccgattatttacccttttaatctttccatgatattaatctcgtggtcttgaatttctgtatatgcaaagctttttactggttgtattttcaactaaactgcatttggtgcaggtacctagagaacattgtttctcaaccgaactctgagcacacgacttcagagcttacaaagttacttgataacatcgaatatttggtatttactaacttccataattatcttaacaatgaaacttgcatatctaaaaggaagttttactagatgctctctcttatctcaggtaaagaactacaagtgcccaagtgaaaaggacatgaagcatatcaaccggaagctaaaatcttgtctaggacatagttcttcacatgacgagtacactaacaacctctcttctactaattcttttaaccactatatatatttcataagctttgcttctgcaattgactcccttctctatttatcttcatcaggagtaagaaacgggagaagagatcaaaacacaagtcccataggagctccaatgatacaccaaacggggcaccgccacccataggttgagtttctcgtactgccattagcaattcttcctttgcactttggtttagttttaatcttattgaatgagaaattcgtcttttatagtttcttccccgttgttgttcttactagtaaatttgagcagattatgtataacaatgatattggccataagttttgtttattctgaagatgttaatgaatttataacaaaacttccatttattttaagttttggtgtacataacaatcgtcaaaaatggtttgtttgcgataatgatcaactttttacatgatcaaaagtttttccagacattttgatactttctagttactaccacatctgttcttacacagaaacaaatggatatgactagtgtagcggtaactatcaaatcctaataataacaatgaaaatttgtattaaataaccaaaaaccatcgaaaataaaatttggattgtgaatgaaacttgtaaagatgcttgattggttgtgctaaatgtcttttacagccataatatatttgttaaagactaaattgttgccaattatgttatagtttttttctttaacttagagccccaaaaaaaatctttttgttttgactgtaaatctttaattttctacatcctattttgtgttgtagatttttttttttttgtagatttttttttttttttctctcctctaactttttgtcacgattattttcaactaataatctaaaatgtagttatatgaataacagataaagtattttatacatttagacaaataatttataaatttatatagattccatttacctagatgtgcagaattctttttgtgtttttattataaaattgttattaaataatttatatatattccatctacctagatgtgcataattcaatttgtgtttttattttataattgctattaaataattttagtaattatgatatacaattttctcattttgaaaaaaggtaatttataaatataaaattcaaatatttcttaatcataatttttagttacaactaaaatatttattgccaaaatcctatatttttcaaatctacaaaaccaagaggttaccgtcaaaattctacagttagagcttatacacttattgccaatattatacataaaatattttaccttatgcaaatgcctatgcttttatgggtcatagacggacctggctactgtgtaactaatcacccacataatttatcagtcaaacataacaaattctttttgtgccaaaaagtcaaaaacgttagaaactggattttggaagttgatgcatgcaaatagcaacttgtcgtgccgcgctatataaacgctgcatcaagttttcgtaattaactaaaaccaaattagtattaatccgaaaacttgaaactgtggcttcctcctcaaatctccgatcaacggaaacaaaatggctcacatggtgagagcgagctctggcctttcttacccggagagattctacgccgccgcatcgtacgtcggcctcgacggatctcaatcgtcggtcaaacaactcagctccaaattctccaacgatacctctttgcttctctacacgttgcaccagcaggttcgtcaattcgatttcaattgaattccatagggatctgttgatttctcttctttcgcaatttgctacagtagatgttggtacgatctcgctccgtacattagacaatggaactgtgcttatacttgggatcattgctatgcgaaaactggtttattttgtcactgagagagaatttattcaatcatctttgtgataaagatgtttactaattttgaaatcttctgccttgacatgttaacaggctactctaggaccttgtagtattccaaaaccgagtgcgtggaatccagtagagcaaagcaaatggaaaaggttggtttcacttttgtgtctgtcaatactattctacatttggagaggcttttaagtatcatcatcaaatgtgtaagtagcttttttgagtacaagtatcaagatgtctcatgaattagggctacagcaacaagtatcgtagattttagacttgtatttccatcctaggggaatacatgaaataggagctaccttggttttagcatgcaagaaaattactggtaacatgtcagggaatgtcatcttagagaatgccattatggaaagacagatcgagatcgcagacctcataatggcattctctaagatgactttccctgagcaaagtcatctgtgtaagcttcctaagaaaagtacatgtttactagttggcaggggcttggaaccatgccctccattgaggcaatgcgtctatttgtgaaaatcttggaggtaatatcaacagaggagtttattctcatttctcttcatttgttaatcataggctaatttcttcctatattgctcacttttcaaaaggaagcagatcctggttggtatccaaggacatctaactctgttcttgaccctgctgtacatgtccaaatcaatgtgagtttttcatcgcctatacgtatgatcaaatttcagtttttgtatgtaagtattgctactaattaatataacaatgcctcatccgagaagtatcttacttttttacctgttgcagagcacaaaggctgagcctagttttgagagtggagcttcatttggtgagacaaagacgattacttctgaggatgggcgcttgacagaaacgcaagataaagatgtagttttggaagacccagatactgtttctgtgtataatcagtggactgcaccacgaacatcaggtcagccaccaaaagcccgatatcaggtaatatttaatttgactctcttgtggaacatgaaaggaaacgatctcttcgtgtatcttctctcttttctcattcttgtttactatatccgtttcagcatggagcagcggttattcaagataagatgtatatgtatggtggaaaccacaacggccgttatctaggtgatcttcatgtaagcaacttatagcattatttgacagcagtaacttgtctaatcgaaataataggtttcacttttgcctaccttcaagaaccttctcccatttatttttttctgtgacacttctgctgacaattcagaagcatgtcttctgtaaatggtgtttcaaatacaggttctggatttaaaaaactggacttggtcaagagttgaaaccaaggttgtgactggatcacaggaaacatcatctccagcaaaactaactcactgtgctggtcattctttggttagtattttaacttgcatatgttttgggtttttcgttttctagccttgaaacatcaggggcaggtttcggttcagtaatctcctcttgaaatcacatactggccttctttgtttgttatgtagataccatgggataaccagcttttgtctatcggtggtcatacaaaagatccttcagaatccatgccaggtaggagttgaaacacttctgaaatgattaattgcgggtaagttgttatttctggagcataccaattcttgtatatcagttttttcttctgttttctcattacagtgatggtctttgatctacattgctgttcatggtcaatcttaaagacatacgggaagccaccggtaaatcatctttctcccagtttttctatgtgaaaagtattccaatctagtaaacaagtaaaaatttgaatatatggaaggaagaaaaattaaaagttgctctctctttcgttcttcataattttttcaggtattaagttgcattctgaacccaatttatcgatctcctctctgatattggaaatcgaacctgttattaagctgagaatatttttatcactctctctttctctcttgctagcagatttcgcgtggaggtcagtcagtgacccttgtgggaaaaagcttggtgatatttggtggccaggatgcaaagagatcgcttctgaacgatttgcatatacttgatttagataccatgacctgggaggaaattgatgccgtgtaagatcttatgacattttttgcattttattctcgtttttgaacaagtcaggtcctttaaagactagaatgtaaatgagaaaatgaatgaaattatataaagctgccaataatctattttcatatctcagtttttaatgaaagatcagaagttcaaggttaatgtgctgtcaacttgcaggggttctcctccaactccaaggtctgatcatgctgctgcagtgcacgctgagcgttaccttctaatctttggtggaggatcacatgcaacttgttttgatgatctgcacgtccttgatctgcaaactgtatgtcaagcttctattgtttcagcaacgctctttgtctgcttcttgacatatatgtttccatgttatagatggaatggtcaagacatacacaacaaggtgacgcaccaactccacgtgctggacacgctggtgtgacgattggggaaaattggtatattgttggtggtggagataacaaaagcggtatgtttctccttcaaaagcctctttctcttccctgcattttgattcctgcatgtgttgctctttatgttacatcactggaacttttcctgggggaaaaacttgatagttgcttcgtttttttgtttgtacagtgtgattaattgtgatacttgctggtactttaccgcaggggcatctaagactgttgtattaaatatgtcaactcttgcatggtcagttgtcacttcagtccaagaacatgtacctctcgctagtgaggtatttaaaacacatccccaacttattttttgcataaaagtctccaactcatattgcctgacacatgaaacttgaattttccaagacattgaataaatcagtcttgtgatttcctctgcaacttttcgtttgatgacagggattgagtttagttgtgagctcatacaatggagaagacatagtggttgcttttggtggatacaacggacattacaacaatgaagtacagctaaatacattttttcctgatttggtttaaaacttggttattgattctgttgtggctaatcaggtgaatgttcttaaaccaagccacaaatcaagcttgaaatccaagattatgggagcttctgctgtgccagatagtttttccgctgttaataacgccacgactagagatattgagtctgagatcaaggtgagccaagaaggcaaagtaagggaaattgtcatggataatgttaactccagattaaaggtgtcttcccgtcagtttaaacgctgtgaatatcaaattagactagataatcacaatgcatctcttatttttctcctttgtattctggatattaaatcctcaggttgaaggaaaagccgaccgcattatcacaacccttaaatccgaaaaagaagaagtggaggcatcactcaacaaggaaaagatacaaactctccaactaaaggaagagttagcagagatagacacacgaaatacagagttatacaaggtaaccgtactatttaccttcatgaatctgtcttgcctttgatctcgcttttaccagaacgaatagccaacagaacacaatcatgtagttggttttctgaaaattggttcttgttcagtcttgaaatttagtattttggaaaaattcaataaaccgtggaaatgactaataagcaagacaaatgagttgagaatttcttggagattcttttgttgtatcaacatttttggtattccatctataggaacttcaatctgtgcggaaccaacttgcagcggaacaatcaaggtgtttcaaactagaggtaggtatttacaccttttactaagaaagtcattttgtttcacttttatagtaagtctgggttgatatttgaatctcgatggtgaaacattcctctccgatgttgaccaaatcctaacaaaactcggtctaagtgcccgcaggttgaagttgcagagctaagacaaaagcttcagacaatggaaacacttcaaaaggaactcgaactcctccaacgtcaaagagccgttgcgtctgaacaagccgccaccatgaacgccaaacgacaaagctctggtggcgtctggggttggctcgctggaactcctccgcctaaaacatgagtgcccatgaaactttttttcgggtaactcttttttgtcattaccaatatcagtatttacttttagaaagaaagaaaaagagagaaatacagtatagacaatttttagcgtctccgcattgttactagtgaaaataaggtctatagttgtttctactacagtatgattgatgagttgccatttgaagattcagtttctatataagctctaccgatttgtgtgtaattatgttacactacaagctatattgtattggtaatttttctaccatttagtaccattacatgtgataagcaccatacttcatcaactaacaacgaaattttcaatcatgaaggaaccaaaaattatcttccaagtatagcgaacacgatttaaaattgtctaagggatccaaagagatggcaacaaaagagaccgagtatcttacgactcttgaacgatttcctcagtgacatcgataagatcctcaaactcaacttctttggcttcatattcatcttcttccacatcacttacttcaccatcccgaaggttttgcctcacgagtttctcctcttcatgcagagacttccactgcattacccatttctcccattcttccttcaatgcctttctcttctctctgtcttgttcactcaacagcaacgacacgtcctgatcctctgcctcatacttcttgctgtacttcttcagggtctttgctatctcttcttccttctctgcagtcaagaatgatggaggtcttggacgccaagccaactgtgtaaccaaccatacacaaatattttattagacatcggaatggacgatgctcgtttaagaccgagtttttcttgttacatacctggaagaaatgatccttcaatatccggtaaagcataatcccgttgaaagaccatatggtgaacccattctccatctcatggactgatgtcactgcggttgcaacgtacctttgaaaataaaaaagtgcaaacaacatcagcaattggaacaaatagaaacaaccaaaggactggtttagttaagacagtaggaccttccagtcgggtcccattcgatatccgtggccatgaagtgttcagctgtggccattgtctcgagctcatccacgttgaaaaattcaagctggccattgaaaccttttaacccagcaagaattatgtacttgcctgtgggcgaccagaagagggcattagcttgtttggccttcaaagttgcgagctttgaaacccttccagtgttttgtgcggtcttcattgagtagaaactgacatctggtcttggttggtcaccatgaatcacagcaaacctgtgacccttgggctcccatgcaaaagcaatgatcttgtcgttcttgttgtccagctcaagaacctcgatgggaatatccctttctttgatacggaaaagttcaaatccagagtatgtgctcttcttagtttttgtgtatcgatcaaccttgacagcaagatactctccactactctgccagtacatcttgcagtcgctcacactgaagagattcttctgcctcagctccaccttgctcgggatttggactagggcaacctgaagaagggatatcaacatgtaatttcaaaacaccaggcagagaaacagaagcaaattaaggattcagagcttttcatgtacatcagaaataatagaaacataccttcgcaggttggtttccaccaccttgttcaggaacaaacaatgaaaggatggaatcagtaggagaccagcagatatccacaacattatctaccttcatggatttcttgtctattaggctgaaagtctcagtctcatagacagagatagtgtttttgctaagcttggcaaagtatttatcatcttttccaccagcccatctgtagaaaaagtttacaagatatcaacatatgtccataatagtggagaagatgataatattggctgtttatttttaggacattgacatgcagttgaaagaattacctgaaaacaggccaagaggcaccagcaacaccaccaggtcctccaattgaaaactcatcagcactacccttgaaatctctcatcatcctcccggttctcacatcaaaaaccttaatctcaactttctgaaagtttgacagaattcagcgtcacaaatagtaaaagttgaaaagaacagaagaaaagatgcactcacacttgcatctcgcgggttgcttggttcttggctatggtaagttacaagatatttctcacctggcgagaaatcaactagttttacctaaaacataatcaacaaaagatgcaattttcaggccaacagaggaaaaacggaagtaatatgtagcaattgaaaggaaattcaaaccatagaatgctgataacgcatgagacgcgtgaatgtatcagcaccaccccaaacagctgccccctgcttgtggagtgtcacaaggtatgtacctaaaggagaccactgcacataactctctgtccaatactgcataggaagagaacatcattaattcaaatgaaggtaacataacatataaaagtgctctaaacagtcaagtaaacaaataagggatattaattcaaatgaaggtaacataacatatacattgctctaaacagtcaagtaaacaaaagggatatacacacaggaagtaacttacaggacgcttatgaacaggttcaggcgccttctgcctagtatcattccagaaaacttcagtatcagggccagaacgaatgactagctggtctcgggctttttcatcagtaagccatttttgcaaattttcctgaaaaaacaaacaccatataagtaacgacaattagcaccacaaaaggctgcaatgaattaaaatatatacatgaaacaagagttatgaaattatagttattagttagtatacatcaattacgtaaaaagatcctaaccctaacgcagcaggcaaacacaaaataaatcagcgaattaccaaaataaagaagtgattacacagacacaatggaagttattcaaagaaaattattcaaggtacagggagtaacatgatgaaaactacacataccccagggacgtagggcctggcctgaggaggctcccactcctccttcacattcatcaacctgtcaaaatcatcgaacatgtttacagcaaagatgtgagacttgtccaacttgtagccatgagacttttccttagcgttttgtgcttcctgcaaagagccccagacattgagagaaactcttaggaaatactcaaccattaagaacaacctagtttgggctcctttctaacaagagaaataaagtattgaaacatatgacgccgacattattgcttcagaatccaacaaaacagagattaagctaatcaagtagataaataacctgaggagtgttgaactcaataaaacagtagcccaatgtcatcttggtatcgggatcaacaggcatccacagtccattttccttaatcacacctaactggttgtaaattttcttgacaacaccttcaagtttctcaaacttctccttgggaacaacagggaggtgatcgaccacgataatgttaccgaatccagtgtcgaattcagactggtcatcctggtaaacagcttcatcatcactacaaccatcacagaaaaaaaaagtgtataacgaatcagttccatttttcatacgttcatagataaaatgtataaatataataagctttgcaccatcaaggaaagagataaaccaattcgaaatacacaaaattttcatacatacaatagcaaaacctagaataaaatcatcccatcgtataaacacaagaagattagaaatagaagtgaccgtatatgaacaaccagagatctaaaggaaaatctcacctctcgatcccaaagtcttctccaggaggaagttggatggaatcaaaattaacctgagaccaatcaatccctaacttagcagctcgggcatcaatatcaacgacctccatgatttcaaaccttatatcaaaaatctgccaaagaaagccatatagagagagctatcagtctttaacacattccaactttaagtcgataaataaatgtgaaaaatctgagtctttagatctaaaagtaggttttttgttaaccctaaacaagtattaaaacaacaaactaccatggccaaatgttcaaagactaaaactttgaatcatcactcccactataatgtaaatctaaaaccatgcctatagaaattattaactatactctagttttatttaatctagaacccaacaacaggtgaaatggagaaaaatggcaaaattttcctgaaggctctcttatatctattgcatcgttctggatcctgtctcatagctacataagaaaagacaaaaaaaacaaatgaacactgaaatcgagataagaaacgtacccaatacagagatcagccgagagcaaaaaacaaagaagaagacggcgcttgaaggtgaggaagaaggagcgattgttttcaggtctttttggatcatacgacgtcggttccttaaacgggcttataaatatttatatgggccgggtaagcccaattcaatagtaatcagtagatctaatttattgtctttctctcgattagcttttttttttttttaacaataatccgtctctttcatttggtgtcctcgagaaccaaattcggataatctctcatcggaggatcgttgttgttgttgctagggttcttatcgatttgtaatgtacaaaactaaattaatcccggtgatgaacgaggatgctgtgattgttcaacaaacggattcgattcaggatcctaaggtaactccagatgatactgtagttgattcgagcggggatgttcacgaagccattgatgatgatgttgaagcttcttcacctatggagctagattcggcggttacaaatgacgctagggttctcgaaagtgagagatcggagaaagatggtgtcgtagggagtgaggaggaagatgagattaaaagcgaggatgttttaattgataaggatgatgagagttctgaggttaaagaagaagaagaagaagaagatggctctgatgatcaatctagtgagcttggttctgaagctgatgagaaggaattagatttgggtttgaaggaagagaaaaaaggagtttcggattataaatctcttttatctgagtttgatgattatgttgcaagtgagaaaatgggttctggagtttcgagggcattgagttatgggtttgaagttggagatttggtttggggaaaggtaaagtctcatccttggtggcctggtcatatattcaatgaagcttttgcgtctccttctgttcgtcgtatgaggaggattgatcatgttcttgttgcgtttttcggtgatagtagttatggttggtttgatcctgctgagcttattcctttcgaaccgaatttagaggagaaatcacagcagacggtttcgaagcattttgtgagagctgtggaggaagccaaggatgaggcgagtagaaggtcagctcttggtttgacttgtaaatgtcggaatccttataactttaggcctagtaatgtggaagattactttgctgttgatgtgcctgattacgagcttcaagccgtttactctgttgatcagattaagaattctagggataagtttttacccgctgaaaccatttcgtttgtgaagcaattggcgttagcacctcaagagtgtgatccagacagtttaaagtttatgaagaagaaagcagtggtttttgctttccgcaagtcagtgtttgaggagtttgatgaaacttatgcacaggcctttgggacaaaatcaccccgcagttcagtgagtacgctggaacctcataatagagcaccgcctcgaggtattagccacttttcagaaaatcatgttattgtttgtatatgggttttttcgttgtagacttgaaacagctttcatatgtgttacatagatattagatactgtaacttggttttagggttttacttttagatcctctgtgctcatgattttaggatttatatctttgtagttgaattctttacatagcatgcttgaaagaatagtgaagtctcattgatgctaaactgtgcattcgaaaacgtggcctgataacaattctgcgcctctttctactatggagagtcccgcatacatttaccttgtttgctttattgttcattttcttggtgggtgatgtgttgtttcaatttctcttatttccagctcccttgagtggcccactggtcatagcagaaacgctaggtgaccttaagagctctaaaaaacccacaaaggttaaggtctctaaaaaaaaagacaagtatcttctcaaacgaagggatgaagctggtgataagtctgttcagtttggcgaaattgaagcaagttcagaagcttctcatatccagggaattgatggatctttggatggggattttgggctgcagagaagagctccgacgcttcaaactccaatgaaagatgagaagtctgggatcgtcagcatggattttgcctcttcaaatacagctattcctggtaaagaattttcagcttcaaagccctctcttgatgaagaaaagggtctagctgaaaaatcaaaggagagaatggaagaaagagctgctgtacttccagagcatgggaaatctgaagctatggcgagtcttaaacctaaagaagaagctggaacagatcttggatcagctggaagttctctccagcctctgcttgagtctcatacctcagcatctgaggggaaaagttccacagggtctgtaatcaagaaagtcaaagttgctaaacgatcttcaagtgaaatgagctcggagaatcctccttcagagccaaaaaagaaaaagaaaaagaagaaagagcctgattctgaccatccagtgaagagaaaaaatttgtattctggggaagctggggccaagaaattgtcccagcttggttcagcgcatttacaaacctatatggaagccgatgtgccgcagctgttgagccatctgcaagatctctctcttgaccctttccacggtttatccgttgcttcttttggaactgctaggaaattttttctccgtttccgttcacttaattaccagaaaagcttgtctgtatcttcctctgatgctactgtcgaaaatgccagagacacaaaaccctcaaaacctgtcaagacagtgaagagaaccgaagacccatcaaaagctggaaaaaaacggctctcttctgatcgtcaagatgaaatcccatcagctaagaagctgaagaaaactaatcagttgaaatcaatggcttctgaaaagaagatcattcgagaagcaaaggatagtataaaaccaataagagagccaagcagggtggtacaagcaaaaccagccagaggtcaaaccgggaagaaaacagctccatcagttaaggtggttgagccaacaatgctggtcatgaaattcccacctggcacatctctcccttcagccgcattgctaaaggcgaggtttggtcgcttcgggctgttagatcaatccgccattagggttttctggaaatcatcgacctgccgtgttgtctttctgtacaaagccgatgcccagactgcttttcgatatgcaacaggaaacaacactctatttggaaacgtgaatgtaaagtactttctccgtgatgtggatgctcctaaagccgagcctcgtgagccagaaaacaccaaggaagatgatgaaccacagagccagtggttggaccaagcaccaccgcttcaccaaccaacattaccgccaccaaacgtcaacctcaaatcctgtttgaagaaaccagttgatgacccgagcagtagtagcaacaatggaaacggtaaccgcgcagccgtaagagtcaaattcatgttaggtggtgaagaaaactcgagtaaagcaaacaccgagccaccacaggtcacaatgaccttgaatagaaacagtggaccttcttcatcatcatcatctgttccaatggaatttgttagtaagaagtttcaaaacgttgttcatcatcaacagcttcctccttctacattgcctccaattcttcctctccctccacaatacacaaaaccacaacaacttcccattaaaccagtagaccacgtcgaaccaccaatgccaccttcaagaaacttccgtggcccgatcccagcggttagcgctggggacatctctcaccagatgctcaaccttttgtcaaaatgcaacgaagtagtggctaacgtcacgggcttattgggctacgtcccttatcatcccttgtaacaaaacgaagcccgttgagagaaaatgtgagtgtttgtttggtttttggtgataatattgtatgttaggtattagtttggttcgttaactttaaatcatgtattacaatttataatgatgaatctctctccctctccctctcccaggcttgttttatatttcgtgtattattttttgaagttgtatgcttttgatatttgatgcactatgcggaaccaattccattgttgtgttacgttatatattctcatttggtcttaatctacttggtgtaaatttaggcctgcccaaaatggctgagcaaagttgaaaattaaagctataggaagaaattgtgattacagtaaaaaaaatataaaattttgatcttattcaaaaaaaaggtaatttttattacctctctttaagttcaatacaacaacatcgacatggatattggattgtgaaggcgaaagagagagagagaaagagatggcacgacttggtaccaaatacgagtcgaactcttgtcctgaagtgtagaggcctaaaccagtacacaaccaactggacaaggttagatttggtggaaagcctgcctgttggtattactttattcgcaaaaaacgaacattaattttaaatgaatataatttgctacgtctcactttttagttccgttataaagtggtcgagaaaggaaccatgagaccaaaaatgaaaccaaaataaagaaattcaaatgaagctaaaatcctatttcaacacatttggttgaatatcgtgaagtttccattacaaaactgtctcagtcgtcgtctcgtctcacatgtctggattagcctcctcaggaatgacttctagtgtgaccctttctttatttgatctttccacaactacttgcatcctcttcccaactctgtcgtccattatctctatcacctgcaattaaaattcattcacacacgaacactaagaagacaaagagagtgtgagaaaaagagagtgtgagaaaaagagagagggagagagacgacacatgcctctttgatggtctcgaccggcttcccatcaaatctcacaacaacatctcctggtttgaagccagctcgatcagccggtgatcccggaatcacctgccaaacaatgatcatgcaactatataagtgaatatgcaaaagtttgacaaaacttggattatacattttttctttggatcttcttgatcgatgggtactcaccgtaggaacaagaacgcctctttcgacatcaggaaacattgggtctcgttcttttagctgagcaacgatcaagttattgagttcgaccattttgagcccaatccatggccgaataactctactgcaacaataaccttttgtttaactcctcccaacctttaagatgtgatacatgatgaaactatactgagattactagcatacccactcttcttgaaatgctcgatgattttagataccgagtcaattggcacggaaaatccaagaccatctgcagctaaaactttcatgatattaacaccaatcacttccccatccaaatttacaagaggcccaccagagtttccctgacacacatatagcacaaggatctcaaaaacacaaaatctgcaagtcaatatgtaatgactttcccattcatagagacagaaagatgtaagttaccgcattgatcgagcagtctgtttggagatactctctatgtttgcctcctaaacccaaatcactgcttttgcgatcaacacaactagcaccaagaaaaagcaaaaccggaaagaaaaaaatcaacaattctgactataagaacttatcaaatatatagaataaatcttttgcaagtacatgtgtttattttacctgacaataccagcagttactgtgttctggagagacagaggacaacctaccgctattacccagtctccaggacgaagcttactcgaaaaaccaagtttagcagttggcaatggcgtctttgactttatcttcactaatgcaatgtcggattgtaaatcagcgttcaccaccacaccctcaaacgtcctaccatcttgcaacgtcacatctacctataattcaacaactctaaacttcagatatgttctaaacagattccatcaaagataaatccgtagaagaaaccaatcttataattaaccatatgtattccaaagacaaaagttattccaagatcctttgcaagattgtatgagtaaacatatttgatgttttagtcataccctccctttagaagaatgacgaatgttctgaaaatcaactacaacatgagcgcaagtcagtatcgtgccatcagcatcaatgatcgttccagaaccgatacttttccccatagatatcccatggaaacctacaacattcacaagatcaccaaaccaccactgtgaattctaaagtgaaatcaaaagaaagataaaaacaagaaagaagctaaccctgaggaaccgaaagattgacaaccgctggtccaattctagcagccgcattggctatagtatctctccctaagtagccattacttggtttcgaactactatccgaagcttcaacagaaactcccttctcatcatttataggtgcttctgatttcggactaactctcgaagaaaacacgaaatttcctatatcatatacacagaaacagacattccaaagttgcaacttgcacctctagagtaaatttggcattgatcatattcagatatcagaaaattttgctacgaaccgaataagctttgctcaggacgatgaatcaaacccggtgaaatctgccaaggcagtaacgacaaagattctcgaacagattcaggtatagcaagcgatactcgagttcctagaatacatatcacattaaaccacaacaccaagagagacaaatacaacgcataatgaagaagatggttcttggtaatagtaacttacttgcatctggattagtactagcatataaaattccagaagtagcagtagcaacagaaatgatgcgaataagctcgcttcttttagaagatgatacagctcttctctaaacccagaaaaaaacaaatgagtcagtgaaattttaaccaaattaaacaagaaattgaacaatcgcagagaagaatcgaaccagaaaattcatcatcgcaaatccaagattgaaaccaaacaatttgattctacaagaacgaaattcgaaatcgcgtcttgtttaaattctaaaccccaccggaaaaccaaaaccccttttccagaatctcgtagatgaaccaagaacataaattctaacgggcctatcaactaagcccaaacaaagcccaatttgaacaatcattttcttaattaatgtcatgtttttcgtgattattatctactttaattaatgtcattaactgtactgaatctttccatgtgtataccaaaaccatttcaattaatccacctaaattgtttaaatcaacaagtacgaaacccagaaattaattagacagatgaagttactaatcccagaacttaattattttccattacaaattgcgttaacaaacataatcatcttcccatggtttttacataagacaaaccaaaacaaagagaagaagatttcagatacctacacaaatcctctaaaacaaaaaacaagttgtttcttcttcttcttcttcttcatctaagatccgaatataaccaaaaagcaacatcgatactattctttatcaagccttcttaggagatttggtagcagaagctttctccgcttgagaagaagaagctgttgatttcttaggaagaagaactggattaatgtttggaagaacaccaccactagcaatagtaactccatgaagcaatctccccaattcctcatcgttccttatcgctaaacatagatgcctagggtttatcctgttcttcttattatctctcgctgcgttcccagctagctcaagtacctaaaccaaaccggttcaattcattagaacttcaaaattaaacagatctaatagatacacaaaataaatcgattcaaaatgcaacgagatctgagattgaatatacctcggcggctaggtattcgagaacggcggcgaggtaaaccggagcaccggaaccgtatcggagagcgtaccgacctttcttcaagtaacgagcgatacgaccaacgggaaattgaagaccagctttaacagatttactaacactcttcttcctatctccacctttccttcctcctgctcctctcgttggcttcgtcgttgcttgtgatgactccattgttcaaaagctccaaaagaaaatacaaatgaatctaaagggaaagcacaattagtgtttttttcggttttgtggcggtttacgatttgcttaaaatgaggaaagaacgacgtgtatgtatataccacgtattgccacgttggcgatccgtgtagtaatttatcttagccgttaagattggatcttgttggctttgatctaacggtcgtaatgacttctttgtatgacattacacgtgggtgttgtaaaaggaaggtggaaaagaacacttgagtgatatcagccgttagattcattccccacacgttctacaagataatcagctttatgtctttttcttatcttattttgacagcagattattactattatttaaaatatccagagaattagagtagaaaattagcggataattcggaaaattaaggaaacaaaaattattacccaaactctggttttaattagtgtaataagtacaaaaaatgtgattaagaaagagagtttaagatattcaactgtaatcttctaagctccatgacaaatgaagaagcatcattaatggctgcacgagatgaaaccaaagcttcatggagctcggtgttaacgagataataagaacatatctctttgagaatcacatcatgacgttcttgaagccttgttacgttctcttccgccgttaccaaagcctcgtttacaagcctcagcttctcgatggcgcggtatctatgcctcaagatgggactcagagcaaagaaggagcctgatatagcaattgtagaaagaagtattatgcttccataaagatccatgaatggaataatgggtttggtaaaagaatataaagtggattcattacttaaagagggttgagattcttattctttgcttctccatggatgtaacttcgtcgaagaacgtcctcgtgttcgtttttttcggggtttcctttctcttcgaggctttctttctcttctctctaaccgctggcgccggatctctggatctgcccatccttttccccattcagagaatccactgtatgttctatcttgtttcaacgaaagtagcatgtcggcttctggataaacatagagtggtttgtcatcttggaaatctagttgtttcttccctttttctgttggttgtatgaatttaatctcaactcgacgatcctgcaacacagatcagtaacatggttttaaccgaatatgtgatcgtagctttacgcctttaccgataaatggatcataagaaaggttggttttttggttactagtgtaccttgttatccatctctttgatgtatccttcggcttccatgatacgggcaagacctttccaccaaagacaatctgtttccttgaatttttcacactacactaaccaaaggcatcacattaatatcatcaagaacataatgcactatgtaatttgttgaaacagaagatttacctgttccctgagtttactgatgaagaacagaagatttggcttgtgggataatttattttgtttgctgttgccgagtccataatcttcatatggtgcatgctcagagtcattgtctacctgcaactaatatactagcggcttaagtttcagaaagaaaggttatacagtagtagacgaaatctcaaatactaaatagaaatatgtttgattgtatatcactcatacgaaacaagcaaacttttaaatgaagttctgggattaatcaaatggcttacatgaaaagcagtgattacttgaaacaaaagattagcttcctctcgtacatctactagctccggaggcccttcagtgcaaacatcacatctgtttcatagattggaaaggttttacaactatttggtagtttgacttgatgggttttagataaaaggataggacttacgagttacactttttggaactaaattcctccccaaagtactccacaagtattttggcccgacattgtgaagtgttcattccatatctgcataagaaaggagaatgaatataaaagaatatagaacgataagtgaatatgcactcccacgtatctgactagtatagagacctgaaacagtcagatagcatcttgtatgcttgctctgtctgttctttgctcctacggcttggcaaaagcgttggtgctctcgatagatcagcatagagcactgtaaatatcagatagttacttccatcagccatgacaaacaagagtacatttacacagccaaatcattaatcaactcaccacactcagccaattcgccatctcttccagctcgaccagcttcttggtagtatgcttccaagctctgtaaaatttcattatttcagtattagagagctcaacaaatttgaatagcacgtaattctaggagatgtgaaatgttaaatatagaaatcttataagagcttcgagagacctgcagccaaccataatgtatgattttccgaacatttttcttgtcaattcccattccaaacgcaattgtggcaacaacaacctgcagaggcgtaaaacaacgttagtgatcttccacgtagtattccaataaaaagaagcaggaatagcgaagtggataacagagtagatcactaagtttgagccataacacatatagaacattaaggttttcttttctatgtatatacctgcagcttattatcgtgaaagtcctggtgcacttgtctgagatgtttttttggcaactgtgaaacgtaacaaactgttcatacatccataccaatatttaaaaagaacagctcttaatttggaatacaaaatttttccatcagaaattggaaacaaaatttctacaaccaagttaacaaaggttgacaaatttcattcctaaaaaacagtgcaaagggcttcttatagcaggaaaaagtaagaagatttatcagtccataccgatgcattataagctgcagctttcagtccaaccccacaaagatacttagcaatgttgacactctcctttcttgtaggaacgtatatgattgtcagtccttctaaatccttttgcttttcagaagggacaggtatttccaggagttcacaagaaggcattgcgcaaaactcgccacaagccactgcaatgattaaatttgatctgaatcaccatttctcaacagcaatgatatattaaaaaactaatagaaaaaaccgaagacttttaattctgttgtctgcatatatcatttactttaaataagtgacgttgacccttttcgaccatttgatttgcacaggaggtgacaacttacttaaccaaggggataatggccagttgccaaatatatttattttagtaacgctattttcaatttagtatgcactcacctattttctaatcaaaggttatgtaattttatcaacagttttagatcactctctgtttccaaacaaaagtgaaaaggagcttaccatcccaatcatcaacactctggaaaatgtcagtttcatcttccagatacgcttctgacaattctttcccatttgaactgtttttctttgccagggagttttcttgatcctcttcatcctcatcataatccgtctcatggatgttttcagaatcgtgagaaccaaaatcagtctgctcctctgactctcgtgagattactgctagctttttcccggtagagtttttcttttcagagtataagtcaactaagttttggaagtcctttgcatatgaagatgcaaacttggttcgactatgtttaacctgtaaataacagtgaattatcagctttatgctgtacatctcacgatacacacatcagcagcaattagaaaaatacagattcatctgctaatcttttacaaatgcagaaagagttccatatatgaaaagagaaattaactctacgctggaaactcacagaaaattgtagatttggcctgaaaaatgaagtaagtacaatttttgtttcctttgacaggtgaagtgactcaagaatatcttcctgaacgttaacagtggctgttgcagtcaatgccattatcggtacatcatattctaagaattccaaattgctggcacagaaattttcccgcaacaccgataatttcctgaagatccggcagtgggaaatctatttgtttagaaactaagtttacccacaacagaacttgagaaataacaataacaagtcttgactcttaaaatcatacctgtagtgcggacggaaatcatgtccccactttgatacgcaatgcgcttcatcaattgcaaaaagagcaattccatgagtctttgcaagcttctggagtggtttaatcagtctgcgatcaagttttcatctttctttaagcaaggaaaataaacaaacaaatgcacttgagaaaattttagaaaggttgtgttgtgtaccggaccactgtctcagggcaaacatatatgatctgatacattccctgcattgccttctcttctatgcaattatcaagttggcctgaaccaagaaaacaagcagagactttgtgccttgatagcttgaggcattgatcatgcatcaagcttatcaaaggcgaaattacgacaacaacttttcccgttaataatgcaggaatctggaagcaaagagatttccctgcgtgataaaaacatagaaaacacaattagaatattgttaacatcatgtaagaatgacgacgacatcagcgacgaaaacagaaactaccagatcccgttgcagctagaacaagacagtccttgtgcgcaacccatgttgacaaagcctctctttggaaacttctcagggatgaaataccaaaccggtttcgtagtatagaattaactcttttctcccacgatgatgaagcctctgagcaaccattcaacaattgtccttcaggaaaacaactagactccataaacactggagctaaagactttctcacctcttctgaatgctcagacaccgtttctaactgagagtccacttctacagtcccaaaggtgtcgccttttttcttgttctggttcacagatctaaaatggtcaagcaaactagactgacgctttgactccgaagaagaaaacgaagatggcatagctcttttaccaagaatcttattactccctgaagaacatagcaaactagccggcttgaacccaccagttctatgatttcccttcaaaatatactcaacagcatcatcacatgacttaccacctacagcttttacagcctccaaagcatccaacttttcaaaacccatttcaacaatcttcatcacgagttgatcagaagacaaatccatcgaattc

SEQ ID NO: 753 - DNA, 105223 bp, Arabidopsis thaliana
gaattcattgagatttgggagggaactactagagactggcgtacagagaagtattggtgacggacaaaaaacagccttaaagagaaccttggttacctacaacaccaccgagagcacctaaactactatatttgatagacccgaatactaaggtggctgaactcctcacaggacctccacaacaatgggatgatcaataggtacatcaatacattgattcgtcggaccattatcccattcacaaaattttcattccttatgatctcaaagatgactcatatatctggaattacatgaaagatggtaatttcaccgtcaaatcttgattggagggctcttaacctcagtcttgaagaagacacatcacaagctctgcttacagttaacacagatatcccccaaaaatatggcgtctccaaattgttcaaaaacttaagcatttcttgtggagattttttcatccaaagcaattgggatctctgaaaatttaagacgacgaaacattaatgtcaacccatattgtccacgatgctgcaatgaggtagaaacaaataatcatgcaatgttcacatgtccacaggtgaaacaaatatggagagcttcaggaattcccacacatgtactttgagcccagacgagacaatgaagaataaagtccgctatttattaacgttgcatgaggatacaaaggttgagacaaccggacgacttttaccattttggctaatgtggcgtatttggaagagccgaaatgatttagtcttcaacaaaagagcaaaggatacaactgatatagtcaaacaagcgtccctcgacacaaaggaatggctagataacatgcgacccccagaaagaaatacccgagaccaactatcatctacatcgagaaaggctaattggcaaaagcctccagtaggatgggtcaagtgtaactacgatgtctctcactatgaaggaaagataaccgcgggtcttggctggatcatcaggaattcacacggcacatgtatggactgcggaatggggaaatttcaaggacgccaaacaattgaagaaggagaatgtactgcactcatttgggctatacaatgcgcatagggacttggttataggaaggtaatattcgagggtgacagcgtcactgttactagtatcatcaatagcatagagcccaatccaagattacgacattatcttgatttcatacatcaatggcgtaaagcttttaacttcatcgagttcaaattccgacatcaagaaaacaacgtctatgctgatgtcttggtcaagacagctaccaagagtaatacaaactttgagttatatcgaatatgtcctaggtttttatagccgtttgtatacaatgatgtaaaacatttgcattgataataatattggaaggaaaaagaaaaaaatctaaacgaaataaaaaatattaattctatatttctaagtaaactcttattcattatgtttaatattttgttactacatttatactctaaaacttcaaaaagtatttaagttaattatcttatgcttttgctgataaaacaaaaagtaagaaaataattctataggattttgtttactcacaagtgtaaaataattctttatgttttgtagtcaattttaacaaactttaattacaatgaagtaactaacgtcattacatacacatcttgtacaaaaaagaaatatcaaatcatctctctcttaactttattggatgaaagttcacatcaacaaaacaaacaataattattaataatttgtatgtagtaaaatcttataaatacaaaactgtaaagcaaactaaaaattatggaagtaagaacatatcaattattatgtcatgttaaaaccgattgcaccattttattgtatctatgaacatcatctattagttttttttagctggcaaacaagatcctaatttttgtataaaactttagcaataatgcattacaaaaaccttctgattgtcataaaagattaaattaagaaataagaatgaagactagagagaataaaactcgaaacaagagttttcttattgctttctctttctcttctctttttctctgttttctctatatcttataaatgaatgaaatgagttatatatagtagagcttacttagctaggaagtaaattacttagagaatagtaatggataaacatcatccatatcttaaagatgaagtaatggataaacatcatccatattttaagaaggaaataatggataaacatcatctatatcttaaggaagaaataatggataaacatcatccatatcttatggatagagatgaatgatggataatgacatccatacttatccggtttataacactgatcaaaataataccattattctacgttctctaatcgtgaatcctcataattgagatatacagttttattttttctgaagacaataatctacacttaatatacttgaataaaaaatttatttgtcttaccataaaaagaaagagtaaaatattgattttgatctcaacaaaatcatataaccgaagccgaaggatgtgaaacaaatgggcttctagtttgggcccaaatagcctaaagcgaagataaagcccataaaaacctaaaatgtaagcgagcttgcttgttgctcctataaattcataaaccctaacttcgttttcctctcgcagacgcagccatggtaaattcttgatctccgcctctcaatctccgtttcttatgtattacaaaatgaattctccgtttgcgagcttgatctagttggtttagcgtgtaatggttccttaggtttctgatgtttcgttatggatttgcatttgagtgttttatcgttgttgttattttagggtatcgatcttatcgcaggaggtaagagtaagaagaccaaaaggactgctcctaagtccgatgatgtctacctaaagcttctcgtcaaggtaacaaatattgacatgtcttttacttatgtttctctgtctgttacattttggtttattgagatttgtttgtgtttttgataaattttgtagctttaccggtttttggtgaggagatctaacagcaacttcaatgctgtgattctgaaaaggcttttcatgagcaaagtcaacaaagctcctctttcactctctaggcttgtagagttcatgactggcaaggttcgatctttttgagacccatctctctttatatacatcttgagtctgtccttggtcttaatttggaaccccatttattttattttcattctgtgaagttatgagttttgacgttgtcctgttatgttagtatgtgagaacaaatgtacaaacttgattttgtatcttactattcagtgatggttagagtactcaaatgttgtggtttgtctatttattaggatgacaagattgctgtgttggttggaactatcactgatgatttgagagttcatgagattcctgccatgaaggttactgccttgaggtttactgagagggctagggctagaattgagaaagctggtggagagtgcttaacctttgaccagcttgctctcagagctccattgggacagaacacagtaagtaaaattttacactatctgaatgtttaggataattcaagtttatatatgaaactgagctgtgtttgatatgttgtgacaggttcttcttagaggaccaaagaactcgcgtgaagcagtgaagcatttcggacctgctcctggtgtgccacacagtaacactaagccatatgttaggcataagggaaggaagtttgagaaagctagaggaaagcgaaagagtcgtggattcaaggtctaagaagatgttttctggtttcgttttgcttggtttaagtatcgaagttttggtagggaacgctggttcctctttaccctgttccagactttgttttaagttctgtttttctattctcaagacaattggatattttgctttgtcttttaatcttactactattagctgcaatgagattttatctagaatttggatttgatcagtatttggagttcatagtatcattatggtctatttcgttttgtatttctcttccttggaaataaaatatctgtacatgagtattaaaatgtgtaaacaaccctgaaaaatgttctgtttcgtactaacccacctaattcgttgtctattaggttctagcaaaaatcgtatatccataatcataatgaagcttgtcaaataagaacgcatcaagtcttctcagcacaagtggatgtaatccaacaacattggaacacagctccatggtaacaggagatggctcgaaagttccatactgaatcttgcaagttggaaatggttttaatgtacgcacggataaaatctcagtaaccatttctcgggtttccaagaagaacagtgtgcgataacacaaactttaagactaaacaagaaaatagaagtaaaacaaatccatgacaggattagtcctctggaaaaacaaaacaaggatctgaatcaccaaacagatacggaaactagaatctaatcaaataccatcttacattcttcttgttgttgagattctgtcatcgagacaaaagcgaaaaatactagtcgaaacttgcgtttaagaacttaagcagttcatttcttttgctctctgcagctttgtcctctttggacttgtcaaccttcagcagaatctatagccaaacacatcagaagaaggaagtgagaaaagaaaacagaaaatagttgtgtagggtgtaatattagacaaccctaaagagagtctcagactaacttttttccctgaaacagcacttctacgttcaccatcgtctttgtcgcggttcaaaaactgaatcatgaaagaaactgaatcataaaacatggacttcatataaactttagatctttatgggtatatatagctatagtacctttgatagttttacaggcccgctacttccttctccttcccctttctatacaacactcacattgccaggaccaaaaagataaacacaaacaaaacgaagataacacaaagtccccagtttatcatgtcaccaaccccagctccaatttcgaagaggccacagagaaaggcaaaagaagtattataagaaacttgttatcttgatgagaatctattcaaagcgtaatgagaaaataatggccaacctttctttctctgttcttatgccgtttatgacgatgactcttgcttcgttccttatccttagcctttaaacaaaaaatggtacttttaagctaaacactataacagagaaacttcacatgattaagaattgagtacagaaagtaaccttctttggcttttcatgcttcttgtgccttcgtgacttctcatgctcactatctgagctctcactgagacaaaaacgcaaatatcacactcttagttttctctagtttctatttacatcaatcaattaatccagttccactaacgagattctaatccagttccatcaaatcaaaccctaaaccctaacattcgacgaacaaattcaaaatgtgaaaccaaacaagaaacacaagctagattctgcttaaatcaatctttagagttccactaacgataatcttatccagtttccatgtaaccaaaccctaaccctaacattcaaagaacaaaatcaaaatgtgaaatcaagtgctccgatccagaaatgaaaccaaacgggaaaattagggttttcaatcgtaaaattgggcgagagaagttgacgagaaatcaacggacctggaggaatcggagtaagaagaatcagaggaatcggaggagtgttggcgtctacggcgttttttcgaggtggatcggctctttttccgtactttgagcgagtctctgtctcgatcgtttctacgatgatgacggcgatccttacggcgacgatgagagtctgaagaatcagaggagacgtcggaggaagacgaagatgatgaagccgccattgttgagaggacaaatcaaacagagaaaattagatcttaagggtttggtcaaatttattagacagatatttatttaaaataactataggggctagttataataattaagttttgtttcggtacgttttataaatcattaagagattaaggagttgattgctattaccgttttattgaatttttagggtttttgcccttttcttttttcttttagggtaatattacaaactaactatgaaatggaaaagaattgagagaatgatcttgtgtcagaaaatagcattagctttagttataaagtttatatgtatttgtttaaaatagcatgatatatttacaaaaattatgtaattcttttaaatacataaacgatatatatacactatatatatatttttctaaaataatgtgtttttctgaaatagtatgatatatttataaaatgcatgcaattctcttataaaacacgaaatattagcaaatatatagaattgttacaaaattacatgggtttttattggataacatgataaatatttacatatttcatggggttttgttagacaaatattatatgtgactttgttaaatagcatggagtattaataatatgagatccagtggacaaataaacaacaaaggttgaaagtttcaaagaaatgaagagattcgtgatagaggagggagaactagaaggagatgggtggagagattcgtcgacggcatacgtataaagaaaattcagaaatattggcgagaaaatttgttggagagagagagagatttgtgttggtgagagaaagaatagagaagtatgttgttgatatgcgatggaaggggaagtttgcaagcaagaaagaagaagaaggtaagatcatgtgtggttgaggataaaaatgtcatatattgtgtctaaaagtgttttcctctctcataattttcaaccatagttatttacttcattcttgcagtcaaaggtcatttagtatatatattttttcttttactacgaaaacatcaattttctgttctttaactttttttttccgaagacaacttgtaagaccacctccaacgggagggactatgagagtccctaaaaaaaaaataaaaaaatatattctaatgttgttattatattttaattttttaatagagtttgactactaaaaaagctacatgtatatatttggtgttgagactgttccttaaataagggtttttggagcccctctctcctctgtccctcactttttaattatttttattataagggactcacaatagataccaccattgctgctgctctaattcctaccagtggatctcacgtcttctcgaatatatggacacaccactgttgggcggtcgtgtcacgttctaagaagttttaaagatttgttattggccctacaaattattcaggaaggtcacctatcctgaaattattccatccaaacactcttaactgtggggttctcttaagatctttgaccgaattttggtgacttaggtgaccaaatcattttttttaaacagatttctattcgttgattagcttttgtaaagaagttatgtatgttgatccaagcaagggacatacatgatccaaaatttctaatcatacacaataacatcaggttcaacctaaactaaagcaaagcaagcatatacgtctaagtgtagtggctaaatcagaatatatactatacatagtgattgccaagtttgagtcataagagatgtagtacttttagatctttgaagatttgagctaatgacgatgataacatgtgatcaagttaaacgcttcatcatggaatattctccttggtcttttggtatacaaaagtgtttccaagaattacaatgacatattttttatgggaattgttaatcgcaggaagtggaagtcactttagttaagctaaatagctatatttatagtattattttagttcgtattaataaatccctctcttaataataatatttttttttgctattcatcggacaactaaatgcttttaacgaattttacatttaatgtttttgctaattttttagctaaacaatgacaaccaaatacctcatattcatctctagaatcctatgacaatgttattgctgcatgagtctattacttacttgctaagggacccgaatgtcctcaaacaccatggtgcagtcaaaattaagtgttgtatattgtatgaaacttctatatatgaataaagtgcaaacgtaaaaagtgcaaaagatacatcggaaacaagatgtactaaataattttaataaattttacaacatatatacatgacgatatttaacatgaatttacaaagctactcatattcacattaatttggcagaccatataatactgaatctgaagttctcaaagttttcctaaatatattaaaaccaaaaatgaggtttgtcaaatattgttcaccttctagattttttttttttttttttttttggcttttagagtaggaatcacatatcacatgacctctagttagccgctgttttcgaatccatctcaaccgattgagctttgtggagaagctgatggtgaagcagaaggagaaactgaaggagaagctgatggtgaagctgatggtgaagcagaaggaaaagctgatggtgaaacagaaggagaagctgatggtgaagtagaaggagaagctgaaggagtcactaccgatgaaggtgtatctgatggagaaccaagatgaccagctggtggagaagttgaaggagaaactaacgatgaaggtgtatctgatggggaaccaagatgaccagctggtggagaagttgaaggagacactaccattgatggtgtagccggtggggcaccaagttgaccagctggcagagaagttgaaggagacactaccgatgaaggtgtatctgatggagaaccaagatgaccagctggtggagaagttgaaggagttactaccgtcgaaggtgaatctgatgactctgttgtgttagaagacaaactagagccagttacggtagaatttgtggaaccgtttccactaaaaagacctaggatgtacggaacacctttaccaggaatccaagcgtcaccttggatgtattgagctggagtgaatttaaggatttcttcatcactcaacttcttgattcctggccaagtaacccgttttgtgatagctgcacccggcccagtgttctgcacctccgagtagaaaagtgtgttaagaccgaattcgccgagccacggttgccatccttccggcggaacaaaatctggtatgaacgtgttcatgatgatagttcttgaatactctttccatggtcttccaagataagttttgctctgttccttgactgccaagtaatccggttcgccaacaatcgtacatccttggagaacaaatcccgtggattctcgcggatctttacgtccatgggctgtaatggggcatgcttggtttagaagtggctttctcaccagtaaagtacagttttggaataccgcagctgcgtctccaaagagaaaatcgattgtgcccgagatagtacagtcacggtaaaactgacggtgggaatgtgcatatagagtgtcttggtaaccatcgaatttacaattgtagaatattgactcatctgctagaaccctaatagcaaccgcttgatgctttattgccccggctgtgttctcgaaggcaatgttcttggcaatgaaatgatctccaacgattgctgcaataaccatttaaggctcatcaaagtagtgacgggtcattaaaacattgtaccttatgaaatatctatacaataaaaaaattaatctccaattttgtataacttgtttgtctttaaagcagtgttcaagaaatcgttagacgcttagcggacggtgaaccaatgcctagcgcctaagacgtttaatcggacctaagcgattttaggcagttaaagcgtttataatataaacattataaatatgattttatacataaatattatataaaatatctaaaaaagtaaatatgtaaatcggtaacgaaaattagaaaaaataatcttttaactatatcaaacattgtatgaacatttagaactatttatataattataaatttagttgaaaactagaaaaatatactaaacgaggtatatacgattttaggcggggtagacggttttttaggtgtcgcatgagcccctagcgcctagtcgttgcctaggcgaccgcctacaccgctctttagaacactagaatatataatgttttgctaaattataattggcctatgcatttcttgggcctattgcaaatacaaatttatacttcaaaatgtaagagaaatccttaccaacggtggctgttttgtaggtagtaataccgtccttgtaacttttgctgccagaaatgacagttttgtcggggccatcacctatgaaaactagatgtgtcatgctcctattcacctgaacatactctttatagattccttccttaatatgaaccacgaaagtcgtgttcttcttcttcgggacaaaattcaatgcctcgttaatcgtcttgtactgaccacttccgtcttgcgccaccacgatatcgggttttacctcggacataggagcgttcaatagcctacgtgctcgcgcatccatccacgaaggaaactcttgggacaacaaccgtctactattcatctccggaatctgcatttgtcctaagtaattcgacatttcggtaaccattgcaagcccgttatgcgttaactgcaccgcggttttcaacgccttctttatcgtctcaccagcattaccttgtgtcccttgaaacccatcaagacaagtttgctcatggcttatcgtcgcactaagccaaatcctcaacttaaccaaggcctcatcaactttatgaaactcgaacttccccaactcttcaaacgacttactaagctcaccgattgcgtaatccattagctccttgcattgatccaacgccatctttgcccttggatccttttgtagctcaatcatagtttgtgacttctttgccacgtcacttatttgtttcatcgttgcgttaaaagctgtcttcaccagctccaacgggtctgatgtgtccttcgcatctttccttagtgtatcctcacaagtctctttgtaatccgtcggtgcacaaacatctttgatggctttaacagaagttgtgatttcttcgtcaccagcgttatcggacttgttgacgctaacacctatggtaacagcgacaaccatggagattaaaagaacagaggagatagagataattacatatctctttttcctctttgcatcctcatcgtcgtatccatatgacattttttttttttgtcaaagtttttttttttttttttttttagtttttgttctttaaaatatatatgaacagctcgtttttgttgatttttttgttttttttttgttttttgaagagctgtttgttgttttgaagcttacgtagcctctttaggagtgtgaattctgcataattttggaaatatttacaaggatagttttgcttatgatagataaagagtttcgtagttttgggtgctttgatatatggggtttggcgggaaagtcgattgacttaagaatgtgagagacagaccaaaataggtttgtggttttcttccaaattactaaacttggaaatttaatttaataattatcttaatttaaggtataatcaaatttaaggtttttgttcacatagtttggtggacataaaaaaaaaaaattgagaagtcatattttttttggagaactttcataactaatccaaataattaattatttttttcggtttggttctgacttttttaaaacttaatccatgtttttacagaaaaaaaattatttcataaacaaaagcaaacctaaatagaaataatacatcaaccaataagttaaacatagttcaaggagcaaaattaatcaaagtttagattcttaaacccaaagtattaaaaaaatagaatccaaataattataagttcaataaagaaaaatctgaagattaacacaatataaattgaacaaatataattatatataattattccaaattttcatcaaaaccattcaattttatgatttttaaccaaatcaaatcaaaactgaaaacttaacaaaattgacaaccaaatggatttcgaaagtcatttcttttctggagaattttcataatagctaaccaaaattattagttattggttttggtttgcttccgattttaaaaaaaaaacttaatccatgtttccaccaaaaactattgctgcataaataaaagaaatcgtagatagaaataataagttaaacataattcaaggaacaaaatctaagtttagattcgtaaacccaaaatattcaaagaatagaatccaaataattctaatctcaataaaaaaaatatgaaggatattattaacaaaatataaattgaaaaaatataattatatataattattctaaattttcatcagaaaaaaaaccattcgattttatgggttttaaccaaatcaaacctaaacagaaaatcgaacgaaactgacaaccaaatagctttttaggctaaactatataaccaaaccaaatcatttatttctgcttggttcggtttggcttttcggattacagaatatttgcccacccctacaactcaattaataccaaacttgttgaagatgaaaatatagtaaagaagaatcaataaaatcaaacttaaccaaactttacaatatctcctcaaagatagggcacgaaggttcttaatgttcttctcaaacagaaggatgtcaatttctcgtttgcttagtgatttggttagaatgttgttgttaagatgaggcttgttgttttgaaatatattgtggtcatcttgtctcaaattaagtggtaatcaatttggatatgtttggtcattaaatttcatggaatattaaattgttgacaattttgattttgcaggcttattatcacattaaaccaacattggttaaatgtgtctcatattgactttgatgtacatatataacctctaactatattgcttgatatttatccttagttgaaaatcgactaagcgctcctctgacatttccatctaaatggttcattcaaatgaattaacaggatgctttatctaaccgttgttcgtttcaatttttgattgttgatctgaataaacctttgtctgtttggttaatgtatatttccgtctagatgagtttaattaaaatataactaaaatgctcatatttttagtcttaactatactaatgatttcaaattatcgatatggtgatgcttatttttacacaaaaacgaacaacaattagcagtttcattcagatgacaatctgaatgtgcaaacaaacatgtctaaaatcttagaagtctaaaataccactatatatggacactttctcgagaaagtattttagaagtcattattttttgattttttgttttaaacttctaaatggacatctttcacatttaaacaaacaagaaatttatatatttcacgataataattaattctaattttatatatagatatgcagcatttctaatatatatatatatatatatatatagagagagagagagagtcattagtttttcgattttttgttctaaacttctaattatgtgaaaatagaaaatgataatttcacaatagtaaccgaaagaaaaatttggtatattggagcaaaggtcaagtaaagaggaaaatagaaaattaatggttgctagatatataaagcttaaatatataatgtatttcgataaaactatcttataagtattataaaacagattaatgaaaccacttacaatctttagaaataatggacgacataagatttctcaaatatatttaaaaaatctcttcctaataggtagaaacaatttgtttcactgaaaaaaaaaactccccttagttttttttttgatcatcttcgtatttaagcttaaatagaatcatctcagattaaattatttacagacttacaatttgaaaaattataaaatgttgaatgtaacttgaatattttgtgggaatacgtcagcattcatgaatgtatcttggatatattttaccatatagttcagtagtctcatttaagaaaaaaaataacacttaagctattcaagctttctttttatgaatatatatatctgaaaatatctatatatatataaggaaaacaattgttattctttacagttcatagaccattttttgtcattctatttcttttttgggtatttttctcccaatcaaaacaaagaaagtaaaaaatttgattactacggaaaaactaattaaagaaatctcgtatttttatttctagtttttagtaatgagaaaaaacaactgtagtcaatcacaagctgtctaagttaaatgtttataaaacaccttccaaagtaatatttccatatagtagaaatatagaatgcaattcctttgtatttgcaatgactaattattttctataaaaatagtgaagaataacatcatccttccatagtagttaaagatgctactttgactacagttggtttattaattattatttattttaattattatatatttttacacaaaaagaaaataaaagatttcatagaaaatttagtagtttgtaacagtagttcaaacgagttttgtgcactatttcttgtaacactaaaatatcaatttctttaacaagatggttagaaaaatagactattaaagtactgttcggtagtaatttttgtaattgcaaggacatgtaaaaacgtcatagtaatatcaattatattatagaaatataaccaaaataataaactatgttggtacaaatttcacatttttactattttggattattaaatatataaaaatttaaaaatatgaatttaatttgatatacagaacataaaaaaaaaactgaaatgcaatatattcgtatgtataaacaaaacataaaaattaaaatgaaatgcaatatattcgagtatataaaaaaatacctagttatataatattataagttacatattccacataaagtgttatattgagagtcagaaaaaaataaagaattgttacagaaacaaccataaacttcaaaactatggattcatagtagttgtacatttattacttaattacataaaattcacacaagcatatcattttgcaagtcaagtaaaatcaacatagttaaagaaacagccagatatgaactcatagtagttgtgattttaattaattaaacccttggagattttataccataatagttaacgaacattaaggttaccttctcaataaatagcatcctcatttctccgaatctatcacaaagagataaagatcacttaacaaagaaaaaaaagatttgttacagagaaccagctatgtcttcttcaatgtcttctgcaggctcttccacacccaaatccaaaaagctcaaaggcattgttgtggacatggagaagtcgaaagagaaggcaacaaggaacactattctgaaactaggttctcctcaagaggttacctctgaaaggaggattgagaactctagttttggatctagtgctgtccgaagaggaagagagatcatgaagttttacccgtcaaaatcaaacaagatctacacttgtcatttttgcaaaaaaggtttctcaacctctcaagccttaggtggtcaccagaacgcgcacaagcaagagcgggagtgggacaaaaagcggaaggagatggaagctgagtatcctggactctcctttttgaaccctttccttgataagcctcacattctcttaggtggttattcacaagatgctttatcaaatgaaaatcatcttgggatcactcttgatccttttaaacgcttaatttacccatctttcaatgcgggtatgaacatggctgtagttcctcgtgtcactcctactcgcttcttcaccgggaacactagtaccaatggttctacttcaagggtccctgatcctttaccatcctacaacaacctttacccatcaaactctagaaacgttcttccttttcctcctcctcaaaccaccaagctttctagcaatttcgtctcgcaaggaaacgttttaagcgaagagaatttcatctcaaagattggaacaaacaatattgtggagattgatgatgatgatgatgatattcagccagaagaagaaaaaactaaaagcgggagaattgatttatctttatccctttgagtatctttttttagttctaagcgttatttaagttttcatttcagaggtttcatagttattagagatctctattcaccacagttctatatgaagattgttttgtcctttttaagttattgaatttcattttgaatgttcatttgtttttgtcatctcctcttctattcacatgtaattgtgttttagttatttccccaaaacacaaaattcttactccgatgtctacattaaaacctccatttattagtaatgtcggaaccctgaaattctattaatttataaaggtattaatctttttgataaactttatataggtgtttattttcatattttttgaacattcctatttataattaagaagtttttgttataaccaattttagagtttagaaagaatccttgctactgtccttaattgtgataatgcagtcgaagacaatattacattacctttaaaattaaacatttacacgtaaaaatagttattgcgtctaaaaaatctttcacaatttttgtatgcaattcgaatagatatcaccatagtttttgatatataataagaaagactgaagaggagatccaataagaatggaaattcatgaataagtcaacaaaactagagtcatatatatatatatataattattagtttacaatattggttagacgatatatttacaatttttttttatataattataatcttatttctttatcaatttgtatcattttttacactggcataactcggaagcggatgaattttttaatttatagtgattcttaatttatcgaatattaatttatagaggtatcacatgagtgttctacaattttttcagtttccaatacatcttgacataaccgaattaaagtctccctaggtatatattatgtcttgatttgaaatctttcgagcaacaaaaactatttgttagttttcttgaacatctttttttctttggacaaaatgttctactattaatatagaatgttacaaaatgatttggaatataactaaaaagtagtagaaagatttagggtcttttgattagtaatgtatatacttttttcctatacatatgtgatcatttttagaatattgataacggaaattggttactcaaacatattttcttggttaggttagttgagtttattataatgtaaagtttaagagaaggtctaaagaaaattgaatatagggttttgtatctttgataatatgttagtgtctcactaaatatcaagtttccggatggattactaatgtatattaaatggcataatgatcagcataacacaataaataatgtaatcacagtgattgttcgttgatttccatccttgtggtgaaagaatacgcgtaggcaaagaagaggtgaacatgtaactcttccggctcaccacatagaagaaatggctttataactcccaaactccatgagcgagatcttgtggcaagtctatcttttagagcaaccaggtggtgaaggagtatctcagaatttgttgagaaaaccagaccagacgactccaagtaatgcgttggtgttgtagtcagatttgatctggtccatatggtgcttagcgggaaaaaacgtggtccaaagccttcctctttaacctccataaaggaacgtcttgcccacccgcatgagaaagcgaacaagtggttctaatgctcttaatgatttcccgaagatgagagctccgacgttgatgaatgatccaactagaggatgatacggtctccacgatctttgcatatttggttaagccaaagactccaaaccaaactcgcaaaatgagtattttaatttaggttatggaaagttatattagagtaatgtcgaaatatatttttacatttgcaatggaacgatttgaatatttgtatacagtagtttgagtaaatcgtattgacgggaattttcaaaaatagattcgaaacattccaaaaatctatcattaatatttgagaaaaaaactatgatattatggaaataatgagcacaagagtaccaaatgaagccaaattcatattggtcctaaagccaaattcaataggaacagatgatcaacatcatgatttgaggtgtacatgaacaaagtttctatgcagttgagtgggtggtttatttcatgtggtttttttttcttttttttttccgaataccaggaggttttaggctaaagcccgtaatctcccaagcccaaaaccacatgtattattagttttgccccaaacgtcactcgaactgacgacctctaagctttgcctagagtctttaccaattgagcttggttctttaatgtggtttacactgaatttattttagtggtatgtgatgttttctttctattggatttaattcctagcggttcatgttcagtggtcttaggattttttgaaaatcttaacagctacattggaaacaatcaccgtacgtagaaaccgcaatggagcaaacagagatttatagatgaagatacatcgctcaccgagttattaataattcaatggacgacaacaatactcaatcatgattcatgaattaataaactggaagcaatgtccatgggggatttatctagtgaatagtctcattggatatttggaagaaaagcccagatgattatttttggaaccacattcaagacacacagttgtcttgtattaacataatgaacggtttccaatgattcactctctggatgcagtcaatgtcttttattttggagatgttctttgggtttcgatcccggagtcaatatttggtagagttgggactgtctattttttcttgaaggcgaaaaattcatccttctgatgacaccgttagatggtgatgatgtttcccaaatctcggccgaagtggtttttgtggagagaataggttgaacattaactgagatagcgccgattaaagcacaatatatcattttgtcttgtcttttccactgagtgtacctccgattcgtcgtgacggaaccattggtggtgacagtaggtggtggtgcaacacaagaaccatcaatgtagccggcaagatcacacccatcgagtagggcatgaacctaacaacgccacatcatgaagttgttatccatgagtttggtaaagtttgtcatattgacattcaagagatgaacagaatcggaggtgacaatggtctgagagaaggtggctggagaagaggccatgggaattgtaaaaaaatataaaggggtcggctactgttttaggttagagatcgacatatcgtattaaggtttaaagagattttgttatatcactgggatgagaattttacaatatataaagagattagacaagggaactagaaactaactgaaacaacccgaccatttttttttaaaaacataattaaatattttcataaatatttaattaagccaaccaataaagcaacaattaaaccgcaaatcaaaaatactattttatgaataaataaataattcaaccaacaaaaccaaaaatgactaacaatcctaacacaaccctaatcggttctaataaccaaaacactaaaataaaccaaatgagtttctagatcatgatttcacgatcacactttatctttatctgcaccaaaaagaaagagatgcgtaagtattatcacaaatacttagtgaggcgatcctctcatctacgagctatacacacaagcaaaaaaaaggggtataatcacaaatacaacataaacaaaccagtcattgaacaattcacccaaaaacacattcactgcacctacatatcatcacacaaaacaaatcatacaatccaatcgctcagataagctcatggtcacgcactcaccttaacaaattgattctaacaacaattaaacccgggagagactctccttgcgtctgaaacagtccaaaaacgtcctacaacaagtcacaaccaaaagcaaccttgaagcaaactggacatgaaaaacagaaacaaacagtctcaaagacgaaaccctaaaaatacaaaccaactgttaactatcatatccctccggtgaaacgctagccttagacgtcacaaaatttcgtgccgatcggaaaccagacgaaaccacgatttcagttacaatccccgcttgtcctaattcgcgtctgagaaaacgtgtctcacgaaactgcaaataactcaacgaatataaatccgaatccaattctgtaatatggagaatgacgataaaagacttggtaataactctaccaaatttcgttacctttgacaacgatttgatatatcaaaaccgtttcctcccaaaccctaacgattatggttcttctccttctctctctttttctcttttataaaacgaaaaagggctaagtaaagccctaatttcgagtttcattcttttataggcacactctaggctttccaattaactcaactgattaaaccggacgatttaaatacaaaccctaaccgattttccggttcacgagcgttacaattctctcccactaacatagattcgtcctcgaatctagcttctcccttccactccgaggaactccgtgcaaccatcactacggtccgcactccctccaacccgacccctctaggtctctctatccagtcgttatactcacgatttactagtcattgttgcttacaactcactctccactctcagaccgcaatcttcgagcataaaccgtcactctcaggcctcggcctacggtatcttggatatcacacgtattatcttccccactcaaagtcaaaccctgatttgtgtcggctcactctcagccacaaagtcatcgagttacgatacttggagaaaatagtacctcaaaactcgctctcggatcgtcacccgaagccaccgttcccctcgcactctaaagacaccaagtccctcaagttactggtacctcaggagcataaaccgctcctcacaagtcgttgggaccctcatgttcctcgagcaaacaatactaaacgcttccgagcatatctccagactctctcatggattcgcgtaagacacctttatgcctcaccatccatcatatcccctcgagaacatccttatgaccaacccccgaccatctcgtaaacacacctctctcttaggttgtttactcaaactttccaaaaatagacaagtcctttcttggaaactttccatttttggaaaccgcacaacacattcttaaataagacaactcaagtcaaatataagaagaaaaaaatacccatcttataaatcatcaaatgtcataatcgttacaactccaaacgaaaatacaaatgaaagagaaataagaacaacaactcagaagctcaaaaactcaacaacactaaaactggaaaccaaggaaaggcaaactcatgcagcaacctgcttctcgaaccacttcttgaaccttgccttcatcctcgcctttggctcccaaatctcctctgtcacaccatcgcagtcccacagaactttgatcaaaggaatcttcttccgccgaagttctttgatcctcctctcgataaccctcactggtctcgcctccaaagtcatgttgggctgaagatcctttggaatcttagccaacacctcatcatccttgtgaagacacttcctcagcatcgacacatgaaagaccttgtgaaacgcaagcataacatttgacaactctaacctgtatgccactggtcccaccctctcaacaatcctgaacggacccatgtaccttggactcaacttagtgtctgagatagacctgttcggacctcgcaacatggccatcttgagatacactctatccccaacctcaaactcaagctctctcctcctcttgtcagcataattccgctgtcgatcctgagcttccttcatgttgagcttaagaacccagatcctctttgtggtctcttgaacataagctgcaccatatatgctcctctcccccacttgggtcagcataacggtgtccagcatggcctcccgtacaacgcctcgaaaggagccatcccaatactcgcctgatagctgttgttataagcaaactcaagtgatccgcccaatgacctccccaatccaagacacatatccgcaacatatcctcaagcgtctggatagtcctctcagattgcccatctgtctgaggatgataagccgtgctcatttgcattagtgcccatctctgcctgaaaggctgtcaaaaacgcataattaaaattggattccctgtctgacacaatattcaaaggtactccatgcaacttcacgatctcgctcacatatttcttagccaacaccgccgttccatcggtttttctgatggccagaaaatatgctgacttaatcagacggtccacgatcacccaaatagcaactttggttcgcgacacaggcaacccaaccacgaaatccatcgtgataaaatctcacttccactcaggaatgggtaaactctgcaacaggccaccctgcacctgatgctcagccttaactaactggcaaacatcgcactctgcgatccaattagctacatccctcttcattccgacccattgatagtaccgtttgaggtctcagtacatcttagtcgctcctggatgaatggaaaacatgctcgcatgagcctcactcaagatctcccgtcgcaactcctcatcctttggcacacaaactcgcccatgcacaaggatagtcccattagctgcaaaatgatactcagagccctctgccttagaagctgtaatcaacccatcatccttctcctgagccaaccgaactctactcagaagatctgctcgatccacagcttccaatcccaatggctcccgtgccacagcacacaaccgcaaaacaccaatctcacttaccaaggcatcaacactctgtcctggtgccgcacccgtgcttacggctcaatgcgtctgcaaccacattagccttattaggataataggttatctccagatcataatcagccactagctccatccatctgcctcaggttcagccatggctgagtgaagatatacttcagactcttatgatccgtgaacacctgcactttcccacgataaatataagacctccaaatcttcaaggcaaagattaccgcaaccatctccaaatcgtgagtaggatagttgccctcatgcttcctcaactgccgcgatgcataggcaataaccttcccacgctgcatcagaacacaacccaaaccaactctcgaggcatcagtataaaccatgtaagactctccatgctctggcaatgctaacactggtgtactcgtcaacatctccttcaggctcacgaaaccctcctcgcaccccggtgaccacacaaaaggaacatccttccctgtcagcttagttatcggttgtgccatactcgcaaaccccttgacgaatctcctgtaataccctgctagcccaaaaaaacttctgatctcagtggcattcatcggtctaggccagtctctgatagcctcaatcttctctggatccactgaaactccctctactgaaataatgtggcccagaaaacccatctctgtctgccaaaaacagcacttgctcaacttagcgaacagtttctactcccgtagcttctccatcactcttctaatatgtacctcatgctcctcaggactcttagaatacacctgaatgtcatcaacaaagatgacctcaaactcatccaaaaactcctaaaacacgctgttcatcaacctcatgaacgctgtaggtgctttagtcaaaccgaaaggcatcaccacgaactcaaaatgtacatatctcgttctgaaagcagtcttgcgaatatcgacctccgctatcgggatctagtgataacccgacgttaaatcaatttttgagaaacaagtaacacccctcaactgatccaacaacttatcgatccttggcaaagagtacttgttcttcacagtggcccggttcaacccctggtagtcaatacataagcggaaactcccgtctttcttcttcacaaataacaccggcgttccccaaggtgaagtactaggacgaatgaatcccttacccaacaaatcctctacctgcttcttcagctctgccatctttgctggagccatcatgtagggtgccttagacaacggcgctgtccctggttccaactcaatcgtgaaagaatcagaccgtgatggtggtaatctctgcaacgattgaaacacatcctcgaactcctcaacaacccgaatgtcgctcactactacctgccccacagactccggcatagatatcgtcaccaggtaagcctcgcagcccttctcgatcattttctctgcctgcactgttgagatgaggagactccctgaggtaggtctcactccctgataaaccaacctcccttctggccgctcaaaagaaactctcccacggtggcagtcaagatgtactctgtaatgataaaaccaatccattcccagaataacatcatacaactctacatggttgataatcagatctgctggcatcaaatccccttcaatttgaatatccacacccttaactctccccaaaaccgctagaaactgccctccaacaactttgacagctccaaactgctcaccaggatccccacgaatgttaccgcgcgaggcactctccggggtattgaagcaatgcgatgctctagagtcaaacatcacatgagcctctacaccacccactaataaagtccctacacaaacctcatgtgctaagaaccttaacattcatcacaaaacaatgatatctaaaaacaacagaaataattcacaaagtctgagtctcagaaatcatacctgtgatcgctctgttgctgataccgcctatctcacgcgtagtgtaaccatgcggtgccgctgcaatatgtgctaactgctgcactttttgctgcactccctactgcacctgcactccctactgcactgccggctgtacaattgccactaccatccgctgtaatttagggcaattcggccggagatgtctccctccctgcagtggtaacactccctcgtctcagctcgctgcgtgcaatccgctaccttgtggtcaagactcccacaagaaaaacatcctgcacgaccaccttgtctagctctggaaggatgatcccacctcctcttctgcccctgcgtatgcttgccgcccttgctaaatgccacctgctgctgagtcttcttcgtctgtaccgctggactcactgccaccaccagtgcaccagtgccgccttcgtggcgtactgcgacactctacaccgtaccctcaaatcaggtcgaagtctcctcaagaacctcctcatctgagcctggtcatcctccatgccccgagccgcatacaccaaatatcggttatactcccaaaccgaccgctcaccctgtgccagctcaagaaaacgcgcctccatacggtcgagcgcctcctgcggaaagtacttggcattaaactcagccccaaaatctgtacaagacatatccgcctgcctcctctttgcagtcacacccgatactccacctggcatcagctcgtaccaaagttccgctcaacccgcgacctccaattgtcggcctcctcaggactagtaccaccataaaaatacccggtgccaattctctgcaactgctccatcatcctcaaataagatggaacctcctcagcaagcgcagccctctgctgcacctccgccactcgtggcgcaactggagcctgcactggtaccatacctggtaaccgctccaacaactgctcagcaggcccgccaaaccaacctctggaacttgggtttctccggctgcggcacccatcactcctgggtcgttagcaccaacaacatggacacaagcaccaacaccagctccaccagcccccactctggctgcaccagctatatcggcaccaagactttccccagccccgggctccacaaactcaggctgcgaacccacagtctgctcaactgtggcactatggccatcactctcgccataacaattggctaaacactccataatcaatcctcaatatgctaacatcctatcttctcccacatcaatcattaggaaaataatttatcaattaatttttctacacatcctagaaccgtaatcgctctgataccaaattgaaacaacccgacccgtttttcttaaaacataattaaatattcccataaatatttaattaaaccaaccaataaagcaacaattaaaccgcaagtcaaaaaatactattttatgaataaataaataattcaaccaacaaaaccaagaatgaataacaattctaacacaaccctaaccggttctaataaccaaaacactaaaataaaccaaatgagttcctagatcatcctctcttccttgccatgatttcacgatcatactttatctttacctgcaccaaaaagaaagagatgcgtaagtattatcactaatacttagtgaggcgatcctctcatctacgagctatacacacaagcaaaaaaagggatataatcacaaatacaatataaacaaaccagtcattgaacaattcacccaaaaacatattcactgcacctacatatcatcacacaaaacaaattatacaatccaatcgctcagataagctcatggtcacgcactcaccttaacaaattgattctaacaacaattaaacccaggagagactctccttgcgtctgaaacagtccaaaaacgtcctacaacaagtcacaaccaaaagcaaccttgaagcaaactggacatgaaaaacagaaacaaacagtctcaaagacgaaaccctaaaatacaaaccaatcgttaactatcaaatccctccggtgaaacgctagccttagacgtcacaaaatttcgtgccgatcggaaaccagacgaaaccacgatttcagttacaatccccacttgtgctaattcgcgtctgagaaaacgtgtctcaccaaactgcaaataactcaacgaatataaatccgaatccaattctgtaaaatggagaatgacgataaaagacttggtaataactgtaccaaatttcgttacctttgacaacgatttgatatgtcaaaatcgttttttcccaaaccctaatgactctggttcttctccttctctctttttttcctttataaaacgaaaagtggctaactaaagccctaatttcgagtttccttcttttataggcacactctagggtttccaattaatccaaccgattaaaccggatgatttaaatacaaaccctaaccgattttccggttcacggacgttacactaactaataactaatctatcctttcacatttacattttacactctctttccctcagtcggaaaattcagtttctatgaaaagggaaacaatggacactaggcggcaaagatatgtatgatgcttccaaaattatgtttctgaatcatcttaaacagtatcaaattttttgtttagttaaaatgatgtagaaaacatttaggagtttcatctataaaatgttaggcttttacgagtgtataaagagcggattttaaagatttattatattgcatgttaggaatccgtttgaaaaataagttcatttccactttttcatcgaaattgtgttcaatttactttatttgtctcaataattatatttgaatggttgtaatataagtgatttgccgtggaaaaaaacctattattcgttgattttgaaaatacaaatctttagaatatgtttgtgtctcactcaagttatttgggttataaattacatatcgtatatgccatagcagtatagaaaattatttcgttataaaaagataatggcatcacaaggctctgtacaaatatctgttacttgcccatacatgttactgccttgataaaacaagtacttgtcgttggtaagccggataacaggtactcaaaatatattattatcaagcacaagtcttaccttgcttctttgacttgttacttgctttaatatagaaggggttttaagaacttatttgaatttatatatttatagtttataacttataaaagccaaactgaaaagatataaaaaaacttggaattatgaatgttttaagatttatattgtaggatattgtttttatatttaaatagcaagtatcttaaaagtaacaagccggatcaagttagtcgacaagtaacaaagggaatcgagttacttgcaagtaataagattatggacgagagcttgatagagaaagtacttgcttcagatgaagacgagtcataaatacttgaaaattagcaagtatttgccttgtgccaaataatacatcaattgaattaatactctaaataaagggcagtaaaatatgcaaaatgactatattattttgtttataaaaggttaagttagagcaatgtccaaaattatattagagcattttaaaatttttataaagtaattgaaaaaaaaaaaaaaagattgttatttattttgaaagattgttttattggaaataaatagtacagtagaaactctataaattaatactcgataaattaataaataagataaattaataaattttatcggtcccaagtcgggccaatgtaaaaattaaccaaaatcgataagataataagataataatttttttgaaatctctatgtaaaattatagtcccaataatattataaattaataatcatagatcttaagtatatatttgaagattcatttttatatgaaatttttgttcaagttacaattacaactttttaaaaaatacaactagtatgatctctgttgtactcacataactatttgcatatttgatccgtcatagttgattttgtaaaatcttttatttgagaaagcattgctaagatttgtgtaaagagaaattagattaagcttcatgtttacgttcacgttaatgtcgtagatatatatacacaatatcttgccgaaaaataaattaaaaaagtcaaagaaaaataaaaatctaacataagtatatatgcagacaacaaaacatatagaaaattaaattaataacattttaaaagaatatagtattgtatttacgtaaatatatctataaattaatatttattaacttatacgataaattaataaatattaatttataggatacattaatatcactataaattaataaaattgcatggtcccaacattattaatttatagagtttctactgtagtacaatagtaatatctataaattaatatttattaacttatacgataaattaataaatattaatttataggatacattaatatcactataaattaataaaattgcatggtcccaacattattaatttatagagtttctactgtagtacaatagtaattcctttcgactatgaaccggcgctcttcaccatacgatttggggtcactttcctaataaaactataaatattttattttagaaatcttttattcatagtatgtatgactagaagttacaaatataaattaatgctatttttttttataaaatagacagttttgcatttaattactcttttttttggacaaaaacatacttgattccattaaaccataacaagtatattgtttaaacaaacatcaacctcaaggttgggaacaaggataaatataagcactcttacaagcggaagacaaaagaaatttaaacgataattcgacagaagatccaaacatcagagaaaagaacttgattgtagcttgccacaagcgagagattggtgagtcgaagacaattccaggaagatttcgatagattgatgattggtcacgttccaacaaatgcatagtgacgttgaaagggaggtcttaaccatagatattctcggattggtacacgcaacttctaagaagatggttaatgtccatagatggttttgcaacaaagtggtctgaaaccaagcaaaggttttctctattaaagacgaaggttgtatcacaggtttcttagatggattaacacgattgacaacattaaagatatctttcaccaggattattagatgaatttgaacaagcctatttatcaatgtcaaaacaatgcaagaatggagtccacgaccattcttctcagcagagttaggtgacttaaataagcatttaattactatatgttagtttcttaatcatgatcaactaattcgggttcaaagacggaaacgtattgcgtatcaaaaagcccatgcaccatagcgtcatagcgacatagatatatataatcttcgttcactaggcgagtcaacattatacactacaagagtttgccatttctcggaggtaccaagtggcgaacagctcctgatgaaggagacctatcacctatgtgtagctgctagcgttgaatgacacgcagttatctataccagatttgctgattgtctcctagcagtaatcgtcgaagatgagtgatgaccaagcaacaagatgcacgttgtacttccaaatggagtgtcttgtgatgatgaccagaagagatcatattcatatcacatgttcatggatctactccgtttctgtagtttttaaatgttaaaattcaaccgagcactaatatattttgaactatttatgactaaaataacaaagtctcttgcccaaggtgtgtgtgccattgttgaggatttatcaattaacttattatcattaaaaatagaaattaagactaatgttctgttaatgtttttgttgcatcacaagttcaccacttaattcaaatccgcatattcatgttttagaagaaataaatagttatatatatctttagttatatttgataaaatgtattgataaaataattgtttgtgaattgcgaaaaaatgatggaagttttttcctccactttctgactaaaattttaaataatgtttcgattccagagataagttaaattctcagaatttttcgacatggtgtagattgatcatagtagtctcatgttctaaaaataaaagatatccattttggtgaactttagtcgcgtgtttgaaattagagccggtcatctgagtctaaaggctaaaataattaattttataaaattagaaacgacttgtagaagaaaaaatcgaacttggtacttagacaccaatttgaaagaccacttttactcactataacaactttttgtcaattccataattgtttgtaccgaagtcgtaacaacgaataagtaaagaattttcggggagacgaaatatcttttcttagctgacgaacgagaacggtaaacaacagaccgatcgaatagttacaagtaatttctatcgatcggcaacgtaacatgactcgaattgagaacaaaacgaaccgtcaactgaaacgaaccgagaacaaaaacaaaccgagaacaaaacgaactgagaacaataacaaaccgagaacaaaaacgaactgaatgacaatgcgttttagtccaaatataactctgattctctgagtatcatcttgtgtgccactatttcggaaatagtgctttatttataggacaagctttctgactttcttcggcaaattaccgttttgcccttcaggtttagtggactgatttggtggagaaattgctcattaaactcttaaatattagtttgggccaaataatatggagagggtgaagcccatgtccaacaataagccccccctagttcatcagacgagaattttgttgagtctggtgagcgtgtttcttgagtcggaatatgtcgatttggtcttaaacagagattacgccgtaaatatatttttttgaattttatgccttgtgcacgtttttctaggagcacggaactctgatgatttatgtcgtggatacgctttctccagagtgcataatttttttcggtggacaatatcccaagaatttttactgtagataatttcttcactatatatatctcatccttttcacttctcaccatttcaccaaaaggtaaatcatctttttctctcttctttatctctttctttccttcttgcgattggttgtggttcgtttcctccttagttcggcgaagcttgattcaaactgtggttcagcttgaatttcggatttggtgtgatttgttgagacattgatttgatgaggctggtttggcaaagcgttggtttgcagcggctggttcgttgagatggagactttgatttggaggttcaattgccgttcggtttgaagaggaggagcttcgttcggtttacagcggcttggttcggtgaaatccttgttcagcgaggagaagaagcgtgcggatcggttcggcgagagggagaagcttgaatcggtgaggagcttgcttggtgatctttagttcgggcctaaggtcttggtttggcgagaaggagaagtttgcggttcgatcggggagcttgtatcggctagttcggtgagaagaggagaaagagctggttcggttcggcgagaagggggaacttgaattggcggcaaaatttgacaatctatttggactctcttggttcggtgataagaggaggagtaagcctggttaagaggaggaggaggaagcttggttcggtgagaagtgagaagaaggaaccggtttggtgagaagaggaagaaacctaccggttcagccaaagaagaaggaaaccggttcggtgagaggaagagatttgcggttcggtttggtaggacaaccggtctggtttgggacgatggaccgtagttggtttgatttgaatggttatggaactaaccaagatgcttatcacgtgataaatgacggtttgtcgattgaagattttgaagggcgtgatttagctggttttctggcgaagttgatgatgggaatttgggagacattgaggcttttttaaatgtaaatcatgcggttataagtcatggtatcgtaaagactatgagtcagcttgaagattaccgtagagaaatggagtctagagaggttgatgaagatgacatcgtcgttaacgctcaacatagatctattgtcgcgggacttcgttctctaagatgggctcctattggtgatgagtccatgatcgttcctgatccgcgggatgacggaccaacgttacgcaatagaaagagattgactaacttgattgaccaatccatttttcccaaaggtttgacagtagtggtaccaaaaccgcatcaacgtccttggagacctcctcagggattcttctgtatgtatgaagattattttacagatgttgggcttcgctttcttctccccgattttctcgtgcgatattgtcttcgatggaagattgcgttttctctaactcgctcttgctgcagttcgctatgcagttggcttgatgatgttgggagccgactgtggagttgagatcgatgcggacattttcgaagaggctacgacctttgctgttccaaaagataatccgggattatgtcgagtgaatgccagaccttaccataaggtcgttaaagggatgaagagtaaagttcaggattggcggcactactacattttcgtggagttatccgagatttatgtttcggatcgtgacgttttttttatttccgagtggaatatgtttcacgttagatctttttagttatgctcatgggactgttgtgaatgctactttcttaccgcatttttgtttgttcgcagcgcatgattttcgacctagaggagcatttggagggatatcagcgagccttgctgctgttaggacgagagatcgtttgcattggccagacgttatcgactcatttgattttgtaagttcattgaaaatcttgttcgttagtccgattgtcttgatacgtttttttatggagactgaattgcagattcgccgtcaagttcagagatgggaaaagctagtcgccagattccgatttacgtcgatacgttcggagaagatagttcggtagagacggatgtcaatgtatccgccgttgtaaccgaacaacaacaggtggtgacaaaggtttcagagagtggtgtgatcgagactaaccgccgggctgctagcgaggataggatgacgcgactttcagatgctcaagctaggaagaaagcttcaggttctgttagtgaggatagggcgaggcagctttagaacgttcgtgccgggaagaaagcttcgggttctgttagtaaagatagagctattttccgtgagccatcgagtgttgacgtttcctcgcggaggctctactcaagatattcgggaggtcgatcactccttttctttcaattatgatagaaaaggttatccatttccagacagcagaagttattgcggcgagtttgctagaaaagttatcgggtcgtctcgtgagttccctcccgttgaatcccctatagcaaaaaatctctaccaaatttgggcttgtaaggaggttcaggtatgtttatcctatgtttctcgctttgtcgcgtttatcgtgttctgttatgataactttttgttctcttttttatctgttatcagtcgattaccaccggaaatgcattatacaattttctcgaggaacaggcgagagaggtgagggaggaaacggtggccgttcagaaaaacgaaagaccgcggaatttattgcagcaactcgtttgtgtaacttgaactcacagagctcttggaaagtctcaaaaagtcggataattttagtcgagctgagcaatcaaggttgagaagttcccttgacgatgctcttcgtactgctcgttccgaatggagccgctttaaagatgatgttgctatttataaagccaggatcgatcggctaaagaagcatatgcttgacaaacgtgttgcagacgaatctcttttcatgcaatgccaagccgtaggttctcggaaactcttgaagaaattgatcaaaaacggtaccgcaatcctaagggagactatgtgcgagcttaaggttgacaaaaacaattggcgcgaagtggtcgatgctcttgagattaccgatcttcttgatgatgacctcgtggcctttccagagtttgaggacgaggcatcgatgacgacagctgagggcgaagcaaggattggtggtacttaggtcgttgtgaccttccaaagtggcatgaggatgggggtcgcttttatgctatttgttttatctctttcggtatcgtaaactttgttcggcatttttttttgttatagatgtgcccgcgaagggttgcctacgtaccctttagaagggatcaagcaatccgtagttcgatacggtaaaggttgttacagaatttttattttggaatgcggaatgatgcagatggtggtgatagtgtgccgcggtagtgatgcggagcggtacaatagtagtagcgtttacggttggacgagttccaagagcaaggaattgaagtaccgtccatggttaacaattgatagacgcctgatttgacgactttggagattagataagggccttcccagtgagcgcctaacttgcgagcatttatctcggtggtattttcaaacaccttgcagagaacgagatcaccttcgacaaagtagcgggatttcaccttcttgttgtaaaattttgctgcggcctgctggtagtttaggatgcgaaggagagtcaggtaacgttattcttcaacggtgtcgaggttggcgagaaatatcttatcgtttatggcagattgtggacaagcatagaaggtcagatcatggggagaccaacttccgatggtcccatggctttcataccataagcaagggagaaggcgtttgaccaatagatcgccgaggagaggtacgatgtcatcgtaagacaccgtcgagtttgtctgcccatgcatccttcttttcttcgaggcgattctttagtccatcaatgatagttttgtttgtggcgtcagcctgtctgttgccttgcgagtaacgaggtgtagacgtactcgccgaattctcaattttgcacagaagccctcgaattgaagtgaagtgaactgagagccattatcggtaacgatttcgtacggaaggccatggcggcaaataatttttttccaaacaaaattttggacgtccttcggttggattcgggcatatgactctgcctcgacccacttagtgaaatagtcggtcatgacgagaaggtatttcttttggcaggatgcatgaagaggtccgacgatatccatcgtccaacgcataaacgggtaaggaggcgcaatagtttgcaggagctctgtcggtgcgtgaataataggtgcatgcgtttgacactttttgcatttagcgacaaacttattgcaatcagagagcatggtgggccaataatggccatgtttgcgtacgcaaagtgctaaagcacgaccttctcaatggttcctaccagcgccttcgtgaatttcacgcataacttgtaatgtttcgtcaccgacaagataggagagaagtaccccaacagcattccaacgatggagattgtcatccaacgatgtatactgcacgctgcgggcatgtaaccgtcgggctgcccacttatctgtcaggattatgcaatctgcgatatagtttcttatttcattgcgccaatcttgaataacaagatcgtctgtggttggggcgttcgtgcaggctgtgttatcgcagaaacgttgggtggtgctgaagaagttgaggcgagtgtattgacgattaagtagattgtcagcagcctgggcaaatccatagttggcgcattttgcatgcttgtagagagagaaagatcaatactaggttgatcgatgctctcgacaggtataatacgactgagaactggataagatgtcaaagcaagtacagcgagcgcgtcagcggacgcattagcgcttcttaggatcttattgagttcaaagagcttaaaactgtgggacagatcgcgaaccaccttgagataggcatccatttgttcatttttttgcctcgtaatcgctttgtattcagctttgttattggaggctggaaatgcgagtctgaaaaattgttctagcccctctcttgtaggagattccaatcgtacgccgactcctgctccttgtcgggaagaagcgccatcaacgtgcaatatccatttctctaacggggtgtattctagtgattttataaccattgggttgaagcttgattataaaatcagcgagtacctgtgatttcgctcatgttcggtttttgtatgtaagatcgtatttgcttagctcgaccgcccattttgctaatcggccagattggctcggactgtgcaagatcgtccgcagaggctagttagtcaaaatttgcaaactgagatggttacggcataagcaagcttctccagtgtagggtatcgcagattgattagcgtagagatctgttttgggtttgtttctattccctgttgggtgacaagatatccgaggaattctccggaagtcacaccgaaagtgcatttggccgggttcaacttcatattgtatttgttcaagacgtcgaagcattattgcaagtgagagacgtgttccgcatcacaggttgattacaagcatgttgcccccgaaaggcatcaccttgtaacaaaatgtctctcgatctgtaatgaacaccgtcttttttttatcattcttgtgcataagtatttggttataacccggaaaagcatcgatgaaagacagtaattcgttaccggcggtagcttcaacgaggtggtcaataccaggaggagaaaactatctttcggacatactttgttgagatcagtgaagtcgatgcaaactcgccacttgccattttttttcttcacaacaacatgattgcttagccaatcgggatacttcaacaattgatcctacctcgagtagttccaaaccaagttgcgtcgtttttgtttgatcggtttgaatgtggaatcaacgttaagttcatggcaggtaatatccggtgtgacacccgtcatatcttccattgaccatgcgaaggtcatgacattctagcttagaaactgtacaagatcgtctttcaattgttgtggtagatcagcgcccataccaacacattgaagaaggtcagttgcaacaatgttaacttggattaccgactcagtcctcgggactatgcgttcatctcgtaaaggaccagtttgaccttcgttatgtgtctgacacgaacttccgagatgcgtaccgtgaaaggtaattgttgtgtttcttcaaatactttttctagttccggagcaaagctaatggcacggtgcattttggattacatggctttgatgaccatgttcatgcgctcgatttccaggtcgcgtgtttggtcgacgttatcggaaggtcggttcaacaaactttggctgctcggtaggatgcggttgttcggtaggctctcatgaggttgcccgccaacagattctacgataactgatgtcggtctttgtcgtcggttttgagaacgttccgcacctggagtttggggagatggcaatagttcgtgatcatcgcgaggctgagagtcacgtcttcggtgtcgtaggcgctcgatctgactttgggaagcaatttgcgttgcgacaaggacatcaatttgttttgagaacgttccgcacctggagtttggggagatggcttcgtgatcatcgcgaggctgagagtcacgtcttcggtgtcgtaggcgctcgatctgactttgggaagcaatttgcgttgcaacaaggacatcaatttgtttggtcgttcgtacgtcccgaccatcgagtcaatccaagattgtttgcacgaggtcatccagatggaaacccttgttcgcaggtgcagtgtcgccgccaagcgcggtgtctcccactgctgctgctactgcggcagggcgtggtttggcatgtgcgggattcaagccaggttgagcgagtgttgggttctctggttgcagttgcattgcgtcaggtgctggctgttgttggctggcgtcggacccgtttttacttgatgtgtctatcatgtcctcttctgttttgtggatcgctggggacaattatgttactcgttctcattcggtgaaaagaaaagttttgaacttgccctacgataggcgccaattgtttgtaccgaggttgtaactacgaataagtaaggtaaatttctatcgatcgatcgatcgaataatttcacgtaatttctatcgatcggcaacgtaacacgactcaaattgagaataaaacgaaccgtgaactgaaacgaaccgagaacaaaaacgaaccgagaacaaaacgaacggagaacaaaaacgaaccgaatgacaatgcgttttagtccgaatattgctttgattctctaggtattatcttgtgtgcaattatttcgcaaataatgctttatttataggacaagctttctgacctaaagattcttctgttccttcagcaaattaccgttttacccttcacgtttagtgggctgatttggtggagaaattgcccattaaactcttaaatatttgtttggccaaataatatgaagagggtgaagcccatgtccaacaataatggatgaaatacatcatatattttggcctagagatcaaagatcgatcctctggttttaagttcaagttttagtagaaccatctattgtggaattgtcaagattcacaactttctgtagaccagttttttagtgttgcaaaagttaacactagtttatcgtgaataataaaataataattcataatagattaaaatttaatgataatataatatatatatatatatatatatattgaaaagttgtgatccaaactcaaaggagttgattgacgtttcttatataattagattggtgccacaaaaatggcgcaagtagcgtattttcttgattctaaactagttagtctaaattaaatataacactattttaggaaatttttctatattattatttctacttgtctataaaaatattaaaacatgtgattccaaattattaaattatattcaaagtatatgaatttaggcagaaatgatttttttttttaattcgatataagtctcttttaaaactttttataacatctgtatttatgtaaacaaaacttatgccattcaatgtgattaatgcattttgtgacttttcatttaaaacctaaaatttcaaacaaaaacatattaagagaatataaatatatgatatattgatttttggcaaaggaaaatttgatgtctaagaacatactgctttttattttttctcaatgaacaaatcattttaggttactaatttgttccaaggcacaaactctaaattacttcctctgttcctttttaattgattttctagaaaaacagaaaaataaagaaaccatattaaaactaattataaatatattattttttgtgatttatatttttttagaattgtaagccaataatattcaattatttgtcttaaagtttaaaattcatcaataataactaataaatagtgcatataaaacataaaaaatcaattttgttgaaacaaatttttttttctagaaaataaattaaaaaggaacagagtaagtatatattctgttctatctgcactggcatcaattaaatgactgtatcattattaatttttgtgactcatttttaacatgtaatcaataattgagtattatgactccaaaaaatcaataattgagtattaattagctgtacatttaattttcaaagctttatgcaagcaatataagcacataaaatatcattttaaggaagaaagttaatattaggccttatttttttctatataatttgataataactttttttagtttcatgacattaatgtgattttcaaactctaaagatattataccaaaaatgcataaataagcttaattaagaccgttaaatatttggactaataaataggataaatagcctatttcttatcaaatgtgtaaatgccagctaaacaaacccttataaaagaatgtgggtttgagttatagtttgaacacaaattgtcttacaatctaggatttaagccgacagtttttgcaagaaaggtttttctccaaataaaatcacaaaattgttatcatagcataagtagagtactatagcgatggagaaagatcattctagcctcttctactatgatcaatactccaaattttctcgatcttcgcaaggttgtcgatctttgaataagttttctcgcttcaataactttcgtactagtgcttgtttctttgatgcttctaaacccaaatcagatgtccaaccattcaagaaaattcgttatagttctgaacatggttgtttgaccatgagttttgattccccttcttcatgtccttcaacctcatttttatgtgatttatcacaaaatctagttcgtggcaatgctcatatcccaaagttttatacaagggatctcatttcaaccattggaagtcgtgaccactactcggtagatcttattccaaagtttggggaaaacacttccatcatgaaagattttaaagattgggggactgatttgtctcttcagatgtaatcttgtttctaagaaataatagcttttttagtttttattcctatcatgttcttcttttgtaacattatttataataataaaaatttgcttctttcaagtacttaagttaaacatcacctagaagcctttataatataaaatttttatttacgatgttagataatagtgtccagtataatctttataaattaatacctcgataaatatttacattatttttttaattactccgaatacgttttttggatcaaataatatagtaataactttatactttcatcaaatatcatagcccattgttattaatttatagaggtttgattgtatatgtacatatttatgatactgattcattatattttttcctctatgtcagtgtaagtgttgtataatgatttttcccacatattaaaaatacattaaaatttattaattttctatatacttttctttttcttattaatacattaaagtgataagataaatttggaactttgcctaaacttgaatatggaagatcttaaacaatactgaatataaaatggagggtgtaccaatttataaaagctattactatgttataaatgttttcctcataatgttcatgaaggattaatctatatatatatataataaatataatttatatcgatattattaaaattctaaataataataaataattttattaatatttaatttaatattttttcaaaccaaatttcaatcttacacattcaattttttatacactttatattccaagtgtattcagtgtcattaaatactacctattgaaaatctaatttaaatgtaaacataaactggtgtacgtaaaaaaatcaaacagtatagatttcaaaagaattatatttaattgagaaaaagtaaagtcctacccgctctctggctctctgtcgcacaacttccttcgcacggcagccctccgccgcctaatgggctctccactgccttcggtggggactccgtcctcttccgttcaaccctctcagacttcttagccttctcagacagcctcacatgttcgaagtagtgactgggtctctaaggtaaaaggccatcctatgtctatctctgattttcagcctgatttttgtgtgaaaaacggagctgcaagtgttactatccctcccgaagtcgtaacgaattcagtgtcattgtggaagtgttttgtggttggttttttcatgggggatgccccacatgttggatctgtgcacgctactgtaaaccgaatctggactgtccttgaaaaatcttcaaagattgatgtttaattcttaaacaagactactgttttgtttagaatagaaagtgagaggattagagaccatgttctgaaacgctgctactggcatattgcgaacattcccttggtaatcaatgagtggaacccaacgtctgctaatgcactgccggatctttcagcgatgccattgtgggtggatttgaaagaagttccagcgcatctctactcccatgaaggcttgagttttctctctagcacgactgggaaatttgtcaagcttcatcctaatactgaacgatgtttaaggttggatgtggctagaattctagtagaggtgaacctgcagaagcctttggttgaacgtatatgtttttcagatgagtcggggaatgaaacaacagttcatgttgaaaaagtcaacaaaaatccagttaaggcagtcgaggtattgatagcagcagtgacatcagaggtacatgatagttctgacaaatctggccagtggactgaggtgcctcgcaaaagcccgcatacatctcccagtcgggacagtggtaagaaagaacaaagtcatggagtcattttctctaattgttttgaggctcttggtagcatcggagaagagggtaaagcttgagagaaacagtgaagaaggtgtagtgaacgtctgtcatccaagaagaaggggagctggttgaatctggctctgaagatgatgcaactgtaaaagtagtagcggatgatggattaggggaagaccaaggaaaagagtttaccaagaaggttcattcgggtgtcggacgacacagaaatcgctcttgtggccctcctaagcctatagtgaatagaaaggatccaaaaacaacaaaatccactttctcacggaagtaatgtcgtcctttttctcttggaacacgcgggggttcaatcaacctcgcaagcataatattgttcgcagttggattcaagcagttcgtccttcttttggtagtttcctcgagacaagagttcaggaaaccaactctctatcggttttacaatctattttacctggatggtcatacctcacaaactatgatcaccaccggctaggtcgtacctgggtagattcttctgatgttgtggtaatgactctcctcacaaagagttctcagcacatcacttgttctgtccaaattgtgggtacgagggagcaatttatttgttctttcgtctacgcatctaattttccttcagaaagacgtattttatggggggacttgtgtcaacttcgttctgctcttattcccccaacaacttcatggattgtctctggagatttaaatgaagtgttatctttctctgaccactcacgtgtgatggatttttctctcaatgattcggggatgagagacttccagaatgtagtgtcttactgtgatttggctgaccttcattcttcggggccaacttttacctggacaaataatcaagaggagaaccctattgggaaaaaacttgatagagctctgataaatccaatatggttatccactttcctttactcttatgcggcctttgaagcaggaggcatctccgatcattcccggtgtgtagttcatctctcttctccgcttttttaacttcctggcaagtcaccaacagtttctttccacagtggcgcaagtctggtatgccactccttcgcttttccattttcgagtggccatgtctctgatccataaaaaattaaagagcttaaaagttcaccttagagagttgaaccggactcagtatggggacctgcctcaaaagacaaaagacgcttacgggaccttctgcactttacaaactgaaactttacatgatccttccccgagcaatgtggcagcagttaaagaggcctcagaccgctggcacactctagcaagcctcaaaccttgaagaaagtttcttcaaacaaaaatcttgtgtgaactagctgagatgcgggttccaaaacacttcgtattttcaccgggttgctcaagccaatgcttcccgtaatgctatcaagtcgctcacgacggtttctggagaagtttgcacaaatccagaagctatcaaagcggaggctgctcgccacttttgaactttcttcaatcaagaagatcccagtttatccacgtctcgccggacctcctctcagatctaatggactatcgttgtgcgccagaaacttgtacaatgcttgttgccccagtcacagagattgaaatccgacaagcccttctgtctcttcccttgggtaaagcgtcgggtcctgatggttacactaaagaattctatgttgccgcatggagtgtcataggtccagattttattgtgccgatttaatctttcttcctctttagcctcatgccaaaaactgtgaatgcaacattattggctctaatccccaaaaatccagactccaattcagccacaatgagggactacaaacctattgcatgttataatgtctatacaaagtaatatcaaatatcttagcgaaccgtttgaagcatatgctctctgagtttattgagttaaatcagagtgcttttgtaaaagggaggctttttctggaaaaatgccttttggcgaccgagcttgttaaggattaccataaggagtccatttctagtcgatgtgcagttaaattcgatatctcaaagttgttcgacacagctcaatggtctttcatcttgtcggtgtttaaagcttttgggtttccggatttgttcatacactggatttacacttgtatatctacagcttatttctcagtgatgatcaatagagagctggaaggtttcttcgggagtagcaggggtattcgccaaggctgctctctctccttatttgtttgtcatggttcaaaatgttctctcctgtcttctgaatcgggcagctaacaatggacgaattggtaaacaccctcgttgtgtcacttacttaagctttgcggatgacattttggtctttacggatggttctccgagctctattcttcaaacaatccaggtctttgatgacttctcaaagatatcggggttgcgtataaatacaaataaatcatcgatgttagtgggaggacgtgggtaacaagtcactgtagcaactgcgcctcaagttgggatacaagtggaaacgcttcccatcagctattggggacttcctttaaccactaagtctatgacggctcatgattacaagccccttatatacaagatacgcacacggtttttatcttggacgagtaagtatctttcttatgcggaaagactccaacttctttcctcggttatcactagcattactagcttctggtgttctgttttccggttactggctcgctgtttcgatgaaattgagaaactccgtagtgcattactatggaatgggaacccaaatataaccactggctccaaggtctcttgggaggagatttgcaggcccaaatcagtgggtggtttaggtttgcggagacttaaagaggtttcaagggtttatgcttttcggttaatatggcgcttattcagttcttcgggttctttttgggttgcttggacaaaacaaaacttaatgcgtcacaactctttttggtcaacacctaatactacgacgggttcttggatttggagaaaattacttaaactaagagatgacatccgtccttttattcgggctgatgtgacagatggtttcactgtttctttttggcagggttattggctccctatgagtcggctaatagatctcacgggagagacatggcaaataattctcggtataccaatttcagccatagttaaagaagctatagatttgcaaggctggagaatgcggaggtcgagggttagtgcacatggctccgatcatagagctactgcaaacactgccactgcttaccacttccaacgctccgaacaccaatctatggaggcatgaccatgacgtcttcgagcagaccttctcaaccaaccgtacgtggaaccaaataagatgtcattatccccaagtcgattggagtaaagttatttggtttaaccaaggtatacctagatgcagtttcatcacttggttagctgttcgtgatcggctagctacagggatgcgtatgcatagctggggacataaccaaccgtgtgtcttctgtggagagccggacgaattgtgtgatcatcttttctttgcgtgcccatacacgttcatgaattggtcggaagttgcagggcgtctgctccagcatcggcaagaccctgactggcatattactctcacttcgttgatcaacggctcaggcgatcatctaagggacatttttctggtgtggcaggagcgaaatagtcggatacacgggaagggctatgaaacttatacgcagctgactcgtcgtattgacaaactcgttcgtaacaggatctcttctctagattatcatagcaagccaagactctgctatctccttcaacgttggtttgagttctcgccaactgtgacgtaataccctgaagctgctctcctcttcttgtattcttttaatattccgttgcttctcctgtttttgtgtttcaaaggaccttgtctcacagtattttgttctgttgagagggccatcacacttgaaaatattttctatttttgatcaattaattacacatttagaacacatatacatttataatgttttgaagtatatacatatacttatggatacatataaatttattacggtacacatacaattttctacattatatgcaaaatataattacatttattcgcatgcatatcttttttcaacatattctaattagagatcaaaagagtcattcatgagaatgttgtttacataagtaatatgatgtgtttcggtacaaaattttcgtgccaaattatctgcttttacatttgtactacgagaaattaaatataaagagaaacttgcgaattcttctttgtcactttgaatttcctccaaatatacttaaaaaactggtcattcggttggggaagacaccatcttcatcagaccagaacagtttgttaagaaaactacatcttggttattaataccaatcagacagatgcatttaaatatgataagttatatagtcaacagagaaaagaatggtaaaacaaaagtatatcccgccaaaaacatactcttttcaaaagtgtccccttttcggcatttttttgtttctttttaatttttaatgatcattttaccttatttgaaaaatattgaagtcaacaaagtgaagatgtgaatttaccggccaaaaattagtgatcccataatttttggcatgaaacataatcctagattttagattttgttttgcgagaaatggatttacaaggattttttaaaggttttaacaggatttacaaattttcttaaaaggttttaaaagatatacatatattttaaaagattttacaagggggttttaaggttaaaaataagttataaggacttttacaagattttataagtgtgtataaaagatttatatggggttcttaaagacttacaaaggttataaaatctcttactaataaaatgagttgtttgaggcctcaagcaatccacatcagcaaaatgaaaactatgtaagaggatgccacatcacctacacctagccacatcacctaaaacatagagaaagaaatcgtctcttcgcatcactcaaaaacgttcacccacaaacttttcctaaatccatcatctcccacagtgcctcaaactcttcgatttcaaacttatctcatctcctatggcttccgttttaacccatatcaggttacttttggattcaatttcagtacatatcgtttgaagctgctctcatcccatgtttaacccaaaaggccacgatcttttcagttttcaatgtggtttatacatccaaaacatacacaacctttgtaactagagaatccagcaaaccataggtaagacatcgcccttcttcttctccttctttttttatttacacgatgtcaaaattgtcgtatgaccatatattgaacatattggcttgctcatgtagaggcttccctccatttaaaacctttagtgtgattaagtatcaagacattagataatcaaacaagctattaagtacgagaacatccacaagggtgagtgcatctcaagttgtgttagaaataagaacgagataacatggtatgtttttaagcgagtgtttttttagtgtatgtatcattatccttctttttccatcttctaccataaataatttataaattgggttccttaccgggatgaagttttaattttcattttaattactttcgtttttgttagctaatacatctaggattgtaaaaattaaaactatactctagggaaaaataaactagttttagattagggatagaacagataagcatcggttacgaacatgacttctctctgttaatcaaggaggaatctcttatgaataccaaatctcattgcaaatcacatagaaagtatccaagcttgattatgttggtatttaaattttactttatcaatgacataataatgacgtaaagaagttgcatctctaaagaacatgtttacgtgtggttggatgagccaaggaactattgtaacaatactgttgtttgttcctaaacattactaatacttgtttccatagagaaccaaaggaataaatttgttgaaccaccatctcaaagaattattctcacaatcactaaattcatatccaagcaagaactgtctcaagcacgaatggagaaaccttactctctggctcactatagttttacaagctatgagtatagtatcaacggaaaaacggtcatttcataccccagctaaagtagtatgttcaattcatacccaacgtttattgttgtgcaaatccatacattaacaaaccaagttttcaaattcaaatcccaaactcacaccattcatgtcaatacatgcctaagccgtgacggtgttacgaaaccgttaacggttgctcacgtggatgccacgtatgacacgacgtcgttttagataaaagaagagacaaacaaatttttgtaaaacgacgtcgtttttgtaacaaaaccataagcatctaaggcttggtaacaaaacccactaaattctatatattaagctacgagtatctagtaatatttatgttatattatgagattgtattgtcttgtcttgaacttgtaatatttatgagattgtctggtagtattttcatcacttgaaattggaatgagatcgaaattgtttaaaatagaccaaaagaaaccttaaatagcaataccaagtttcgaataattatcatttaattcggacacaacttaagagttcacttgagcttataacaaaaactttcaatctcttcagacttaaacaaaagcctacattcttccgtctcgttacttttcttcattccacttaaattctgccaaaatcccaaaaaaaaacatgattaactagagcaaccgacaagcacaattatcttgaaaaaaccctatattaccttagtcaaaatgagaattctgtgatggttggcttggtcgttggcttgttccttcattggtaccaatactcatagactgactaactccatcaggtgtcttctttggccaccttttgttaacgactcccacactaggacaacttcttgtattatgaccttcggtactacaatgtccacaacgaatgctccgtccttcttttgaaactttagtcctcttttctggaggctcttgtactccttttcctttcttcttcttctttggagactcattcttgcccttctttcttttttctttctttttggtacctgttggtcgtggtggtggttgaatcctaggttcacctgatcttatccaaaatccaataccattaactcctgagattgactcagaatatatcttcaaatttttcgatgccaagtaccaatcagagttgacgagttcctcaggattaacctttttgttcaatatgattcgcaagacatggcggcaaggaatctctgtcatattccaccttcgacatgcacatgtttttgcattcatatcaaccctaaagccatgattattttcaagaacctcaaactgtccatttccacaaggaaccacttgacaatacttacgatagattgtttcctctttgatggtgttggccactttcaaagtgaactttccttgatgtttaatcgcctttctcaacctcatatcaatacgaatcatagtttgtcgtcttattgtctccaacatctccactagtggcatctcccttgctttattaatagcattgttgtaagattcagagaagttattagaaacatcttcacaacttgatttgcagccaaaaaaagcacgactacaattgcgcggattcctcatcattactgcatcgtacacaccttgatcaaactgcttcaattcgtcaatggctctattatactcataatcgttaaagctctttgcaacagcccagaacaacttctttggcaaatcttttccaggataaactcttctaagatttccatatatatagcgtgcacacatccggtgttccaccttaggcaactcttgatcaacagcattgagtaaaccctgacatgttaaatggcacttgttataacaatgttaaaaatagtctcataatgagaagaacattagatatagtaaactaaccttttgcctatctgaaataagagtaaaaccatctccatcttgcagttttaaatcacttttcagcttcttaataaaccacaaccaagaatctatgttttcagtttccacgactgcccacgcaaccggatagaattggttgttggcatttcttcctacagctgctaagagttgtcctttcatattattttttaaaaaacatccatctatgccaattattgggcgacaatacgcaagccaagttttccggagagcatcaaagcacacatagaatttatcaaacttgactataccatctatagtgattatctcaacttccactgttgaaccaagatttgttctacaacaacaaatttcaaagttagataagcttgtaaacaaaaacaagaatcaaattcaaaatcgatttaaagatattttacttactccaaaagttgttccttgtaatcatgtattctagcaaactgctcatcatattcatcttgaatcattttcaatgcttttcctctagctttctgacactggttactggaggcaattagtgagtaccgctcttcaatagctttttgcattgctttcactttgaatgttggatcttgcctaatgtcattcaagaacatatctgcgatgatccgactcttaagaactttgcaaaacccgtcctttgtacatgcatgctcatcaatgaatgttttcaccatgtacactccaattttttcatcataagcacaataaattctgaatttgcagttacctccaatagaacaccttacttcagatttctctgatccccatcttgtgaacttaatattgactccttccttaagagcatagtcaatcacagcttccttaaactcagctatactgtcaaagacttgctctattctaatatcgccactacctttcttgcatctaacatatcgtctttcaccttcctcacaatctgagttcagaggggtactttcatcattatcatgctcttcttcatcaacaaagcctgctaagttctgctcaactcttgcttccatgtcaataaaaactctatcacactcagaaccatccccaacagctccatcaccagcagctccatcaccaatagaaccatcaccaacagctctatccacatgagaaccatcaccaacaactctatcaacatgagaaccatctccaacatcaccattttcttctttctccaaaaaaatatcgacagcttttgtccaaactgcggcaagacacattctttgaaagttttgatctccattgcacaattgcttaagctctgaatattcctcatatggaagcttataccaaattcgtttatgccaaatagattcgttcaatgactccatcaaattagtcaatactgcttgtggtttgctttcaaggctgagaatacctcctccaacataactaactttaatcccattctctacaacaaagttcccaccgtagtagcattgaaaaactgcatcttcagtgctgaataagaaagaaataaagtgagtttttggttgtgacattttatcgaacacttggtgttcataaaattacatatcgcttatcaactaaaaaaactccacaatctcatctaaactatagaaataccaaaggaattcattacattttataacaatacactcgcaatttgatgatttgataaaaaaaaaacctaaattttataaaccataaatttgaatgaaaattacctcattttccttcctcacaatagagattatgagctggaactcctattccactaatataagctcttcacgatagatgcttatggaacattgtcgtcgtgaaagaaaaagaaagaaaaaagaagaaggtgatttaagacgtcaaaaacgacgtcgttttacaaaaatttgtttgtctcttctttcatctaaaacgacgtcgtgtcatacgtggcctccacgtgagcaaccgttaacggtcttataacaccgtcacggcttaggcatgtattgacatgaatggtgtgagtttgggatttgaatttgaaaatttggtttgttaatgtatggatttgcacaacaataaacgttgggtatgaattgaacatactactttagctggggtatgaaatgaccgtttttcctagtatcaacaccatataaactctaaaagtctctcatgtgctgacacatcagctttttcaagtattctcagcttgacacctctgcaaaatcaacaaccaattagaacatttcatttaatacagatcatttgtgttgaccaattaaatcttagtatttgtaaatgtcattctattattaaaactaaattaaaattagcccagtccaaattcttttaaaagtaaactttctatgttacaacaaattttacattagcccagcccaagttgtttaaaaactatttttcctatgttattaactacatgggcctatactttctaaaacatgatatttagagaatctaaaagaagaaaagcaaaaacaaaataggacacctacaacacgtatcgtagatagagcgttaggttggttcaaagctctctcaacaacagccaagcccgcggccacacgtatcgtagatgacgttaggttggttcataaagggtaagttactaacacaatgttactttggtatggaataaacaaaagtgattgtacctaaggttgtaaaaccagggtcaatccttgcacgggtcaagagggtcttgacgacttcatctcagctcatgtacagctgaagacacatctttctatcaaattttggacctgcatcaatcatttagaaaatgttttcttaacaaataattgaaaacttacaagaaagtctatacacacaaaaaaagaatagttcatcatcattcctcttaactctattaaacgaggttttaacgcgccctcaattgtttctctcgtgcgattccgaaagcgaaaatctaggtcaccccattttcttcttccgccgctgctcctagtctcgttcccttggttggtccctcgccgactggtgggtctcccccgatgggaaaggggaaaaagcctcttcgcccaattgtgcctccgcctcccaaaattctccgtgatgctcccagtaaatcgtcactcaaagcagcttctgcagctcttgcggcttctttggtggttccggttggggtgaaggcgggtccttcgcctgttgttactctttccgctctgctccctccagtgggtatttcgcagaatctctctgttgtggagaaaactctccctcttcttcggcttcttctggatcccctgtacttggtttcccgattgaaaataggcaagtctcttcagctgttgtggtcccagaaagtccctctactgctaacgtggttctggcgtcatgtccccttggttcagagctgaacccgtcccttgcagctgggggtgcatcaagctcctctcctgcaacagtggcctcaggtagttccgtcaaggtctctgctgttggtgactcagaaagcccacctgttaatgtttctccccctacgcggtcttatgcaagtgttgcgaatccagggattggtttaactaggatgggaaaccctactaagcatgtctctggaatcccctttattctaatacctgatgagaatgttgcaacagtgaaggaagagttcaaagattatattttcgcgcagtttcacggtcctcctccagatatggggcggatcattggtgttgtaaacgccctttgggcccgctcgggtcctagaatctttgttcatcggattggacctggcactttccttctgcgagtcacaaatcctagaactcggtccatactcttgagcagaaatctttgcaatattgcgggtcacccgatgtttgtagcaccgtggtcacctgatttcactcctgaaaaacctcccctcaccaaggctcaagtcactgtggagttcagaggcattccttaccttctctttaatgatgaaagccttgctcgtattgtgtctggtgtcggtgagccaaaggcgcttcatccagaaactgcgaggagagaaacttttgaagttgctaagatcttgattgaagtgaaccttctcgaagagttgccctccaaactcatctctgggtttagtgatgggagagaatttcagattgatgtgaagtatccttggcttcccccgaaatgcagctcttgctccgagtttggtcattctgctactcattgtcccaaagctccagccccttcggaggcaaagcgagaccatcctcggtcgaagagtagaggctctcgcagtcgcaagcgtggaggcaggagaagctcccgtcaaggcaggcagctggctcgatcgaaaagccctgatgttgcgcctcaagctagcagatcgccggcttccattgcctcccaggtctcggttcctataacctcaccagtggttgctgatgagggtaagcagcagtcagtgcctgggcaagcctttgctgtcgaaccaggagatgttcttggtggtaaggagcctttctttttggtcaggtgtaagaatagcagccgcaaggctgcgagtacctaatcaaatcatgtgattatgttttttggatggaacattagagggttaaatagtcgtctacgacaagagatgacaaaggcttggattaatatccacaagcctctttttggagcttttttggaaaccaagatacaaccaataaactcatgtaggattctgcgagcgattcctcgtggttggaaacacttcgacaactttgacagccacaatacggcgagaattatcgttgtttgggatcccagggtctcagttgttgtctatcaagcatctcctcaagttattacttgcgggtttcaccttcaagctgagaatttgtttctcacggtctcttttgtgtatgcattcaacttagtggaggagagagtcgctttatgggaggagctgagacatctccattcttctactcctttggcaagaagtccctgggctgttattggggatttcaaccagattttgaggagtaagcatcattctgattttccgattgctgacattgacttgcagggtgttagtgactttgagtttgcccttcaagactctaatctcttcgaggctccgtctaaaggccttccttttacttggtggaatcatagggaggaagaaccaatttctaagcgtattgatcacgcctttatcaatgagcactgggcgaagagttttcctgatgcttattctgaattcttggagcctgtccagtctgatcatgctccttgcttgttttcagtactgaaccttcgcagagttgttaacaagcctttcaaattctattgccacattgtggatcatcctgactactcagctattgtggatcatgaatggtcggctggtacaatctctggctcttgccagtttaagcttcatcgtgctttaaagttgccgaaaccgtgcatgcgtagcttgaacagaactcatttcagtgggatcaccacaagagttaaagagaaagcagaggaagttgttgctctacaaagaagaattttatgttctccatctcctactcttgctcgtgaggagaatattgcctctgaggaatggaataagctgttggtcgcagaggagaaattttttatgcaaaagtctcgtgttaattagatgcaccttggagataggaactcttcttatttccacaagatggtcatacaaaggaattcgcagaatcacattcatttctttactgatgtggatggtactaaaatcacttcccctgtggaaatccatcgccatgctgttgagtatttcagatcagttcttgggactactgacctaccttcatctccggttactcttgagtacttgcaggatctcctgccgttcagatgctctccctctcaggctgaaggcttactgtgtgaggttaaggaagctaagattcgtgaaattctctttgccatgccttctaataaggctccggggccagatggctaccctgccgaattctacaaaactgcctggtccactgttggccatgacttagtccttgttattcaagagttttttcgcaatggtcgtcttctcaaagatttgaacactacgatcattgctctaattccaaagactcctgcagcttccgctctcgcagactttcggcctataagctgctgtaatctggcctacaagatcatttcgaatattctggccactcgcctcagacctttgctgctggaatgcatttctcctaacctaactgcctttctgagtgggagaagtcttggtgaaaatgtacttctggctttagaacttatacgcaggtatgacaaggtttcttgtcctcgaagctctctcctcaaagtggatattaggaagacatttgatacggtgtgctgggacttcgttctcaaacttctcgaagctcagaattttccgcctctgtttatctcttggatcaaagaatgcatttcttcgccgcgtttctctatcgccatcaatggtgagttagcgggtttctttgaaggtatgaaggggctaaggcagggagattgtatctctccatatctgtttattatggtcatggaggttttatctagaatgctggacaaagggacagagcagggcaagttttcggcgcacccactttgtttatctcctcgcttgactcatctagctttcgctgatgacctcctggttttctcggatggctcccacagttctcttcttggtatcagtgagattttgcgtctcttccattctttctcgggattggatatgaatcctgcaaagtctgagctttttctgggcgggtttgatgatgtggaagctataatggtctctgatctgcttgaggttaggttggattcattcccgacgcgttatctcggtcttccgttgaaccctacaaagctatctcttgctacccttcaaccttttttacagaagatcactggtcatcttcactcttggactaccaagtttttatcttacgctgggaaaattcgccttatagtctctgtcatctatggaaaggtgaatttttggagccaagtttttgtcttgtctaagggtttctacaagaaagttgatgctctctgctcagcttttctctgaaaaatgcctccaccattgcaagaggtggtgtcatagttgcttggaaggacatttgtaaaacaaaagaggagggtgggttgggtatccggtctcttgaagattttgctgtggttttcagactaaaacaagtgtggtatctgttttctaggcctgagactttgtgggttaagtggttggatcacaacatctttggtcgtcggaactattggctaatggaaccttctcctcgtctcttttggacgataaggaagatgcttgatttaaagtctctcttcaagagtatgatcatatgccaattacgtaatgggctgaaagcctccttctggtttgattcctggacccctctgggtcccttgattgatctctttggtaattcgggtcctagggagctgcgtattcaaagaaatgctactgtttgggaggccactagagatggtcaatggcactttcctaatgctcgttctccccatgcggagcagctgcaggtttgtttgtcatctgttgaccctccttctccctctagaggttctgattggtatcaatggaagcagccttctgatgctttctctgaaagattttcttctaagggaacttggacgcagattcgtctttcttctcctcatgtgccttggagtaaagtggtttggttcaaggaggctgttccaagattttccttcatccattggttagcagtgcaaggaaggctcaacactagagacaggttgcggcaatggggaatggacgtccctaactcctgtgttttttgttcttcaggtttggactctcatgatcacctgttttttgcatgcgatttctctagatctgtttgggtcagtctggctgaaaagtttgctgcgaaccccccttcctctttagctactgctgcaacgtgggttttgagtgttcaatctacaccatctcactttgcgagtaggattctaaagctccttttgcaaacctcgatctatatgatatggagagagcggaacagaaggattttcacgactgaagctaactccatcgcttctactaagattctgcttgaccgctctatgcgcaatcgactcatcttcttctcgccggaggataccgctaccagaatatctctcttgggtttctactttggttgtatctctagctcaccttaggtgtggctaagctcattagtatctatgtaacgtgttccattagtctctctttttaagagctcggtatgtttttgagttttcattgtacaatgtaaaaccttttttatttggtataaagtttaacattaaacccaaaaaaaaaaaactctattaaacaagttcacaaaaaaaaaaaatcagtatgatgaactattgagatagtaaatctctcaagtaatccaaaacacaacatggtcctgtctgcatctaaatcacacaaaaaaaactacagtcaaatgtaaaatatatgaaccttaactcaagaaacttttaccatttctggattttggatgttcaaattagaaagaaatcgttaattcaggaatataagaaatcaaacagatctagcaagagtatatagcaaagccatctctctagatacttcttcagaattcaagccgagaaaagcaaaaggaaagttcaataagattgtgtacaattattaatcattatctaatacttcctcttaggggtgtcaaaatgggtcaaaattcatgggtcaactcaactcaactcaacccatgaatcctaatgagttgaaaattttgactcaaatgagttaatgagtcaaatgagttgatgagtcaattggtttgatgagtaaaatgagttgggttgtaatggttaatggtttcaatggtttacccaattaacccatcaagttttgtaaaattcaattaaaccaactaaaatctctaaaccaatgtcaatttaagtttaaccaacacatctaaaccaatttaataaaattaatatttttccaaatttcttaaatatacaagcgatgaaattgagaaaaagtaaactcgtaatttttccaccaaaaaacataaacccgtgattttcccgccaaaaacgtaaacccgtgattttcccgccaaaaacgtaaacccgagattttcccgccaaaaacgtaaatccataaatttcccgccaaaaacttaaacccgtaattttcccgccaaaaatgtaaacccgtgattttcccgccaaaaacgtaaatccgtgatttttccgccaaaaacgtaaacccgagattttcccgccaaaaacgtcaacccgtagttttcccgccaaaaatgtaaacccgagattttcccgccaaaaacgtaaatccataattttcccgccaaaaacgtaaacccgtaattttcctgccaaaaatgtaaacccgtgattttcccgccaaaaacgtaaatccgtgattttcccgccaaaaacgtgaacccttgattttcccgccaaaaacgtaaatccgtaatttttgcgccaaaaacgtaagcctataattttccgctaaaaatgtaaacccgtgattttcccaccaaaaacgtaaacctataattttccgtcaaaaacgtaaacccgtgattttcccaccaaaaacgtaaacccgtaaaaaatgaaatccgtaaatatcctaagtttgatgataatgaattaataatgataattatttattattgttttataagaataattaattaaattattacttaaatgggttaacccatttaacaactcaacccatcaaattaaatgagttatgggttgacccaacccatttaacaaaatgggttgggtcaacccataactcatttaaccctaaactcatttgattatgagttgaattgagttgggttacccattttgacacccctacttcctctgtttctatataaatgtagtttaagggtttttattttttttcaatttaaatgttgttttcaactttctatgcaaataataaatgtatttaatattctttaacaaataatatttaatcatctatttttttattggttgaattggttataataaatgatgtttttatataaaagaggtaaattaaatgagatttttatgatttcttaatttctgtgtaaaaaccttaaactacaactaatatgaaacagagggagtaataaagaataaatatatatctacacgaacaaatactttttaattaaatattagagaatctaataagctttacaaaaaaatgtcgacgacaaagatcaacgagaatatttaaggcggtttcaccttatattcaagattcaagtcacaagcgaatccaaaatgctacacttccaaagactggttttctcgacaaaattttgagccctctaaacttactagactgaatgattcgaggtaatgtggcctcacgaaatagaacaactcctaaagtattgtaaagcaccagtgtgatcaatgtctaacatatcagaaaacaaaaacactagcaggggaaatatgactttaacgaaactaatccaacggtgtgaatctttaacgaaagcctgaaaccccaacgtgactttatttgcattactaccttgaacaaacaattggagatgttaattaatgtttcaaaataaacaagaaaacaaaaatagagatttatcttttatggtatctatagatctaggttattaaactaaagcaacaaaacaccacaccatagtattataaataccttcaagatagaaaagcgggatcttcaatacagttcctccatccacaaaaaacaactctgttttgagtgtcttcaacctctgttaaacattacaaaaccatataagctcaaatgtggaaaacacataagaaaccacctcggagagaaacaagacgagagaatcgatccgtaccgccaagaaacatatgtaaggaagccaaagccgggttgaacataagttcatcatcaccgaggttacactgtcaagcaccaacaaataaaaattcagagattactattcgttgaatccattatctaaaggattacatatttgcaactataaaacatcacgtaaccctaattaagcaaaaaatcgaaaatcaaacacttgaaacagattcttacaacccattaagccacgcgtagtcgctggaaatagaacgaaaagagtgtagaacgaataagtaacaaaggatcgtagaggtaaaccaaaaagcaagtgttaagaggagagattggctcacgaagcttgagcgtgggaacagaggggaaatgaagagaggtcatcattatcatcgacttcttcaagttgtaattcctcgaaattaagctcaccaatctgcttgatctaaagtctcacttgctcttgaatcttttcgtcgtccatttccctcgagtttcatttacccgccagtagagagagtctcctttagccacatccgcattttctcgggaactttatcgggccggtttatagatccaatacccagcccaactatcacatgttgttaatatatgattatattttaaataataatttcgttacccatttttattatctttttaacttgcaaatcatatgaaaacaacaaatgaattgtattttcacctactttctaataaaattcttcttcaaaatatatcatgaataatcacaaataaaatacactaacaacatataacttcaaaaaataatattataaaaaaaaatccgcggcttggcgcgggtttcgccctagtcttcttaacaatatcttcttgaatttcttcccatgaataaaatgtgaaatttgaaaagtttaagggttaacttcaatgtgttttttcttttgtcgaaagtgtcttagtttctttcagtgacttctctctttactatgtgagtataacgagactgatacataacacattctcagagatttggcttatttcaattatttttttggcatataacaaatatataacatatcattccaataagaaaaccgagcatcaagataaaatcattattctaagagcatccaacaactttaaaaaaaaaaatgtaaaaaagtcattgaatcagcaccatagtgatactgaactcaacttcactaattgttttgactcaaattaactatagcaaaaggcaaaagaaaaaagaaaaaaaacaggggtttcttgcaaaatggatctcaagtaccatccttattctcctcttatttgctcttgtaaacctgcacagaaacctcatcagcttcctcatttggtttaatattgactgcaatctcttattctctcatctcctgcccaatgagaaccttgagaagctcttgtatcacagctgctagatcaaggtccaagcaaacttcagaagcattctcatcttctttacctataattaagcaactaataagcaactttatgcgagaatctaaatagttctttccttgggtatgtcctctgatttggatggtgacgggataaagatttaaatcccgggagtttaacaagaggcacaactgtccacctccctttacgtcgaaatcttgatgtacttctaccatatcatacttgagtcatttcttaaaataaagtcgaaaatattccatgatggtgaccaatttgcataaagagcccaaatattgcccttttttttgggatatatgtgcactagtccttcctttgtcacctattgttcactcgactttatgtgagaatgagttgagagacccgtaattgctacgtttccgaattgagaagcatccactcgtctagtaatacccttatggaccagtgcataccactgtggcatttcgtattcatcataagcagtccaaacctggttttcaataaacaaagcttaagtccgatccgtgtcgaagtcgtaaaaatcagcatatggaacactcataaccacctcattatattcatcctcattaaccatataactagtgttcttgttttcataaatctttactctttttactgcattacatatctttaagttttgaattgtttttgttaagcagcagcaccaactttcttgtcttcacaagaggaactaggccttttaggattataatgggatcggagccttatcaaccgaagcacttccaagcatatttggcctaatctcaacttcgttgtccatctttttgttaaaatagtacacaagatccttgtatgtctttaattagttttgatcttgcagaaagaaaaagattgatcatcaaaaagtggaaagtgggaaaccttttgcacctataacagttttcatcactcaaatatatcctaatcttgaagccattaaaccaactttattctataaccgcaactaattagataaagaacaatttcacatctatgaaaacaaaattgctggaaagaaatatttgaatagttagttttggcgcctcattatatatcaaaatttagattttaagatccaaagatagtgttcccttagatattgaattcttagagaaggaatccatcaaacttgttaagagaaatcactactcttaaactaataagttatgaaaaattgcaaaataatatacggtttgcccacgattgtttgtttcaactttcaaagttaaagatccaaactgaattttgtgcacaaaattaagttctcgttgcatcataaattgagagtagagtttgtgtgtgaaaccagtggagaaacagatttggtttcaaaaaaccttttgctagattttaggatctaaaaaatggaatctaacaaacatctacacacaaatagttccaaacacaattgcgatctaaacacaaatttattatttatttagaaaaggctttagtatgatctcatttcctatcccccaaacatacgctagagaccaaacaaaaagttccctacaatctgatatatataagtgattaatggagaaattgaacatttttctgaaacgttgaagtaagaatttcaaaagttaaaatttatagaatgatgagtgcaagtagtaatgaggattagtacatacatgaaactttttgtggtaaatattacaatgaagtttatattcacaaattttatattctctgaagtttttccttcactcaaaatactgattgtctaatttcaaattattttcatatataacatggttagtttgtaaatatgaataagtttctactgacgtttttattaaaataagttttatcctattttaagcagtcaaagctgtcatctagtcgtcatttgaacccctagcgcctagttggagcctagacgagtgcctagaccgctttttagaacattacttctgggtttaaaatcagtaactatagtctttattggctagcttttaattttgtattacagttgaatgaattgtacgaattagttttgtgttagtaacttccctttactttttttttttcgttttctttaactaacttgggtgattcaagtatggtttgctcgataatgtttgttacatactaagcccaaaattttaagatcaaaagatattgttcttctaaagaatatatttccccttactctatttcaaacttagatgttcacatctaaaaagaaataactactacctaaacaaacaactcatgctaaatctaaataaaaacttgtaataacgaatagacagttttgcgcgtgaaagttgtgacaaatcaaatcagaatagagttttcactttaaagatacctgcataatataatcaatagaatttgcgaaccaaaatctgttgataagtaaaaaaaaaaatattttatgaaaacggatttgggttcaaaaaaaatttcgctagatctaagatctcatgacacctctaaaatggattctaacaaatattgcaaacacaaaggtgtcataacatagaaatgccaaaaaagggttaagagtccaaatctgaaaacttgtgaataagatccaaatgccaaattcagaaaactgtaataaatcatgatataattgaattgatggtttgttcatcaaagttcctcaaaaccgtgccgaaattcgttaaaaataaactcaaatagaccgtttctgccccaaattttgttagatatctaagcttgattcttaccaaaagcaaaaagactagaaaacttttataataaatttaggtttcaaaagaaagcttgttgttagatgtaatctaacaaatagctgcaaagacagagagtctaaacaagtaaaagtctagaaaaataattagttgttatatattcttgtctcttatcaaacatttgatttttttctagttttataaagaaccacaagaaattatgtttcaatgggtagtttgatgacattttatacgttattcatttggttttcgtatgcataaattaatctatagcaatattcttaaaccattagattcacttgaaagacaaaatataatattaacaacaacaacaacaacaataataatacataacattaacaacaacaacaaaccatttacaaaaaaataaaataactcaaaaagaacctcaaattttctcacaacaaaggtttgaaaatagggtaatattagtaactagccaaattagatacacaaattaggaaaatagccgtgcgtcataaaacattagtaaataaacttttttggagtgcgaaataaccaaaataacttggaaagataggcgggaactcgtgagttccgacactaggtggctatatgtagggaacataaacatgcgtaagtaatgagtacccgatttatttataaaacacacgccatttatagatgtctttgttcccttttttttttttgttctataagccacataacttatagatatcaattacagatgcatttgatatttaaaccctaacttataccactagataagtgtaatgatgaggacatcaaactatgtatacatatgtttgctttgtaggcgagttgttattcagtgaagactaacagataaaaaattcattgataattgtaaaatagaacgttatataagaacaactcatgtaatttctctatgtagacgaagtatgaaaacaatgggcttgagttggaaattgtgtattgggcttcatgttattaattcggttatagcctctgcaaagtatcaacttgtagagatcatacattacatggaatgtttggttatagcagtaatcattagtatacaacttgctacataatctggtcgacacattttatttgcgttttgacaatgtgaagagtctgtaaaaaaatattttatacgtatctattgcattaaatgcggcgaaagtgttatatacgagttccaatgttacattgggggaggggtgaaaaaaagtgtaaaaacaacatgttacttataagtataacagaggaggacaacatggtgcactccctagcgtgtcaccattaacttctccactgagaatagagacaacactggtctacagaaacaacaagtgaaacaacaatgttaagaaaatgatatattggaaaaggcatgtctccataatattagttttgcactctatagaaagtagttcacatctgcagacactacataatactacttaagaaaatatagcactactatataaaacatgcaacagatagaaaacacttaaatttgaaagaaaaacatgaatttaagaggaaacttgataggggttattgttaacttttttttgaaaaactttgtttttagagacaaactcagtgtgcttcgaaaaaaggcacatttgttgtttgaaaaataccatattgcccctgtctccttttcccttcttcttcttcatgggtctgttccatttttttctgtccaaatcaatttcttctttattttgcaaagaaacttaaaatcgttttcaattacataatactaaaccctaagatagtatatagggaacccaaacaaccaattttatagatttttttgagaaaaaatccagtttttaattttttatatatatgcatgtatatacatgtgtatttgtgttgttatatcactggatccgaaaatcaactcaaacacatctcgatccctttttaaaggtataaaagcatgaaatctaaaatgaaaacatagtatatagagaaatcaatgactcaaaataacaagcattattatataagaacaccttatagagtagacatagtatgttatctatataaaacacatgaaccagctataaataacatgcagaatatgaacaaacctccttttttttttttaaacccctaaacagacgaaaaagaatccacagagtttgagaaaattctcagatctcgccttatctaacttcatgtagagagattaaaaaaaattgagtgttagtagagaataaataaaaaagaaccaaaacttagatctggacacaatcggtaagaactctgtgcaggatacttatggaagtgtacatgggaagaaatagaagaagacatagatagataatcggaaacccagaactgattcattggcaaagactagattggagaggaggagaacgaattaaaacttctctcacaaacgacgatgagaaaaagaagattagcagctatataaaacacatacaaaaaactataaaacaaataaaataacagagtacttaatggcagaccaaaaggtataaaagcatggaatttaaaatgaaaacatagtatacagagaaaccaatgagacaatataacaagcatcattatacaaaaacaccttatagagtagacataacatgttatttatataaaaaacatgaaccagctataaataacatgcaaaatatgaacaaacctcttgtttcttttaaaaacactagacggacgaagcagaatccacagagtttgaggaaattcccagatctcgccttatctaacttcatgtagagagattatgaaaaaattgagggttagtagagaataaataaaaaaaaatcaaaacttagatctggacacaaacggtgagaaccctatgcaggatacttatgtaagtatacatgggaagacatagaagaagatagagatagaggggaaaaagaaccaaactttagatctggccacaatcgttaatttctatgcaattgaagtataaagaggaagaaatagaagaagatcggcaataaataaacgaaaatcaatggcttaccttaccagattcgtcggcaaggggaggatcagaaattaatacttggattgctaacggcgacaagaacgagaagaaggtttcaaggagacaatcaagttctgggcttgattgaagaagatgagagtaaccgacggtgaacgcaatcgccaacgacggcgctagattttgggaggatattttgcggtgtgaagaaaaaacaagatttttattttctcatatattacttttggtgcgagagaatgaatataatgttagcttctgaatatttcaaatttcaaaccgagaatcatcacgctcccaaatagtgtattgtcccctcaatgtctaaggttatacatgtaataatacatgtgtttccgacagaacattgtatctcatggctatttctttaaaaaaattagatccatgactatttactacatattcccttgaaaataccctaaaacgtattccacttattagtttccgtcgtcacctccttttttcccacgcgcttcttcctcctcaccagacaccgaggtccaagctccaggccatgcctgcatttgtggttgtggttggtggattccaagactacaacaaacaggagttccaattaccattcctggaggcagctctccatcgtcaataggtggcatggccacaggatcagcagcggcggcaacagactctctctttacctcaatgtcatcatcaagcaagaaatcaaagataacagtttgagccactgcggcatcgacattagatttctgtagcgtgactcgtttgctttcctgagcatggagccacgaacgcatcgtgagatccatgataaacatctcacatgctttcgagaggaggattggagcctcactagctatcatagtcacatccggatcatacttcataatcttcttgatacgagttataggaaggtcgtgatttttgaaatctaagttaccttccatctcttttgaccagaaactcttcagttgctcgttacctttcggtggcagctggttgttgccgttgttgttctccataagatttttttcttttttgaagtttctagtgttctaggcttgttatttttttatttgaagatttgcatatataaaggaaaagcttaagcatagattagatatggtgggatagtaagcaggtaaacttttacaacaatgaatcttaacgcatttagtatattgttaagaatatttaatgatattaacattatttgtttgactaacattatttggttattattataagaagaaaaaagaaagtgatttatttttacttaaagtgtatatattataccaattaatagtgttagaaaaaagaaataaagtaaatacaaaactatattttctctataaaattgcaagataattttttgctgtacaaaacttattttgaattatttagttaaaaaatatgttttcaaatgttaaatgtgaaagcataattcatatcattgctcgaacacaaaggagttacatgttgcatctgattggtttagctttctgttagacttcaaaaacatatgatcatcagttcatcacatagatctattacacatcaacaactttctaactagaaatcattacttaagcgttgtccgatcttttttaccggttatagcaaaatattttaccgcagcaattcacttaaaccgattcatttatatggatccaaaacaaaccgctactaaagtttcactgatttttaacattgagattataaacatcaaaaacctacaacagtataaactaaccaacacaagaaaccgcgttgttctttatgttttcagtcccatctaatgcggcaaccacgagcatgaagcgtctcgagcaattccgatgagagcaagaatctgagaggtgcgagaagtttaagcttcttgagcctattgcaacaggctcttagagcaaactcaaacccttctacagtcacacggctcagatgaactaagtcaacgtcttgaacccgactcagattgctcatcaacatgcatagagccgtatcagacaccgagcaattgcacaagtttatctgccaaacaaaacacacaacacaagaatcaaacatgtttccaatagatgcttccagatctccatctataaatgttattttttgtacctgtcgtaggtttttcgagaagtaagcgagcgcccaaaaacccgaatcatcaatattctcgcagagtttaacgtccaagtaacccaatttcttgcagccggacgcaatggctgctaaaccaacaccggttatattctttagccctcgaagttcgaggtgacttagaagttctagctgccggatttgttcaaccccggtgtcagttagttcacagcagtatgatagaatgagtcggttcaagctcttgcaacctcgagataaagctgctaaaccatcatctccaaaaccggcacagctgcactcaaaaaccagaaatcagtaagaaaacgaaacatgtcttgcacatttttcatcaagaatccaccaagaaagtgtaccggtatagatcaagttctagaagcttcgaacatttggaaccaatatggaaaatccctttgtctgagatatttgtgcagagtccaagtttcaatctttgaagattcgaacacttcgagatatattctagccctgcggtcccaacggaacaaaaaaccgtaagataccaaagatgacaatatctaaaacacaaacggaggtttgagttcacatatatctttctattacctctgtcatttacaccataacagtcagtaagatcaagttcttgaacaagcatggagtaacatccaagcgattgaagacctttctcagttatcaaatgacaagactctaactttaaagtccctagattccggcaagactgagctacagcagagatggctacatccgtcacgaatccgcaacacgccagatttaatgttttcaggtttaagcagttgcgtgcaagacttatcatcccaatatccgtcacatcaacacatctgctcagtccaatctccattaaagatctacagctagagcttaaacttacaagagaggaatcagaaacatgagctccatcaatccatatagtcttgagatgcttcaaacctttgatgtactttaagaagctaccagagacttcctgtgaatcacaaagattagcagagaacactatcgagtaactagactaattcaaggtctcaatcgcaaacttaccgatacacagtgactggctttaagaagttgaatatcaggatggcctctgactatagagatcaagccagacaaactcacacggtcacacctagtgacatcaacctcctgtttatagcacttaaacatttcaaaaatcgaatattgaatccataaaagcttagtgtgtgaagaaggcaaagtaagtacctgtaatgaaggagaaccattctctagaaactgtaacccaccatcatctatcaaaggacaacttaccatatctaaaacctcaagctttaccagcaacgctatagaccggatcgaatcatttgtgatctgaatcaaattcacaaacaaatctcacatcaatcactacaaaggtagaaactttgaatccaatctccataaagttttcaaatttatgacatttaccttaagataagagacatctagagatttcaatcctttgcaaatcttacaaagaagatcaataccaagatcagagatctccatacaccatttcaagctaatcttattcagattactacatccaacaacaatcctcgctaatccaacatcgcttaagctcaaacacttatccatcttcagctctctcagccccgtcgcagacgacaacgcagccgcttctctatcgccgaatccccagcaatgagacacgtcgacgcgctctaaagcgtgacacatacgcgccaacgtctcaagtcctctagctcgaactgcggtggaacggcttaagttcagtgacttaatgcctaacgttgaaatggcgccgtctaatgctaaacgtaaaacgacatcgtcgtcgagttttggacagacggagaggtcgagggaagagaggtttgggtatttgaagagaagcgtcgggagaaattcgacccggaggattcggatcgtggtacgagtcaatgagtcgactcggaggaagtctttgctgattaaacgccatgttttccgacacggtgggtctagacattcgtagactcggacaagaagatcttccgacaaaacggataaaattgatggtgacgtcgacatttttgcaacagaaccagaaataaacacacaacaacaacaaaaagaaactttttaaggagaaagaaatgtgttttctctaatggattcgaaatcggaaaaatttgaagctttttttttaagtcggaataaagagaaacacagctcggagatagagtagagagtggtgaaccggtttttctaagatccgaattgggttaacggtttgcagtttcgggttcatcacgccgattagtcggagactttccggtgggaaaaaacaaaaccgaacctctctctaaatttttattttttctgatatataaaggagaagaaaaaaatgaggaagacgaagaagaagaaagaagcgtgacaggaataacacgaaatgacgaaaacacccctaatcttactagtacggaaacaatgtgtttggtttttggagtttgagatctttacgcgtggttaattatccacgtggatatatattagtggttagttatggaggctttattgttaggagcagaggatttggagcaggtgattattacataactgtaccgaagttaggtctgcaccacttgcgggacccacgtaacgtgcatcgaccgtacctatctgtttgacccaaaactatatgataaaaatcgaaaatattagtttgtccaaaaaagcatatattaaaaaataaatatattgaagaaatcatattcgtttgtctgacgtggatagtacgcgacatcgtcgtggcagatcacaaattgctattttaaaaacgatgtcgtgtaaacagttatctaaaaaagttttgtgaaaaaaaaaacctcaaagacgtttatttttataattttatatatatatatgtacgtctaaaaagtacaaaataattttataatttaaaataatatataatataatctttttttattattattattataaaattttaataaataatatatcaaatcaaaattttcgagataaaaaatttagttatatttttaaaatttttaaaaataaatatatataatggtgaaaacgtatataaaattataaaaatgagttatatacttatattatattttatattggattttatataaagattttgtatttttcatatataaaaggtaaaattacgtaaacaataattaataaatattttaaatttaatctgaaaattttgttggaaagtttgcatttgcaacgtcacaagtaacagcatagaccatgctttcacgttgggatgtttcgttgaagtattaagataaggttagaaagttttatatttactatttattgcatgcacctattattgataagttctaacaaaagtaattaatacttttctcagttttaaaacttaaatatttacatactcaaatttatgtacttcgtgtacggatcggatcgtcagaagtttgacattttctttagacagacatgcatacgtaaccaaacttctatctggattgttgaaaatttaaaatgtagatatacttctttttcgtaatacgttagcataattattgaaaaaactcttaaatttgtctggcaatttttatttttcacctcaaaaaatataaaataatcttatgaagtttaaaataatacgtaatatacttttattttactattatcaaattttaaatttttgatagataatatatcaaattgaaccccttaagatgaagagttcaacaatatcttaaaaacaaatatatatgatcgtgaaaatggttacaatatatataaaattataaaaatatgatatattgcttattattttgaatttcataggattgatttacattttttaaactttaatagacgatttttaagtttcattttgcacaaaatctttacatatcagtataaatcgcttctcatttgttatttattactgataaaataaatttgtggactgatctttaagtttattcattagtcacatatgttgctaatgactactaagtttgtatttatcctaaaaaataaattcattatccttcaaattttattaagacgcctgtaactttatttgtattatatacatatatatctatgtggctgctagtctactattgaaaatcttatttaaattaatgtgtgcttcaacaggagatagaactaaatatgagtttatatattaattagagaaactaattaaaactcatatttgttccaccacctgtcaatacacacttaatctcaagaataagatagtccgtacgtttaatatatatctttaacttttatatagttgtcttatatttataatttttgtacaggtaatataggctggccatttatacgatgctcaatatatatcttggtttataatgtcactcatgaaaaggtgactggttgagactttttcaatatctagtttatcactaaaatatttaaataatgattgaacggatgatatctgggaaattaatatgcgattagttggcactttcctgtctcttattcgattttcagcctcaggtcaatattcgattttacgttcatgtaagttaatgtttcaaccactccaaccttaaaaggttgcgtttcaatcaactacactttaaatttcgttgatttgaatagcctttcatgttttaatatagtaacaaaaaaaaggagtatgaaaagttataaacaattgatatgttttattttcaccaaaaatcttgagagattccaaaaatacttctaatatatggttttattttcattgatacgttcaggttgctaaaaagactaaaaagatatgttaatgtatccttgaaaaaatatttgattatctcaagttcatgtatgtgttcaacaattaatgtatgtgcataaagaacgaaaaattgctttttttttcttagaaacgaatgacataaactttattttagaaaacatcttgaaatgttttgcgagttgagtctcttagggacagcataaaaagagccatatgtaacatatagactggtccgagggaatgcgtatttaagttttaaaaatcatatagtgtatccatagattagatgttaaaacatatatatatatagtttattgtatattattggttgtgatatacctgaccagaataagatctacccgaagtgagcctagaaaaaaagatgacgacaaaggtgaaagacgtaccttgatctacaagttgcgagattctcgcttctcacgttcttctacttcgttgacttcatttcattgaccttagacagtgaggcttgtagagaaccaatgggccaagattgtttatccgtctatcctctctttgttatttattataaaaaatcttaatttgcgatagatttttgaaaaaatatataaagaagattatgaaccgtggagatatacgagcgtggatatgatgatgtgtttcctttcgtatgatatataacattgattgttttggaacaaggtgaagagttgtggggattttatatagggaaacttatgatgatgatgatcacattttgttggtcttagagtacatcgaatatgtagattttgttcatatgatgacatcaaatgcaaatatgagttcattgtctttccaaacaaagaatatgaatctatgctaatgtgtcacctcaaatattatggtccatgtaaaattttcaaagtaattaattaccatacattatatatgtccacctatatgttgattttggtctactgctccaatttgcaatcgaatatagtacatatgttctctacttgccatttttttgtcaccatattatgtgtttaggttagagtcatcatctattgatttaggttcttgtcctcgcagcgccgattttgtaccgttggttgactgaattaaatagattaatcggattaaacccgctagttaaccatcacatttggcctttgccattgtagcctcacaacttaggcaattttaggatttgattggttaatagataggtgcaaatgcaagatcttttggtagcaatggttgctgttttaagagctataaaaatatttatttgattggtataagagttgaaaatatgtgtgtttgtgggatgttgttatattttgttatgggtgagtttaaaactaatataataaaatatgctatctaattatactaaatcgacagtcaatttttcaataactgatgtattctccttttgacatctggcataagtctcaatttttgatgttttactttcacacaatatgttaatatttgcattcctaaaaacttttatttttactcttccacgatctccatgactacaacagttgcaaactaattagcaaagaagaagaaactgtttccttcttgcaattgattgatcaccttatttatacggtttcatcttctttgcaattagtttactttcttggcgtaaagttggtcgctgaaatatactattctaccatttttcgcccacttttcttcatcaaatcaaaatttctcatcattgctgatcaagaagagaacgagaacagagttattctgaaacacgataacagaagcattctaaaacacaataacagagtgaattgcagccagcaatgatgaaacacgagaacgagagtgattctagcttttaaaatcaaattatgtcgctgcatatatttttaaggtatcaaatttgtatcattcaagatttgtatatctcttcgttctgcatttgttgttctgggtctcaattttagtatcatttagatataaattgtgaatatattgatgttgtagtatcaatggagacaagctagaagaaacaagaatgtttgggaaagagattgagaagactgaaaaaggtgaagaagacaaaagacctaattcagcttcagacacaactcaatacggtgtcgttgagtcagctctaccaaatcagatgaccaagcccaataacatggtctggaggcccaaagcagaaaagcagcccatttagcccatccaagagcaacggtcacctgcaaaacaagaagacaaaattaaggaagcttcaaggaaattgctaaaagatgaaagcaattccagctgtccaagtcaagacctaatcttgactaataggtttgaatgtctagagagtgaggacctagcttaacctaatctagagactatataagagagtctaatgtaatcacaacattaagagagaaataagatggaaaatatttcagtctccttcacatactatctctaaagcttactactttcatggtatcagagccatggattcatcaatccagctctattctcatccggttctacatatctcaaactgtgttacagtccaactaaatgaaagaaattaccttctttggaagacacagtttgaatcctttctctctggccaaagtctcctggggtttgtcaatggtgctattaaacctcctccagtcgacaacactctgactcacattgatggtctcaccacagaggttccgaatccagactatcaagcatggctgaggtcggatcaagtggtgcgagcttggcttctaggctctctgtctgaagatattctgcgagaggttgtccacaccaccacggctcaggatgtttggactactctagctctgcactttaacaaggtatcttcgtctcgtctctttgagctgcaaagaaaactgcaagttatagagaagttagataaatcgatggatgattatcttaaggagattaaaagaatctgtgaacaacttactgctattggtagtcctgttagtgagaaaatgaagatttttgctgcattacatggtcttggcagagactatgagccaataaaaacttcaatcgaagggtctatggatcttgaacctcagcctacctttgaatctattatccctcggttaactggttttgcggataggcttgctagctacaacacatgcatggaagtttcaccacatatggccttttatgcaaactattcaggcaaaggaagaggaagcttcaatgggaaacctggtggtaatcaaggcaaaggagggcaatactcaaccaaaggcagaggctttccacagcaaatcacttcaggctcaagttctccgggttccaacaacacagaaaacagaatcatgtgtcaaatttgtggaaaaccaggtcatccagctttgaagtgttggcatcgttttaataacagctatcagtatgaggaactccctgctaccttgactgcaatgagaattactgatgtgactgaccacaatggaaatgaatgggtaggagacagcggtgcaacagctcacattacaagctctcatcaaaacctgcaacagtcacaaccatatggaggatcagatgcagtcatggtgggaaatggagattttctgcctatcactcacactggatcaactaccctaccaggaagctcaggtatattacctcttaaagatgttttggtttgtcctaacattggaaaatctctattgtctgtttcgaaacttacaagggattatccatgctccattaattttgactgtgattatgtctgtgtgactgataaggcaacaaagaggcttctggctcagggaaacaacagtaatggcttgtatgttctgaaggattcaccagttcatgccttttattcctctcgtcaacaaactatgtctgaagatatctggcatatgagactaggacatccaaatcaagaagtccttcagtatttgcacaagaacaaagctgttaatatcaacaaaagctccaaaggcatctgtgaagcatgtcagtttggtaaaagctcaaggttacctttctcaagctcttgttctactacttcaaggcctctcagaagatacactgtgatctatggagacctgcaccagtgaagtcagtacaaggcttcagtttttatgttatctttgtagacaactactctagattctgttggttttaccctctaaagaataaatcagattttctaccaatattccataagtttcaagctttagtagaaaatcagtttcacagcaaaattggaagttttcaatgtgatggaggtggagagttcactagcctcaactttgtgaatcatttgcatcaacatggaatccaacagttaatctcctgtccttatacaccacaacagaatggtttggcagaaagaaagcataggcaccttattgaattgggattggcaatgatgtgtcacagccgcatgccaatgagatactgggttgaaggattcttcacagcaaacttcctcattaatctcctgccttcttcagttctgtcagacaacaaaagtccctatgaggtattatttggtcagaaaccagattatacttctctcagagtctttggatgtagctgttatcctacattaagagattatgcaaagaacaaatttgatccaaggtctctgaagtgtgtgtttcttggatataatgaaaagtataagggatacagatgcttactgatttcaacaggtcgagtttacatcagtcgtcatgtgctattcgatgaggaggacttcccattccataaggtatcggcttccccacagttcatcactactccacttcgcatggcttggcaaaagagttttcaacctcagacatcagaaacaacagttagttcagaccagaatcagaaagtatatgctcagatcgacatagaagcttcagcaatacctattcctgctacttttccaactagtggtgatactgggagttctgggtgtacggcaggcattgatcctgttcctataggcaacagctctttagtatcatcacctagcttggcaaatgtagtgacatctgcaacaacagaaacagctacaacaagtcagtcatcagcaacaacaacagaaacaactacagaaaatagaggattatcagtacctactgtatcatctgttagacagtctcaaagacatcacatggttacaagatctcaggtgggaattagaaaactaaatcccaagtatgctcttcttacttcgagagtcaaatatcctgaaccaaaaacagtaacttctgccttaaaagatgaaggatggaataaagcgatgcatgaagagtatggaaactgtcaagaagcaggaacatggtctcttgtaccttattctccagatatgcacgtgttgggcagtaaatgggtcttcagaaccaagctcaatgcagatggatctctggataaattaaaggccaggttagttgctaaaggatttgatcaagaagaaggaattgattaccttgaaacttacagccctgtagtaagaactgctactgtaaggactattcttcatgtggcaacaatcatgggttgggaaatcaagcaaatggatgtgaaaaacgccttcctccatggtgatctcacagaaaccgtctatatgacacaacctgctgggtttattgatcctgcaaaaagagatcatgtctgtcacttatacaaatcactctatggattaaaacagtcaccaagagcatggtttgacaagttcagcacttatcttttggagtttggcttcatctgcagtatgtctgacccttctctcttcatctacataaaaggaaaagatataatcatgcttcttctttatgttgatgatatggcaatcacgggaaatagctcagataccttagctactctccttgtggaactcagtaaacgcttcagaatgaaagacatgggtcagctacactattttcttggtatacaggcgcaattccattcagggggactgtttctctcgcaacagaagtacgcagaggacctccttgctgtagctggtatgcttgactgtgctcccatgccaacacccctggctctacaattaaacaaggtatctcatcaagaccaacaatttgaaaacccaacatatttcagaagtttggcaggaaagcttcagtatcttaccttgactagacctgatatacaattcgctgtgaattatgtgtgccaaaagatgcacatgcctaccgttgcagacttcaatctcctgaaacgaatcatcgggtacataaaaggaactgtaaccatgggaatttcttttaacaaggagacagactgtaccttgagagcttatagcgacagtgactatggaggttgtgaaacaacaagcagatcgactggtgggttctgtaccttccttggaaacaacattatctcctggcagtcacagaaacaaccaactgttgctaaaagttctacagaagcagaatatagagctctatcagaagcagcttcggaaattacctggctatgcaagattctgaaagaactcggtattcctcttcatcaaacaccagaactatacggggataatctctcctctgtttacctcactgcgaatccgactttccacaagaagagtaagcactttgccaatcattaccactacgttcgggaacaggttgctctgggaactcttcgggtcactcacatctcgaaccagtttcagatcgcagacatcttcaccaaatctctgcctcacggtcctttctcttctcttcgattcaaacttggcgtagatgttccacccactccaaatttgagggggactatcaatggagacaagctagaagaaacaagaatgtttgggaaagagatcgagaagactgaaaaaggtgaagaagacaaaagacctaattcagcttcagacacaactcaatacggtgtcgttgagtcagctctaccaaatcagatgaccaagcccaataacatggtctggaggcccaaagcagaaaagcagcccatttagcccatccaagagcaacggtcacctgcaaaacaagaagacaaaattaaggaagcttcaaggaaattgctaaaagatgaaagcaattccagctgtccaagtcaagacctaatcttgactaataggtttgaatgtctagagagtgaggacctagcttaacctaatctagagactatattggagagtctaatgtaatcacaacattaagagagaaataagatggaaaatatttcagtctccttcacatactatctctaaagctgactactttcatgtagaagttgggcacatcgaatacatgggattcaatgtcctggctttatgggaaagaagaacgggaaacgaacaattctgcggagcaaattgtgaatgctaaattgttagatcgtgaggtaactgtcatttattttgtttggttttcactaatcgttgatcacatatttgattacgcgtttgagttagtgacagcacaatagaaaagaagccatacaagcaccacatcttttgccatgaatacacccatcaatccacatccatactatggtatgctacgatcaaatcttactcctaaactactagaatgtatgtagattcatgatcagctgtttctgttttgttttgtttttttttaaaacaggcccagcctcgattgattcagcactttctaaagatactttatcaggtaactctctcgctcaaggcatttattcaatttacaatgcttctccggtttcttttccttaaagctaaagaccagtacctgacattttcttggttcaagtaaagtttttttttgttcactttgaaatgtccagttctttctattttcttgcaaaatttgcagacgttacagtagctaattctgcagaatctttcttccgttccaactctaattgttgttaagtgggtgagttcatggagacttgcagcgtttgtaattgtttgtatccttatacatgtggtatgtatattaaccagtgacttgataataacttaaactatctacaaagtttatttatttctaagggtggaataagattatttgcatgatttaggtttgagaatcattatggaaaatggcaacgggttcactatgtgtcacaaaagcaatgcaacatgaactggatcagaattagtgtggtgagatgaaatttctcatagatacctgttatatttgattataaagtaaaaagtgatgtgattctgattctatgcaataatattctgagttggtgttttttgggcagcaacaaggtagataaaaagctcttggagaaagttataggtgaaaagagtatgcactttggctccatcgttaaggtttctcaaacatatttatcaggccatttaatccgtttataagggtgaaatctctagaccaaccaccatgtttcctatcacaaagacacaatcggcgatgataaactaacaattgaagagaagagataagactgagattgttttacatctgtatttattcttataccaattagttgtcgttttttttctttttcatttaaatgttcttcgaaaaattcagtagttaatataattttcaattagtaaaacaaagtaccacgtccgtgcttagcacgggcataatgctagtttaaatatatattcaaatatgtttaattaatattgtgttatttttttaaacttgagtgttgtttcattttgcaaactctaacaacaaactttggttaagattaaagtaaatgcatttgttacagtctttcataatttttcaactaaagtgattagtgatgctgttgtttcatttccaaactctaatcacctaagctatggtcaaagctttaaagtgagtgtatctgttacagtgtttggataaatttccaactatatggatattgttgattcacaacttacttttttgagggttattataaatttaggcatattttgggccaaaaattataaaaaatgcatatttcaattgggcttacaatcctaggcatttttggcctattaaaagtctttttgccctgaagttcactcttcatcgtttccttctcttcctcttcatcccttccttttcttcttcatatttccagaaaattttaattttgttcttgagaaaattcttttttgattacaaacactaaaccctaaggaatgatactaaaactcaaacaaaataattaaatgaaccgtttgagatataaaaaacggatgaaccaattacgaaataaaaatttgagatcttatcattgtcttcttcgagctcgtttatcatgatacgtgagtcatgaccatcacttctcaccgccgcccaacattgctgttgccgaagcttatatattgtcgtcgttccgttgttgtaagcggagatcttgtccgatgtcttccattacgttaaaaaattgaattaatcgattcaatcaaagaaacaatctcagattaataatttaaaaaaaaaaaaatcaaagaaacaatctcatcaattggaggaacctcaaaattgattgcggaaagaaattctagacccaaatttaatttttaattaatttgaaaagggcaaaatcgtcaataaaaggtaatagaagtacacattcgcgtaagacatgtgtaaaatgtttaatcatacaatacccttcattttattgtgctattttcataattgatcatacttttctgaccattttgtgtttgtgtgtcaactacactcttacttcattacttttttttttcttttttttttctttctattatctgccttgtattaaaattagatacccacaaatttgggattgggctttggtttacaatgaaaaacaaagataaaggcaaatcagaaaaaaattatcggaaaagaggatcttgccctggtgacactgtggcgcagagagtccgaccattggcaccggcggatgcaagaaccacagctttgcagcggatcgaagtatctagtaaacagagatgaagcatccgactcccgattctgttccttttcccttgatcaactgttcccaccacagatctcttggtatggtcaaccctccgacatcacgacacgccgttgtcagctcccgaacctagcaagtcgacaatctcaagcataacccctccttttcaatccggcgaatctttgatttacctaacaaaaaaccttcaattcggccaggaggaagcagatcacggtggtgttagaggttgatggctcaatcggaaacccaaacacattgaatccgctataggcaacaagatccaggaggatccatcattaaccatcatggcgattcggcaccacccaccttctccacatcgacttccgccgtagttgcagagaccgatacgacggctgaaccacgagaagaatccgttacaccagccgacgtccacaaccaaaagaaacagtaatgaatctctacttccaacatgttggatccgcaaacacatcgaaagggacaaaatcacaccactaccgacggagaagggatcttgttcacccctgaaatttcattgatgttacccattttgtatgtaacattgtttcttctttgatgttgacaactttatagttgtaaaatacaatagccactaacaatagccactaacaagtgtgaagatatatatcttaaacactaaactaccaaaagaaaattgtgaagatagatatttggacaattccactcacgattactattgcttttgatgtcgaacaaaaacgttacttgctggtttagaaaatataggatcaaaataatgcatctacatgactacatcaatggaaacgaaaccaaattgggccaagcccattaattaaaaaggagacacccaacattagatatctacttttgtccatcaaactttgttttatgatttttatcttgtggtatattattatacacttcggaatcggttgttccgttccttttcctggtatcaacttatgtgaacaatgagacattgagacgataaatcaactcatgatggcttcgaccaaaaaaacgcatttcggatttcaaaaggaatgttacaaatgtaacatcatcgctgatctatttacaacacaaagttttactttaaaatcgtcatggcatgatgatgttgtgatagagatgacgatgaagaagaatggaggaagaggcagacgactgacatatcatccatggagtatcctcgtctctttttcttccaagcccgaaccgcttgctctactaatcgcttagccgccttaggccgctcagccgttgaggagacaatctctatagcctcttggttagagatcacatcccatatcttttacattcaaaccaaagagaaataaaaagattaattactaaagatgccgataaataatttaattaagactgtacaaccaagataaaccaagtcgattcaaatcgaaccaaaatgtatacaaacaccaaaatttatatacatttgaactttaaaaatctatctacctaaacatcaaagccgaaccaaaaccactcaagtcgattcataatagatttatataccaatgagtaattttcattaaaccaaaaaactcaaaccaaggaaaacctaaattcggattaaaaattcctaaatcaaataaacaatattccaatttgcttttcttttggtattaccaagtctcttattcaaatgtggttatttcttttctttttcaaattgactttttataactttttgaacgttttaagagtgtggatgagtatattttgtttgtgtaaaggtttataagtatttaccccatcactggccaagattatgaagtggtctttagtagagatgtgtctttgagtgacttcagggactgagaccaatccatactctttaatacagtagtctccgaatgctcttgacattgcgagccccggtgtttctgcgtctggctgccacacacgatggactcccggctcatcatctagacagaaaacccgccctttgcagccaattatccgctccttctcctctgttttgtttttcaaagcaacccaaattcaagattaagagtcaagaattcactagaatatacatataagatttgtattttgtttgcttctttgatttctaagaggacggaagttaaaacttccgagatctagtaaggtaaaaatgcttatggaatttaagagggattaagaaaactaacgtggtagattcggtttgaaatcgagggtgagctgaaccgcaaccaagcttccctcatccgactccatggctagtaccgctcttgaatcgcctacatttgctacataaataacttcaccctacatacgccaataaaccattaatcagtgaacagaaaaattctcaaaaaacgtttactaacaataggaagaaactaatattcattttaagttttacctgtctcacaatggttagagctgttgtgccgctatagtaagaatcgatcttgcggtgatgttcaagctcttgatcaaccgttgcacacgtttttagataggattgcttccatatgtcgaatcttgagatttttttattagagccttcgaggtcgagctcgggttctagagtggcctgagcaagaatcttttgccagttgcaaagaagcgacaaaggcattgagtttcttacttgtttggctacatagtgaccccatggaccgtgtccatcgaatatcccgcagaagatcatgtcttcttggcacccaaatccctgtttaccaaagataaatgagactttttacaagcataagtactttttcataagagtcttgtgaaaatatttaatttaagacgcaacgagaagctataaacatactcataaagcggtaaataacataaaggactatataaatcaagatgatgttattgtacctcccaaacgagtgcacaatcctgattaacgcctttttcgccgcgtttggagaaaagagaggctaaattattagatccttgtacattaacataaccagaggatttcagaatcaattcttttttcttagcctcgcttgccatctcatcagcagcttcctttgcgtcgcagtttccattgttgttcttcactttctttatagaaaatgatcgagctaatccattgaacatcgatgagaaatgtcccatcttttaaataccccaaaagattaatatatcaagcaacaacgagaaactttctccttaagcttcagatgatccttaaaaaacaagaaaccaaaacttctttagaaactttgatagtgctacaaggagatcataaaacagaggttaaatcttaaaagtaagaagatgagtcatagtgttgagaatctagacactttgaaaaacaacaacaaaaattgaacttcaagtggaatattcataagtctgacatggaattccattgaaacaagcttctaagatttatctttgatgtacatgattttgacttgaagggaaagagagtttctgtttaaagaaaacacatctagagatatttcttaataaggaaatgtaaaacaagttgcaagattccaagattcttctcttttgctttttcagggaaaactaacaagaaacaaaaaaaatgagaactttctcagcatgttgttgcttaatactatatattaatatgaacacctaaaaggctaaaagaagcaaacactcttaatctccatagatttgcttcaaaaataagtttgataagataaaaatttctaaatttgagacaaaggagcaaaaatcttcatatcacccgaagtgaaaaagtgacgaccaattttacacaattttttttttactttttatatcaagaactaaaaaccttggtttacttggattcagaagtagaaaggaaaaaagacagaacccaagaaaggtttctcttcagctttcatttagatcttgtcacagaccaatcatattcttcttacatgtataaagagagagaaagatttagacctttgaaatggcacgtaaggataaacgctcgagaaaagctggctaaagtatccaccggagaagtagctaatggagcgacgagagaaaaatatcagaatccatttaatggaacaattaaggattggagttgaaactatttttaagaatagttaaacttttttttctggtacgttgtttgtctctgttcattttttatcttgtggcaggagaaaggacaaagaagtagcacgacatcgtctttgttgggtttggtcttttgtggttgatataaaatcattaaatttcaattattacatttctccacgatattttgttgattttatgtatgtttttaaaatgtaggttctttgaataaattattgaaaaataaaattgtttgatttagaacaatattgtttgggattatactaaagaacgacagctacatgatatatttgatataattagacaaatatatcttctcgattgaccataacaatttaaagaacttaaatagttttaaatgatgttaagatttgatcataaacgatagattattgtcagaaaaaaatatttaataaaattgggtacatgatgaaatgggttatgagatggctgactatgtcccaatcgttacatcaagggtcaaatgaaacagatccaaaacattcagtaaatattacaattcttcgagaatactaatcaaatttgtttaattcttcacttatatatttctgatattttttcgcaaatcagaagtcaaagttaactaatttcgcaaatcagaagacaaaattttcttgtggttaactattaacataaatcataataattggtacaaaattaggtaaccgagagttgttaaaagatattaaaattaggcaagcaagtaaagaaaatcatattccatagttggggaatccaatcatacatatatgatgttatcattgattatttatttaacattgttatgaaatatattaatacttttaaatggaattgcgtcatatgattatcgtgataactatattcccgcatgtcaacgaaaccaatttagagtaaaatattcaagtattgttatgaaagtgaatatttaaatacgtacgtgaacgtgaacatagttgatgtattacatacgtatatgattaaaatattatcaactatctttctaactgaacaaaaattaggtcaatatcaacactttaaaattaggtaaatttaaaatttataactttcactttatttatgcatatgtcagtttgagtaaagttaattttgtaagttaccatttgtttactattacttttagacttagagagctttctctcaccaattagagttcttggctttgtcttaaaaggtttgccattagtaggttatcaatcacaaaaataaaaacaaagtaatgaaactagttataatatattaatatcaccaagaaaatagcattacaaaaaatgtatgaaagtatcacaaagagtaacaagcgttatcgtttattgcttttgcttgactatatgttaaatgaagttttacataacagattttgtatcaagtatcggatacaatgaatttatattaggataaaaacatataagagattttaatcaaacagattattttggctacgcattttgtttaccgaccaaataagatgggtagaaaaagcatgaaatcgatagaaatgacttgacaataatgctctcttaacttttagtaaagtctagtagaaggcactgcactaattaataattttcaaaactcagacaataaagaaagaaaaattgctagaagttacaagcaaaggggtacctgtaaactacaaaagattgtttcattcaaaaaaaaaaaaactacaaaaacatgcttcgcttgttagcagcaataaattatatgctaatgtttacatttccctatgttataagaataaaacgaactagattttaatccgcggtataccgcgggacgatttattttttgaaagtaatatatattaaaatttgcaaattttatttttataaaatatttatattttacagtttataattgttattaagtaacgttataccacgaatccatgagacaattgttaaaaaactgaagttttaacccctgttaaaacagcatattaataatattttaaaattttataaatattgattcaaatacatccaccatataacccaattacaaaataaaacccgttctgtaatttctttacccgtcccgtgatttgttttttaatgtagtaattttttaaattaagaattattttttatatataaaagttttgcaaattgtatcattctctaatacatttatattttatagtttaattttatatacagtaacattatacataccacataacatttttggttttatataatcttttctaaattaggatgatttgatatgtttaatattaatggtcttaaaaataataaattaaagctttaacccgtattaaaacggtgaattaattatattttactttttttattaatgttgattcaaaaacccgtccctccaaatccgtcttgccaaaaagtcatttattttattaatattaattttgttaatgatatgactctgaattttaatctaaacattttagctaataacataagagtgcaccatatttatttaataggggaatgtaccatatgacccgaatgcacttttatacaaatccaccaaaaaagtcttgcaaaaatactatagagataagaaacgatagtcggttttgataggtataagattagcaaatatattagttagcttaaattagttaaagaatacaaattgaaaagctatattacactttattcgaatatagtattaaaacttatataacatagagatttgataaatttttaattgttgaatactttttttgtgctaatttttatgtgattaagatttaattgatttcgtatataaaatattaaattgacttatttgtttattatttggtaacagatagatatttgaatattcagtatattttgcttcagtttaggaaatctttgatgatccttctttagatccaataagccctataatctagatattaacctgcagtataccgcaggtaggcttatattttagttaaactaaatttttttattgtaaagatgatttaaaaatatatgatattatttgatttgattttaaatgtatagtaaattgtgagttgtatatgttttgttgatattatctatattgtttagtgtttaaaattatacacttgtagtttgattgttaatttaagagtttcacctgtagtataccatcttgtattaatatcgatctaaacccgtcaattctaggattttccagcttgtattaaaaattgaatcacatctaatatgttattaattattgtagtatataagattataaattttcaatataatatgtatgaaattgaatataaatatttcaaattatgacccgttacttagtagaaagttttcttaaatctatttttcacccgttataatattttttcatgtattgaacagtttatattcgtttttaaaaattcaaattatggcatatacgaaaaaactctaatttgttttttataatgatgatattatttttccgcaaaaatagatcatataaagatgagaagtgaactataataattaataaaaaattaatatgataatttagatatcaaatataatttgttgattttaataggttacttttttggaaattaataatgtatttcatttttctaattaaattaaattaattaaaatttagatatcaaatcttatatgttgattttgattggttattatttttggaaattaataatgtatttcgttttttaattaaatttaattaattaaattagtatttgactttttaatccttaaagagataaattaatttactctttaaatttttatttctaatggcatacctatgtaattacttacaaaaattaaggttacatttaaaatgtacttcccaaataatatagtaggataataacttaatatataagggatatgtctttgatattgtagaatttcatatgcgtagaacattcgaaaaaatcatctttagaaaaccagaaggtgtaggatgatccaattaatataaatttatatttctctaagttaatatcatgttgtttagggctgtttactataaaaacattgttcttgcatgatcaaacgagttatgctgaattagatatgcttataacccttgccaaacaaaataattatattgattgatctatatatgtgataaatattaaaagaaaaacatttatttcaaataagataatagtaatacatacaagcaagtaagaaattaaaatcccttaattaagaatatataaaacttaacttattagaggatgagcaattcgaaaatagaattaaaataagtgatcatctttgacatgttcaaacaaataccaaaacgtgtctttttcacaaaattatattagttctttttcaatatgagtatttataaaggttcgaaaatcattgaaggagataattcaacaagacgagtcgttccacctaaatatgaaattaatatatataagaaactgtataaagtattagaaaaagctaaatagatatataacttatttgtgtataagaaatgtatcaaataatatacaaaataaataaacattaatcctgaaaaagaaaatatttactttaacccttttcagcttattgtactggtaaagatggaaaatatatgcataaatgataaatgttgtatgcttggatcactattgaaggcttttgctgatctttcgacctttggtattttgttcttttggtttggttcttcacgaggtttggttcttttggtgcagttaaggttcgtgggggttctcttgtttggtttagtttactttatacgaactttattcttcctttgcaatagccaatatgaataaaaaaaatgataaaaatccaatggtgagcatgcaaaattcgtataatacacgtaggtcgtatttatacacgtttaacataaagggttgtaaagtatagataaacagtttgatatatattgtatacaaaaaacaagcatatactattgtacatgtgaaatgggccatgttatgtacctatcattgaaactataaaggtacatactgacatacataatccaataaagattaaacatcgattgagtgtactatttcaaaaaagtgaattaaataatcatcaatcacacacaaatatctcaaagagtattggttgttcgaatgttattgtaaacgagttattttatgcaatagacagctcataaaaaaagggttgattggtctagtttgacttcgttattacaccatgattatggctttgaatagtgatccaaccgcacattatggtatattttaaataataacaaaaattttctatatatatatttagagaattttgttattatttaaactgcaccgcactttattcgcaattgaatcgtaaatctatattccggtttgatcaaaagatattttttttgaaaccgatcgattggcaattatctagacactgaggcgatgaagcttcggctttcacattactcgaggagggactagtcagtgagacagttatggggactgtgtatgaccgcttgtgacggtagtcttagagtgggaccaaaaagacacgcataagaaaacaacaaacactgaatttttgtattcgttggatgaataaatccccaatatgtcggcaacaatcatgcaacaccaaatctttttctctgttttcaattattttcttgacgtgatataaaaacaaagtattgatagtagtaaataaagaaatggtttttgacaggttggatatttgaattttcaaaaccatttttctgatttttttcataaaacaaatcgtctagtgtgtataagaaaacagtaacatactaaaaatagactaaaagatctccgtatctttctttctaatcatgtggaactaaaaaatacgtgttccaggccattagatctgaacctacgtggtaatgagtcatatggacctatgcatgaaaacgtgacgaaggaaacaattaaacaaaggatcactactagaccacaaccaagagactcgatgatcacttcccaattttataggggaagttccaattcggcgaccgaacctaaggtcgaagaaccacatgatgagttcggttctcgcggggcccataagtgagcccaaccataagaacttttggataaaaaagttccattctgtggtcgacacgtagctagtgagtagtgaccaacaatcacatgtgtgacggtgcagcaccggataagtcattcctttccataacctttttattttcaaacggaacatcatcacgtttaagttttcctaatccttttctgataagagaatgaaacgtatttactctaatttagtaagaaaatattactaattataatcaacgttacaaattaaaagtaggtataaagtagcgtggcagtattttctatgaatatacttctttatcattaaaaaaaatatatatggatatacttttgtgtattggttcacggaaaatcaactgttgtctgagtatttatgttattttaacaactgctgattgattttacttttgaaaaaaaaaaaatagaactattgagtaaattttcattggctgatttctagagtttaaaaaaaaaacagtggaaaaaagtaaaactccaatgttgtatgatattggtgtgaaaaaacccataaaattagcataaaggcccataattattcatgaaattgttcagaaccggtagatttccttaggttaaagtttactccatacacagaccaaaacatcaaaacaaactttgcagatagattaaaaaacaaacttcaaggaaagatgaagaagcaaaagatcttctgaattaggtaaaaagagcaaatacaattagagaaaaaaaaatgaaaatgaaacatgccacctgattgttgttggagccgataaataaaaatttggtaaattaccttggtcaaggggcaagaacaacaatgagtcaaaatttggtcggtttgttttaagcgtgttcattgttcaggcttaaaattcaacacacaaagacatcatcatagaaattatacaaaatcaaaatccaaattcaacaataaatagatccatgaagatacccttagtgtcaatctggtcatagaactatacctaaattattagtatttcttttaacggtaaaacaaactatgtatcggcaagtgcttgatcctctaggcaatacaagaagatccatgaagatacacttgtgacttgtcacttccattttagcttgaactccactgattttgctttttatctctacaaactcgagtgatgagaccaatcaccgagggccttagatgaagaaaataagcaccaacttccatttcatacaacttgactcaaaatcacacaacaaaagctgatggagtcttaagtacgcaaatgtctaacatatataaagacttaggggaatcacctttaaaacacctacgcttaatttacatgacatttagcaacaagatgcttaagtttacgcttaaccatatatatcaggcaaccgaaatcaaatttaagactcacacaaaaatagaagaagccaagactgtttttagaaacttgagaaattactagcattcatacttagggaaaatatacaattcaaataatttcttaccgtcaatctttccaaacccttcacgatctcatcttactgtatccaaatctttatcatcatgtaaacaaactcaaagttgcaggcttttatacgttttttcttccgttgatatagaaaaatcaaagcgttatggatattttactgttaaagtattactagagaagagaaaaaggttttctcctttaagaattacaagtctctttatactgctcgattttaatttagtgataaattcattagtagactgatgatggtaaatcctctcacacacttgacagagaggtaaacaatttcaactctcacgtacggacgcatcactaacatcattacttcaacaaataaataaaggagcatgcaagaattacaataaagccatatgagttggctcctattccacctacacaaccatacacgagccctaataccatggtgtccaaatgttttggtgagaaatcttctaacggacaagaaagttacatgaacaaaagtaccgatagtatataaacatccaaccaattgtcaccatcattgctatgtccagttgtccacgccttcgaaagtatatgaaatgcaaaaaatacatatcatcatgaccaaggaagatgcgaagccgcgccccctctggtcctaatcgacatgtttggactggaaggactttgtacatgcatcttctacaccaaggacacaatacaacaagcacaccatatggtttaactaaccctgatgaacatattacaatcattaattatctaatattatatatgtattgtaaataacaacgattttcttacaatgttccatatccacgtacatatacatgactgcataaattgaaggcactgagtgacaattgtaaggccgcccaataacatctttcacgataggaatgactagtcgctccttggttgctatattctcatcaccactaattctgttatgaacttgattcgatgaatgcacataagagtaccgactatacataaaaggtgacaaaatctgtcatatccaatcaaaattttgaattttcttaagcaatttgacatatcttatttaatttctaatttaaactataattcataaaaatttagctagtaatttaaatcaatactagattgatatcccgcgctgtcgcccgaaggcaaaatttatcatttgagcttctcttgtaagtatttgtattgggttgtattgttatgcttttgtatctgtgtttcatcatgggttggaaactgttatcaataagatgacaacaaaaaaaaaaaacaatatatacatgtagtcattctaacgacttgtttgcaatttgtgttttaatagtcttaaggttgcaaattttctaattccatgcagaatattcatgattcttttttttttttaatatcaatttgagaatccatatctccaagactatgaagaatgttagaatgatattacactataaggatgtagtactattatggacggtaaagatgagtcacactgaaaatgaaagaagtgggactgagaaagaaaccaggctgcatgcagttggatcgagatgaatgaaaaagtgtatcatttctttgctgaagacagatctcatccatgagctgagaaagtttatcagtgccttgctcttttgagtggtcacatggacgctggtcaatgattcttatgttgttgcatctgtcccaattagaagacaacatatcaggctaatgtccaattaacacatggtggatgctttcacagccgtttcatgcttttacaaaaaaaattggtggttctaatgcaacactggatcaaaagaactatcaagaaagcatgttccacatttaagggtttgaatggtgatggtagtcgggatggacaaatccgtcagcggtttagtccgttctatttttaggatagacaacaaaccgctgcagaccaactctatttctatgtaaaagagcggtcggtaattagtctccatcagttttttttttgaatccgcactactacagacacaatttatgattggtaaataaaaagcggtctaatccgaaaacggatttgtccgccttaaccgctgcaaccattcaaactctaagccttttaaagctcaacctaaactcaaaggctaataggctatcaacattcgtgctgcttctcgcggttaaggactccaagaacatgactatctccaatgttaaaatctgactaaagaaagagttagttacatgccaagatcaatggaacgagcaatgacgttttggccttcccttccatgtaaactatgcatcgaagatcccaccataacacttgttcgggaatactctataagcatagaggacagagagccacttaattaacatcactacaaaaaaaaaaaaaaagactcatttgcattacataatttgtgtcaaaaaactaaatgatactaatttgaatcacttatttacaatcgatacaaaaatattatttaacatcagttacaataattgatgctattattgatatatatgacattatttcattaaaactgatacaaatctagaacgtttgcatcactataacaaaaattgatacaactctaagaatatacattatttataaaataatacaaaatttgcatcaataacaaatgatgttaattaaaaattaagcatcagttgtaaaaaacgatttaattaattacttaatttgtcaaagtcccacatcgctcccatgaaaaagagacttcatagttttcttatatatagtgactctaagaatttacatcatttataaaatgatacaaaatttgcatcaataaaaaatgatgttaattaaaaagtaagcatcaattgtaaaaaaacgatttaattgattacttaatttgtcaaaatcccacatcgctcccatggaaaaggaggcttcatagttttcttatataaagcgatcttggtttttatattgtcaacaaagtgttaagcttaataagcaactatttatactaaacatatataatcgtttgcttctatattaattaataaaattaaataaatttgattactaaaattgatatttaatataattttaaattttttaacattagttatttataattgatataaacacctaacatcacttcttattatcgtaacaattattaacgtcattttgataaattgatgcaaagactaatatcatttatagtaattgaagtaaaattaacatcattttttgcaactgatgaatactaacatcgatcattataatcgatgcaaataattatttggaacgatgcacataatttgcatcaccaattccagagtcacttatagaagtgatgtaaaactcatttgcatcaattataactgatgtaaatatacaaaataagtgattcaaaacaccactttttattgtagtgcactttagactatgtatgtacaaaaaattagtttagtatatagaggataatccaaacaaaactaattttgaaccaatataaaatgaacttgtagataatacaaaatcctagataaaagaccattttaaatcccacaagagacctacatataattcgtcaccaacgctataatataggaaacacacaaggataaaagaaagaaagattataaaaatggcctctctaaacatattgcgacttgttcattgggatcaagtaaaaaggaatttggaaattgacatacaacattccatcattaatattgcacttcttgtgcatacgaagaatggatcaaatcctcccgcagacatcgtaagaaaatggtcgaagcttatgagagtctttacgttttgaaagcgcggcggaatttttatctcaattgaatttatgaagcatatttctgttttttttctccctaaaaaggtggtgaataataatatttagagatattatatgaaatgtttaaaaaaaagaaacgaaacaaaaagagatattagatggaataatagagcgagattattagatagcaattaaacaaataccacattgtatgtttagtttctcaatataactaccgaatctaacattagaaaaagtattatgatattacgtttagaaaggattactcattctaagaatcaaattttggaactcaccagaaaaaaaaatcaaattttggtcctaccaagctataaaaaatttgattgttattttcaaagtggtattccttattaaattgaaatttatttatgataaacgagcatattgtttctgatatcaaactggtgaagggatttagcataactctatgcatattgtttccgaaatgataaacgagcatattttttcatccaccgtaccagtaactctatgcagcttaccactatattatgtagcgttttgaaattgagtttgtaaattatgttgattttcaatgcttgtggtgagtttggtttatgcagcttactttggcttataggattacaagttaccagtataactaggctgcaattttgttgattttccagtggtgacatgatcttattggattataatcacgcatcaaatcctgatggagtcttaagtacactagtgtctaacatatataaagacttagtggaatcacctttaaacactaacgcttcacatgatacttagcatcaagatgcttaagttaacgctttaccacaaaatctagggtaaaataatcttaacaatacacaaatgtggtagaaaaacataaagagaaagtggtataaactaaaagaatataaggaattgtggtacaaattttaattttttcaatggaaaaaaatctcaaacaaaatcttaactatttaaaatttaccagaaaaacccaaattaatttattggtacaaattaaacccaaactagaaaatattggcagattcataacacgatttcaaaaacaaaatccaattttactctaagaaaaaacttaattctatttgtttgaaactagttgtcgattttttttgtttaaaagtacatatttataatataaaagtagttatataaaataaaatttcatttgtattcatgaaataaatagataatcatcttatatatttaactgcttatctaacatcgacctattttcatttgttcttgaaatatagacagttttgctcgatctagaaaacttaacactctttatgcatcatttttggtacatgcataccgccattattgtagtgctaaaataaattggataagagatgttaacacaaaactaactatataattatgatgaaaaaactaaaatatgaaaataactcgaataacattcaatcatctcgatattgagaaaacaaaaattagagagaaataagcaacgaaaataataatagagaagcgatttggtttttaaaatttgaaaagctaaaagtaaaaatatatgaatagatgattaaaagcgaaacgtcatatcatttttccgtgataatatctaaaaagttaatgagaatatatcaagtaaaaatatataaagtaaatgagaatttttttaagtttcaaacaaatagaattaagttttgtctttaaaagtaaaactggaattatttgtttgtttgagattgtgtgtatgaatctatcaatattttataattcaagttttattttgtcactaataaattagtttagttttttgaaggcgaattttaaattagtttgggaattttccagatttatattttcacaatataattaaattatattgatggattgttttatatatataactatagcactaaacaactttcaataattcttccgacgcaaaagactctcttgagaaaccctaatttcaactgaaaaaatggcagaaaccgccgatacaatcaacaccaccgtctcaacgccgcagccacaattagaaagcagatcagacgagacaagttgcctccaaaaacacagatctgacgcaacatcagaggtgacgaaagaagagaaatctggaggaatcttgttcagcgtttggccaccgtgtcagaaaagtcgcgactacgtggtgaatagtatgatcaagaccttatccacagactcgatcctctcctacaaatacggaacgattaaacctgaggaagcctccgccgtcgcgaaatctatagaggaaaaggcttacgacatcgcatcaaggttcgtgtcgagtgatgggattaagaatcttgaggtctatggcatagagactagcgagcgtatgattgaatctgcggaggttcgattcaaagccaatggaagtatggaactactactaaatcaaacaataaagatgatgcagttgctgatttagaggagaagcttgagcgttaagtttccttatctcttttatgatctatctctagggtttgcttttgctagatttgagattctcaaaccagatttgtttccttcttcttaatatgagtcgttgattgcttttgcattatgtggtttagtatcacacttattattcctatataatgttcaatttctttcgtccaccaccagtaactctatgcaacttccctcattaggttatgaataatccttgtaaacttaaaattatgattaaggctaggaggcacgttgatagctcaaacggattcgttgaggctcgtgaataagcaaagagaagcagagaaacagagtgaaaacagagcaaggagaaacagattgtttaaccactagcttgagagtctagtgagttgtatataaatagatagaagagtattgcacaagttatgtattgatgtgtgtgtaacaaacgtatggtttgttagaggagagttaggagatctcttgaacaaatcttcattgttagggcttggaagaattttaatctgaaactcacaaggcattgtaatctggaaattcaccattggcatctaaatccaacagagccagagtgtttccacctattggacacagcactacttttaacaacatcttttgacggaagctgccactagagcatctgacacataaaactgtgtcctcttgtcttgcactacaggttttgagttaatcgcttctctttcaaaacaactttgctccactgaattc

SEQ ID NO: 754 - DNA, 97905 bp, Arabidopsis thaliana
  modified_base (57528)..(57528): a, c, t, g, unknown or other
aagctttaagattgtctacaaaaacaaaaaaaaattcgattgtgattcgtataaatgtttgagggtgattgctcaaagaggtagccttggttacattaatccataacatacattacatatatatatgagaactcctagtacaaaacctaataacatgggcttagatggcctttaaccctttctctaatcatctttcaagctttttgaaactcctaactagtcaacaagataatcaaaccattccaccaatttagtatgaacgtttttcacctaccatagaacttgtatcatcttacgtccatgttttatgtttgttcttaatgttggtttcttgtgtttatttgctcttactgtaggtttcttatcttgtgtctgcaggtggtcgacgatatcacttgtgcaaagaagaaacgacacagagacccatttgcactcgtttggtttgacatcactatcacttatgtttgttgctcttttattttgtatcacttttgtttgttacccttttggctccgaatggagaaagcttatcgggcggagcggatcaagcggatcaagctgaacaaaagcggattaagcagatcaagcggatatagcagtataactgtggatcaaacgaaattagcggtccaaataaagatttgaatggtgaaagcggatcaatattgtagatcatattatataatatttaattataaattaaatgataaataaagtaaatatatctatttaataattattaaaacattaaaaaatatatttcaaatacaacatcaaaaatagattcaaatctattattttgatttttccataacttataaagaagaagatttaacaactattaagattgggatagattcaaatctattattttgatttttccataacatataaagaagaagatttaacaactattaagattggaaaagtggaagaagtgaagaactatggtttcgtagagttggaggcggagagaagtcgagaaagtgaaacccaatattagggttaatgaagcattaatgacaacaatcaaggcctattaggtttactaaaggatctgcgcgtctgtgaaacaggtggttcaggatgcggctcggatcggctttaaaacgcaggaagaattacgattttacccttaattgtctgtttttttctttttcctgtaacgtaaaatgaaaaaacggcttatgtggcttgtcattttgccataacatcaccatcaactgtatctaaagcttccatatccctacattggtttcagaatttgtgtcaataacctctgtcacttccatttcttctacaaaatcatcatctgaaaaatttgaaatccttataaaattatgtagtcccattgtagccattacaactatcttctgcacatgagtattatatctaggaaattcacaaagaatcctatattttttcttccaaactccaaatgttctcttaattatacactcgaaagttttgtccatatagctacagttttaacgaccacatacatttgtaacaactttttgctacttataaattacaaattagtaacagaaaacgatttaataaaacatgtagctaatttgttacaacccgtagcaatttagctacattttgcgagacagaattttttgtaacaaatatgttaccaaatgtgtttaaaatttagttgcaaagttccacaaaccaaaattcgtcgccgattttgtaacaacagttgaatagaatatcatttaacgttttacgattattatcaactagaagatttgtaagtattagcgacgatttatgcattttattttagtaacaaagttgatatgaatttagtatcaaaatttttgttgtaaattttcacaaaacaggtttcgtcacaaacttttgtgacaaagtaagattattaatattgtttaatttttacaacagttgggtcggtagcaactagaaataaaatggagactcacaatatgtttcgtagcaattatgacaactttgtgactgcccctgtctcatatcaaaggccacttagtgtgcggtagcaaattggttaccaaagccactacttatgcgacactataattgcagcaagttgattacaaagccacttcttttgcgacagtcttattatagcaaatttatgatggtgtcttgtcgatcttccaccaagtttttgtttaattattggcttcgttttctctcttgttcgaatctatatatatgcatcattcttctttgttgtatattcattcaaatctttggcttctcgttttctctcttcatatctagcaacaaaaaaaaattctttcatattcattctaaaatttttcatttgagcaaaccgtctcttttttctttttaatctattctattatctttttctttgtaacaaaaaaatgtcttcaagcaataatatagaaatcgtaagaaagtggatgtataatcgtattaatcgacacactggacatgtattcgacgaatatgaagccgggataagtcaattttatagagtttgcaaactattgattatatgatgggatcgaatatggtgtccatgtcgaaagtgtagaaatgaagaacttatttctattgctaccgtatctaaatatttgtataatagacgatttcaacccaactattatgtttgaacagctcacggtgaggagtttgagcacagaccgctcacggtgagtagtttgagcacggacaccaattttacgatcaagccgaagaaaatacatttcaaacagttgaaccggaatggaattttaaaactagttatattggagatactgtctcaacggaagatatgtcaataccacgatcaaggtaaattattagttatatatatatatatataatgaaattgaatttaaaataattaattaaaaagtttttctttaaaaaaaaaaatatatatatatatatatatattgctcttaaaatttggttaatagaaatattaattcgatttacattaaatataaatatatagaaattgataattagaagtggtgtgctagctatatataaagaaaaactatgttctattgtatattttattttctcttacattataaattttctttatcttaattcatatgtacaaaacataaagtccatatataaataataataatacttattattaattcagtttcatcatataataataatgtttttacatctactagaaattaaaaatttgaagtggtatgctataaatataaattattatattagatatatgtgatcattgaaaatgttataaatcttatttatcttattccatacaaaaaattataatccatatataagataataataatacttattattaaagataaatattcaaataaaaataaaaaagaatgatgttataatttggttaatttaaatattaattcaatgttgttatataatagtatttttatgtcatctgatagaactcgtgtatataaatatatgtatttgtgtcatctataatagaaattcttaaactcatttgttaatgtatatcaaatatattatttaaacatggagggagatatatatatatatatatatatatatatatatatatactttttgaaaatgttataaatatagatctttcattagtactttcatttaatacttactttaaaagtctattaaaaagaaacatatatatatagtagtaaaatttggttaaaagaaatattaattaactcaatacaaatatcatctaacataaattaataattagaagtggtatgttataaataaaaattattatattagttatttcttatactcgttaaaaatattataaattttatttattttagtccatacaaaaaataaaatattaaattcaattttgtcatataatgataatttatgtcatctaataggacttcatatatatatatatatatatatatatatatatatatatattgtcatctccaggaacgtcgagaagggggacaaacagctttgattggatccgatctggtagacagagacgaagacaaagatgaataatttgaagaagatttctttgttaatatatcaaattataaagatataattgtgggaatttctaattagtatgtacataagaataatgaaattccattaaataaataaatatattacttaattattaggaaaatagaagttaattaataaagaaattgtgcatatcagatagttgaaggttgtttatcaatttaattgattatatatatagaaaagtatattatataatttaattaattttttatcgttttgattaatgtacatattactaaaaatactgtacaattttatgaacccgcggttgaatataatgcttgggaagcccataatcctgagaatgcagattttttcaaccgtttaaatacagcaagtgagcctctatatgacaactgtgttgaaggcttgtcaaaaattttgttggctgctgatatgatgcacattaagacgaaacacaatcaaacagaagcgtgtgtcgatgatactccggacttgtttcataaggttttaccaaaaggtaatattgctccaagaaattattatgaaacagagaagttgatgcagacttttagtatgtcgtaccacatgattgatgtatgctaaaataattgcatgatttattggggtgatcctgacgaaaatctaacagtttgcaaattttgtgaacatccaaggtacaaacctcggaaagcatcggttcgggctactagaatgcatattccatacaagagaatgttctctttgccaatattatacggctcaaaagattgtatctatccgaaaagacagcaccaaatatgagttggcacgcagaatatacatgtcttgatggagttatgcaacatccttttgatggcaaggcatggaagcatttccaatatcttaatcctgagtttgcatccaaaagtagaaatgtttatctcaggttatgtactgatggttttaacccattcggatcgtctggtggtaactattccctttggcccataattcttactccttataatctcctgccagatatgtgtatgaaaagagaatatctatttcttttcatactagggccagggcgaaaccatccaaaacggattttggatatttttttacgaccactgatagaagaattactggaactttagatcaatggcgttgacgcgtttgatatttcagtgaagcaaaatttcaatttacaagcagttttaatgtggactataagtgactttcaagcatatgggatattgtccggatggacaactcatggaggaatgtcgtgtccatattgtatggatcaaacggatgctttccaattgaagaatggtcgtatatctagttggtttgactgtcatcgaagatttttacctctagatcatgtttttcgatcgccaaaacgaaaggtcttttcgaaagggtcatattgtcaacaatgtcccaccatattttttgtcaggagaagaaattctggaaggtcacttggcttattattatggggtgaagaaaacagtggaatgtggtggaaacagtcatataaatagtgacatcgaaggatatggcgagacgcaccactggcacaaacatagcatcttttgggagttgccatattggaatacacatctgattcgacatattcttgatgtgatgcatatcgaacaaaactttttcgataacttgattaacaatttgttaaatgtcacaggcaaaacaaaagattctatcaactcacggaaagatctcgttttatattgtaatcgaaagaaattacaccttacatcgtctggaaaaaaccctgttcaaatattcagggtgtctcctcaagcaaaaacttcttaaatggttaaaagatgtggtgaagtttccagatgggtacgtgtctaacataggacaatgcatacacattgatcaaggaaggcaaatgtatggtttggaaagttacgaatgtcacgtcattatgcagcgactatttccgtttgcattcgctgaactccttcccaatgaagtccatcaaaaaatatcaggtaaattagaataatttagcttaagtgtacttacatagttattaatctgtataataaacttatttttgtttttttttacagatgtaagaatatttttccgcgacctttgttcaagaaatttgaaagtcaatgatgttgttcgtatgaagagtaatattgtgctcacactttgtaatctagagaagatatttccaccatttgtttttgatgttatggagcacttgattattcacttaccaagagaagccgaactttgttggccggtgcagtttcgatggatgtatccattcaacgattcatgtttcatcttaagaaaaaggcgaataacaaagcaagtgttgaagggtcaattgtggagcaatttattaatgaagaaattacaaatttcagctctcaccactttaatcccgaatcgactattgtgtcgagtagtgctcagagacgacatgctagtggtttgcctcaacagtacatctactcgtacgacgacgtgccgacattaattagaaatgtcggaagtggaagtggaaaatcatattatgagtggttaaccgatgatgacaaccacatcgctcatacatatattttgctcaactgtgaagaattggcaccattcaaaaggtcattaataatttacatatatatatatatatatatatatatttataaacgtaaaatgaaattttaattcttgataaaaaaatttccaggctatttgataacgaagctagagaaagatatgttggtctcacctaagatttgttaacgactatgaaagaaagagacttttcaagttggttatatattttggtaagttttagctacatatttcacaatttatgatgtgtatagctttgtaattaagatgtattatatacgatatcatgatcatctcataatgtgttcatacaggttcatagtgatcacacgaatacattgtatcctttatggttacaagagcttgtgagaggtccaataagacagtgcacatgttggaatgcatatttttcacgaggttataattttcatacagtaagtcatgcaatgaacaaaactacggctaactacggtgttagtgtgcgtgagagctctgaatacgctcaaacttactatggaaaactacaacaaataattcagattgcatatcatggagctgttggattgaaagttacattattttgatgcgattggtatgatacgacttttggagttgggactagaatttataagcctggtgttgttgaggtatgtgcatctcgtgtgtatgagaagtatgatccatttgttttgacaacacaagtagatcaagtttgttttttgccatattcacgtgtaaaacgacgttttgaagaatagttggtagtagtgaaagtctattcgagagaaatacttgaagaaatcatcacacaacgagaatcaatgcaggaggaaaacgacgatcttcaatattctacgacagtcaatgcattgaatgtaagttaactaattttacctggaggacagcttgaagacattcccgaagatccactaggtgaagattctgaagatcatgatagcgatcttgatatgacaaattcagaaagtcttgaagaattcaaaagttccgaagaagaataattccattgcggaaatgattattgtcttgggaatttaatgttttatagccaagtttttctatttgattttctaaaaaataatatgaataatatgttttaccttctcttgtattaactctcatactttaaatcgcttgaaacatacccaaaatattttgttgctggaataaaaccatgattattatagaatataggggtgggcatttcggtttaacattgggttcagtttggattcggtttcccttctcttggtttatttgggtttcgtaaaactctaaccatacacaaccgtagttagtttggtttgctttgtgtttgggtcagttttagttcggttcgatttggttttagttcggttcaaaaaattaattaatgtatcaaattctatgtttaaattgcataattcaaacaataccaaaaaagcaaaacctataaaaactcaacctataaatatttagagttatttacaatatttttaatattgtaaaactaggtacaaggtatagaatgttttctgatttattcatgaatcgagtacaatgtttatatacacagagagtctttctctccaagtctaactttctctccaagttaaatttaccaaaaaacccacatgagaatatttacaagatatacacacgatattcttttggctaaccccccccccccctcaagttggagcatatggattgtaaatgcccaacttgaccacgattgactcgaactcacgtcgtcccaatgccttagtaaacacatcagctaactgatccgtagtatgaactttccgagtacgaatcgttccattcatgatctcatcccggactccaggacaatctatttcaacgtgttttgttctttcatgaaaaacaggatttgcagctatgtacaatgctgcttggttgtcacaatgtgaatctatgggcttggtttgattcactcccaagtctttgagcaatgctttcaaccattttaactcacatacagttaaagccatggatcgatactctgattcagccgatgaacgagaaaccacatcttgtttctttgctttccacaaaactggtgagtctccaagtgttataaaccagcctccgacagaccttctactcacagcgcatcccgcccaatcagcgtcacaccaacctgccaacttcaaatttgaatctgacttcaagagtataccttgtcctagtgttcctttcaaataccgaacgacccgcaaagcactatcccaatgatctgttcttggggctttcatgaactgtgatagagtgttcacagcatatgctaaatcaggtcgtgtcgccaacaagtagatcaaacgccccacaagtcttcgaaaccgctctggattatccatgagtggctctttagagtaactcagcttgtgttgctgctccaacggagtgctgactggtttcgatcccaacattcctacgtcttgaattatctcaagagtatactttctttgacacaagaaaatcccttctttgtttcttgctacttcgatgcctaaaaaatacttcagagatcccaagtctttcatgtgaaaacactcccccaagtatttcttgaattttctgatttcttctgaatcattacctccaatgatcaaatcgtcaacatatactagtatatatatttctgattttcctcttcgtaaatgaaataaagaataatcagctcttgactgcttaaacccatattcaagtagtgaaccatgcagctttgtgaaccaacatcgtggcgactgtttcaacccgtaaatcgattttcttaaacgacaaaccatgtttttatcagaaactttagaaaccgaagttgtttatatgttctaaagttgtttatcacttaaaaaaactgaagttgtttagaaactaaagttgtttatttggtctttgatttttctacaggttatagcacttcaaaatggaaggatttttggtgttggaggattcaatacacgcgagcgaggtgaaagctcagcagctggtgctttgggtagagtcactcttgaacgccaagtcataaccttgcaagagcagcaggcatctgttgtgaagtgtctgaaatagtacatgccaaatggtgcgccaaactttggctcgacgcagcgaacacaaggaaccgacgcttcagtgaccagtccagaccgtgctaacaacaacatggagagtgaatatgctgatccggaccaagatggagttgatcatgtgaatgaggatgctgatgaggctcttgatggtgaggatgaagcaagtgatgctgcctttaagtgatctactctttttatggtttgattattatttaattatggttacaagacatttatcttgtttaattatccttgtttaattatctttgtttaattatgcttttcatcttattattaagacttgtgtaagatataatcaactattttgatgtatgatattaattatgcctttctgaatttctgtttatacattagaattttttttaatgcaaaacgagttaatacaccaattagaatgcattaaaacagaattagtcattttgataagttggcaacaaatatagaaagtatagttaattgtaactaagaacaccaaaatagtctacacgagttgttgctaattgctactcgagttgttattaattgtaagttataagtgacaagaattacgttacagatttgttattacatttttgtatatacattgtaacaattgttacaagaatatttattgcacataggtttttccgaaggtaataagctgttgcaattaacttcaatgaccttgtgagagtttgtaagaattaacacagagagttgtgtcacaatttgtaagaatttgttattaactcatattgtctcttcgttgtatcatttttcacatgtttttttgttgcatttcatatcacttttgttattacacttttgtaattaaggccttgaatggatgctgattttcgattcagtttttggatttagattttagtttctagattttagattttagttttaggccttgaatgttttgtagattttgtaagagtttttggattttgtttttcaaaaacttattttcataccaatcaagattttaaaattttggtttccctacagtttagaaaaactattttgttgtagttttccattcatgattttagttttttagttttcctaaaatttagggaatctaatttttactccatcaacgttatttttctcaaaaactaaaaactaattttttggagttttttaaacaaaaatatattaacaaaaatctaaatctaaaatctaaaatctaaatccaaaaactgaatcgaaaatcaacatccattcaaggccttagatttttgttaatatatttttgttttaaaaactccaaaaaattggtttttagtttttgagaaaaataatgttgatggagtaaaaactagattccctaaattttaggaaaactgaaaaactaaaatcatgaatggaaaactacaacaaaatagtttttctaaattgtagggaaaccaaaattttaaaatcttgattggtatgaaaataagtttttgaaaaaacaaaatccaaaaactcttacaaaatctacaaaacattcaaggcctaagtgtaacaaatacttactatatacttgttgctatgttgtagcaattaggttcaaaacttatgaagataaatgttactattgtgcttcaattagttagtggaaagtagtaacaacgagtgacagattattttcacgctagttgtaacatatttgccatgagagttttgttgatttttgtaagtctttataacaaggtttttgtggcaacgtcgtggcaaatttcttaccgtttgccacaccttgattttttgcgacaagaacatagttacatgttttattttgatgcttctccgtagcaaatctatttttgttacaaaatttttattatacccactattctgtttataactatattgtccaaaaattcaagtgatataatcacataacgtaaagatgcatgacatcgattaaacaattcttgcctatttctaggaggaggaccattttcaaattgtgacatatgataccgaataaccttatttcgtgaagatctatacggagcaagaaaaacttgtttgtttggataaccagaatcaactacataatatttgtctgttggaggcaaagaaaatttagaatcactgtcttgtgcgattgtgagaacggctgtatcgtgacaaaatcctggtgctccattccatacataagtgaataacatattcaaatcacatattgccataacattgaatgatgttcttccatgtcgatcccaatacatttcttgtaattcgggtttcaccttaacacaaatataaactccatctattgctccaacaaatccactataatatggccaatatctttgatatagttgcaatcattcaataattcggcatagttcttttcttgttagagtcttcatataatctgaaacaactttgcatcacatcccaaagttgttgcggtagtcgtttaaatgcgtaaataatcttacaaaactgttatcaaaaaagaaaataacttttttttaactaaattgtgtggaacaaaataaatctattggccgacaaaaaatatatacaaaagtacaaaaatctattgaacatatataatatcattggttgtgtacgagttactgattacatatatttaaataaaaaatgatatcaactatatatatagtatattttctttacaaatatgatataattgtatgtaaaaaaatttgtataaaaatatatatatattatagtaattatttatatttgtaaatttagatagtacatatatgaattatatttataattatatgtaaagaaatattaattttagttttaaataattaaaatagttacgtgaaaattggagaatatatgttaaagaggtgttgaacttttttttgtctaaaaaaggacagaagatgttgaacttcttatatgaacttgaaaacaatagaacttgatatgaaatgtgaaaacaatgaaaagtagatgtgatttatatagaatttttgataagaaaaataatatttttattctttttaaaataattactttttgaaatgtgtgttttgtagatagaacgctcataaattgagagcatggaccgttttatggatcgtccaatttttattattaaaagacaaaaaaaaatatgatccacatgtagatgctctattttttttttgtatataattgacacaaataatgaatgaggaaattaattgtgatccctccatcttaagtgtgatttattttttatacgccatccatccagaccctttgttttgtatgacttttgtttgttaccactagtttggttttgtatcactgttgtttgagaccacaaaacaatattcagacttcactcttctttgttccaatcttcactcttcttttaccggctctataaaatcatatgaaaccactcttatttctccactcaacttcactcttttttgttccaatcttttttttcaatacaagatccaatcttctttttcaatacaagaaacaatctttttttcaatacaagaaacctaagatccaatcttctttaaagccaaaacccaagacattctgcttcatccaaaattgttcttcatccaaaatgtctggttcttcgcattgtaatttcgaaaaatgatggatgacaagtttgatcaatatatcgatcaagctttagagaattatggtgatcgtcaccaagccaatccaccaaaaaaaaggagcatatattgaaagagatcgtgaacaaagacacatcccgttatggaacgattacttcagagatgatccgacattttctccgtatatatttcgacaccgttttagaatgaacaagttgttgttcatgcgtattgttgatcgactctccaattccatacttcgaacaaagaagagatgttaccggaagactaggtttctcggcactatagaagactacaacagcaattcgtatgatggcgtatggtttagcggctgatgcagttgacgaatacctccggattggtgaaagtacttcgattttatgtttggaaaattttgttgaaggaatcatatatttgttcggagatgaatacctaagaagacccacacgagaagatcttatacgactactccatattagagagatacgtggattttccgggatgataggagtcattgattgtatgcagtaggagtggaaaaattgtcccaccgcttggaaagggcaatatacacgtggatgtagaaaaccaataatcgttttagaggtttttgcttctcaagatctttgaatatgacacatatgttttggacctccaggtatactgaaatatccctatttttactgattttatctatgttttaggtataggattttgagtctttatgttatttctcaagtctttttagtgtcttttcaggtattttatgcattgagacaacaatggagatgaggagacattttggagcaaaagctaaggaaaaaaagctaaggacgattacggatttcggcccagcaaagtccatgacggtttcaaatttacaaaagtggaaatttgtcccataagattttcctatttgcattattagtccctggacattttatagggcttatatatagttttagaggtcattgtttagacctaagttcattttatcaagttctttgcaatccctattttcagagacataagatattcatccattgttttcagtgattcattcagttctcaatacagtgaagagatcctttcttactcttatcttatttgttgtgtttatgctttcttactcaattatgttgtttgtttcattcaatatgtctgagtagtttgcttgttaggaatagggtttctcattagggattcatatggtttagtagatcgccccctttgctaggttatctgtagaattctttatctttgattatacttaatgctagatcttgagtaattaactagatcttgaatacagacaatagatatgcctaccataagtatatgtagttggatctattatttgatgagtctggtttataggtgtgtaataagaatcggcctatctactaaggtgaacaattgaactcgtttagaatgcatatttaggttaaaaatctctcggcttctccggttattcttagctataagcatagggagttttgcggaacaccaccggttattccataattagagtatgagtttaaaaatggttcgataacaacctagctttcattagatctactaaccaatagtttcctgagaataccttgtttctagctctttatttaatcggttacaaccaatcaatatgctgtctttttactttgttctcctttattttcaatcatttcctactagcttaatctcgatatttaattcattgtgtgaacaaaagaactttgtggaaatcgatccttaaatactgcaattgatctcttatttgagagagtagttcttagggtaatttgaaccttatcatatactaaacaatgtcaatattcatgatcgttcacctgtttttgatgatatattacaagttcgagctctgaaagtgagataagtagacaacgagaatgattataatttggcttactatctcacagatgaaatttatcctaaatgggctacatttatccaatctatttcactaccacaagatgaaaaaactactttatttgctacaaatcaagaagcttgtcgtaaagatgttaagcgttcctttggagatttgcaagctcgatttgctattgtcaaacatccagctcttatttgggataatatgaaaatcagaaatattatgggagcatatataatatttcacaatatgataatagatgacgaacgagatggatacactcaatatgatgtatccgattttgcacatccagaatcaaccagtttttcacaagtggatttcacatattctacagatatgccttcaaatcttggtaatacgatggccactcgaacccaacttcgtgatcagactaagaatgaacaattgaaaattgatttagtcgaacacataaggcaaaattttggtccgaatcaagcttaaattttattgttattcaaatttttcatttctatatcttttgttttgcttttctgttatgtatgtttacaattttaatatttctaataattattatgttttttaaattaaaaactttataatattttattttgttttattttgtttttttttttaaaaacctacttaaaaactccaccattaaacaataaaaaaatataaggattcaacaaaaactctaaactttaaattattcaaaatttagtattataaaaatgtaaagagtctttaattaggacttacccatacaaatcttcagcaaatgttttactcaaagcttaaagccctatgacgtttcaaataacgttatgttttgtatgtctttgtggcttcaattctaaacgaaaaattccttcatagtagtttgtgacgttcttttcctattttttttactataaacaaagcttatggaccctaataactgaagcatggagactcatttggctaccaaaggtattttgttcaagataatatcaactgtaacatgttgctcgcaatgcacattcttagtaaatgcagaggtgacgaggagagattcggtactattagcgggttataagtaaatgtattatattacctatactattttgttaatatcttaagtgtgtttagggcttcttgtacggttgtaccatgtatatatacgctctctttaagattaataagattacaacattctcttctccctttggcatggtgtgattcagatgctaacggttagtaatggaattattcatctgtttgtgaaccacattcccaatgatcaatagtgttaacataagactatggacaaagagaaaggttttagatccatatagctagtgtatcacattacttgccgcacaagaaaactagtcttcttcgtcagagtcgtttactgttatctcaaacgtaatctcctcaaaccgtccatgcttctcttcacacccgtctcttccacactgcatctcattgaaatccatgactgaacccaccgaggaacggttcgattcggagctgcagaagatactccaattaggaaccaaagaagcaatctctccatcgatcatattagctatctttgtgacatcacggtcatccatctccagctcttccaccatctctcttgcaacgcttattgctgtgtcagtctcgatgtcgaacgggaagtatatgtttctcacacaaccttccttgttgacggttttgagtcgcagaaatagtccatctccattgtctcttctcttccctttaatgcttatatctacactaccaaacctcttatcttcttcttcttcatcatcatcattttgaaactccaagagatctatctcgtgtgactccactgtctcatctccattgtaatcccattggttttgattatagaggctgtagtaaccgtttgagtagtgaggtatatgataagaatgtctaagaggagtccctgcttcatctatcaagcccttttcgctctctacgcgtctcatatccgattcatcgatacaaagaaaatggtcatctagtagttcacaagcagagagtctaagggacactgtggccaaacacttctcgataaaccctctaacctctggatccttcactttgtctaatccatctggtttcttgccctgagaaagataactttaacaatcttaaaactcaacataagagatgttataatcgcggtaaacacggatggatccttaccgatataactctcttgtaaatctgagcagggtgagaacactcactatacgggtaatcaaacgttaccatttccaaaacacacataccgaacgagtaaatatcgactaattggttatattcttctttataaacttcaggagccatgaactctggtgtgcctaaagatatcaaacaactttcaacagatcataatccaactattgatggattcagcaaagcaaaaacactgaagagagattgcttaccaacacaatgagcagcgtgagagtgttgtaaacaagcagcaagaccaagatctccaatcttgacttctccttggttcccatttataaaaatgttgtcacacttgagatctctatgaatcacaggagggtcatgtgtatgaagatagtttaatcctcttaaaatctgtctacaccaattctttaccgctcttatgttcactctcttatgttttagcctatacctgcatgaaagatataaaaacattatgagtaagttatcaagagaacttcacttatgagatagagagataagcttactgtctcaaggtgccagaagtgaacatttcagtgacaaagttgatgtttcgattatcggtatcgacccaagaagcgtagaacttcatgatgcttttgtgttttaaggttttgaggagatggatctcacagtagagcctctctagctcttgaggactctgcaagaaatcgtagagctttacttggttccatgctacttctataccttgatactcatcaaatcctctgtaactgcaaatccaaattatggaaccaaaaacatagtctttttctagtttagaatcactaaacccattttttgtttaatgatcaaagatttcaacctttttcgctttgaaatgataaatctttttaaaaatcaatcatgaatcaaccaccactaaaagtaaaaagctaaaactcaaaaaaatacaaaaaaaaaaacatctatgaaaatgaaaaataatcaaaattactaagaaaatttgaaacaaaaagtaagaacttgtctttgaaaagcatgaaactccaacaccaaagttttagagaagttgatacttgaaaaaaaggtaagaaaacttaagagagaaattggattcttacacagtctttgaagatcctttacccagaacttcattgtactaaaacaacaagaacacacacatataacaaaaaaaactcaacaaaacaaaagagatgatcataataaacaaacaaattattgagagatataaaggaaatttactcttccatatcttccagtaggatcaacttcaacatactcagagtaatctgattcaagatggctgagattgttcatcatacaccccaacaaagatcagaaagagcaatacaatagctggaaaatataaagaaaccaagaagtcccaaaaaatgaaaagagctaagcaaatatatttaaatatctatgttatgggtttcttatagccttttcatcataatcatctttgtacttctgacataataagttaaacaaattaaacattaaactcagtgtaaatgaggagacaaaaaaactagattcctttttttctctgtttttttattgcttctttagttgttgtttttttggagaaagaattttctttagtcgttcttacactgaaacatgactattatatctcatgaaagatgtaaataaaggtgggtgcaagacgaaatgagcgtggttcatactatgatacgaataaacaaatctttgattttttttattgacatccacaaatcttttttgtttctttttcgcaacaaacaagtgtttgattaagatacatttttcttagatattatctttatatcaaatcaaagatataggaaataaacttcttatcttattagtttctaactagacgcgtggtgctttttaaagatattttcttgttcaatattatttaagatattatgttcatgtatacacactatataattgtaatatttttaacgagcaaatttatatgtaccttaattgtaaaatatatatgagtgaatcacttaaaagtcatatataattatttattcaattttattgtgccacataaattttagtttacgcaaatcactaaatatcattgcttcagttttttttttccaaatcttttgagccaatctttgtagatattttggcttgattttacaaaaaaatacgaataaagcgacatgccactcctttgtattatataaataaccacactattcactataaatataacaaatacgcaacaattaagcaggtaaaaagggacgaaatcatataccatctgagaagaatctagcttaaacatttggccaaatgtagttgtatgcatatgatatgtgcccccaaaaaggtttaggcaattgaggctagagttaggtacgtatactagttgtatcgcaatcgatggtgtgaccttaaagcaataactaagttggttagtcacattttttgcttgtacagctatatatgttcttctcatagattcattatgtgatgatagtggttctattttatattgagctatcgacgagaactccaagaagtattgcatgagggaggtctatatggaccaaggtaccaaggattttggaaattaagcatcagggcaaaaagtaatgttgcttactcatgttttaccacttgatttactggtcaggtaaactgaaatttcaccctccaacaatttgccttctcttggcagttatggtttttgagagtatgaaatgaaaaatttaatatcccgtttatttaattagaatttttttataattttaaatttatttgaaaatctttcttaaaatttatgttcatacccaaaaaaactttctgaaatgcgataagaaaatatactcatatatgattcatgtctttattttaatagtagaatgcaatcttagtactgaatatatatatatatatatcctcaaaaagattaaaaataaacatgtcaccttttaaagaaatgcgatggtggaatcatgtcgacaaacacgctgtccaactactaccggatatttttgtaaattgcttataaaagttttcattcttttcaatactaaaatttgtcctagatgacaaagttgatatgattaagataagtatcaaaatggaaaaataaaaaaagtcattttacaggtaatgataattaaacaattagtttatagaaaattaggttacatgcatgatcattaaatcaccaataattatttcactggtcatatgacttcttcgattaagttaatgactatttgaccgtatatatatatttattttattttttaatctataaattttctgaaaagaaacaagttacacggtccaaagcccaaaaaagacacgcagatctaagcgtttaaggtaaaacactgccatgaaggcacacaggtctaaaagagaaaaaaatacaagtacaaggcccaaacaattctagaccagaaacgacacgcatgcctaaaggaagaactgcagaagcacgaccaaagagaagggaaagactactccaaatacctgaaccaagttgagaggagagagaagcctggaggagcattagtctgattcctaaacagagggtcgagacgtgatcgaagaagtttgcacatctccttgatgaggattgcagacggtctgctgagttgagtatgaaggcaggcgttacgctctttccatagaagataaattgacgcctggaagataagcttaatgatcaaagcaaggttagggtcccttgttgctgatttcacccaccagagataatccatgaactggaccggaggagagaaatttagcatagaggtgaaatagaaccaaacagcatcgctgaaggtgcactcaaagaacagatgctccctagactcatcatgctgattgcaaaggaggcacgtcgacagaatggaaaatccccatctccttagtttatcccgggtgtgcaacctgttctaagcaaccacccaacagataaaagcatgttttggaatacgatctttgaaccaaattgaattgtgccaagacacagaagggccaagcggattaagagcctgccatgtttttggggaagagaagtttgttgatggaggaagatgatcaagcttccaaagataaacatcgtcctcttcacaatcaatcatgggacccacgtcaggtaagatagacttaatgagagatatgatggggttcctactgcgacttacagaaatccaccaattgttatcacggataccgtctctcaccacagaataaagaggcagaccaacaatctgcggaccaataaggccagacaggttgattagaggtcctagaccagtccagttgtcgagccaaaagcttaaagtagtaccagacccagcttcacagaccaaaaaaggtctagctaagctccttaacttacacagcttcctccagatccagctgccagagttagcagggtttaaatcccagaagttcctactaccaataaggtttattttcacccaagaaacccacagagaaccagccttcgtaaagagcagaacttcaaagcaaagaccttattccaagagactaagcgtttaaggcccaaccccccccacagtccttagcagtacaaaccacctcccaagcaatttttgcaccccgagctgagttaggggttcctttccacaggtaggaactgcacatttgttccaacttaaggagacactgagtagacagcaggaaaatagaagttccagaaattgattgttgagtaaataacagatttcagaagttgaagcctaccagcgaacgacaagtgtctaacagtccaagaagcaaacttgtggttaattctaagtatttaactccaaacttgtggttaattctaagcaaagttgaagcctaccagagaggctggtagtcctgtctgcgcatcttttgggccatcagaggaacccccaagtatttaactggaagagagcctagagagataccaaatttgtcagagatacctctcaatctagtaatatcggcaccatcaatgagaagagctgtcttttgcttgttgatacccaaccccgaacctcttttgaagtcatccaagatagagagaatcccagcaatggaggaatcagagtcatcgaagaagaccaggacatcgtctgcgaaactcagatgagtgacaatcagaactaagcacctgggatgaagctgaaataaggagttgatggcgcttctgtccaagagcttagcgagaatatccatcacgagaacaaacaggtgagacgacatggggtccccctgtctgatccctttcttacccggaaaatagccaatcaattcacgttaaacgcaatgctataagatggagtggagatacagattcttatccaatttacaaaagtcggagggagatccattgccttaagaacgttgagaagaaattcccaattcacattatcataggccttagataaatctatctgtaaacagcctctagagacttccccctcaagatgaaacccttccattaactctgaagcaagcaatacgatttcaaagagtaatcttccctttatgaaaccaacttggttattttggaccgcctgagagatgaaaagctttagaagctgagatagattcgagtaataaccttgtatatcgtgttgcagcaagtcactgggcgaaactgagatagcttatccgcccctatcaccttaggaataagagttatagccgtcatattgaaccttcgcagcaaatgacatgtggtaaaaaactctttcgcagcagcaataatgttatccttaaccacataccaagaatcccaaaagaactctgctgggaacccgtccgaccccggggccttattctttggcatagagaagacagactgagtgatttcttcaactgaaggaatagctgaaagctttgctgcaagcgaggtatcacaacgaaagcggtgcagagccttaatcgtgtcaatagacaaaggaactgtatcctcattttcagaaccaaaaagctgagtgtaatatgcaacaatcatatcttttaactggctgacattatccacctttgaatcatcatttcctctgaggtacttgatgagattaacagcttgatgagcaattaccatttcatgaaagaacctcgtatttgcatctccctcatgaagccatcttattcgagacttctgtctatagaacgattctaaggccagagcaaagaagttctaattttttctggccacatgctcttgtctgaaaagagaagtattaggagtggaaagaaggagcctctgaatgtcttccaactgagtaagagcgtctcttgttttctgattaccaaaaccagacctgttcaagactctacaagcaagctttgcattctttaagcgctcctctaacataaatatattagaacaaataagagtatctttctcccaagcagccccaatacaatccaagaatgtctggtgagtcgcaaggaaagagaaatatttgaaggacttcttagcacgagcatgttgatttaccaagtggattatacaaggtgagtggtctgagtcaccaggagcctcaaacgaggcaatggcagacggaaaggaataaaaccatggcccgtttcctagagctctgttcagcttcctaataataggattcccttgctggtgattagaccaagtacaaaaaacaccacgacttggaagatcagccaaatcattgaccctcaagcattcttgaaaatcatcaaggcccctgatagaaagagcagtctgacttattgagtaatgctcacttgatgctgcaatttgattgtagtcacccattagcagccaaggagtatttatcaaaggtgaggttgtagctaaagctgaaatttcctctcataacaaccgacgatcgagttcagcattcttttcatacacaaaagcagcagcaaacgaagtggcaacagaaggaactttgatactgcacaagatcatttgttcagatttcttaacgaccaaaacggaaaccaaaggatcccagactagccagatccgacccaaaacagaacgacaatagttgctctccattctccaaccgggaagaatggaagccaaaatagcaagggggttattctctgcaacatgagcttccaaaaagccgccaattaataacttattcgaagtaatccagctacgaactactctttgacgagaatggctatttaagcctctgatattccagcaaaaaattgtcatttctacacaaaaggttatattgaaggatacatcaatgaattccagccttgctcgaggattcacctcgtgcactagcctgagctccggactgcaatttattatgccaaatcttcatatgtttcttcctctccttcttagtcatggccccccaaccaggaggggttggaaacatggcattatcaaccaactgttttgagctaacattgctctgaataggatcccctatggcgctgcaaggaggcataggcctaccggctggatcaaaaacagagggagaagggatctcagcagaagtacccccttttagcaaaactggagccagcgagaccagcgacagagacactttcaatgccttgtccaccactggtttttccacccactacgtggagttaacaggtagcgagctcatgatctttttttctttgttgataaaggtggaagggtctatcttgggagggagactagacgctcgattcttagaccgagagcgccttctcttgggtttagcattggtggccctcgaggggtcttaaaccccgttagcagctagagagttagaatcagtggttggcagaacaatggaagggtgagacacttctctcgaacttgcaggtttgccagccttgaaaggggattttttcagtagagatgtcgggcatctgcttaggaggtgaccatacctcccgcaattcaggcacttgggaggtggacgaggatactccacagagacacgtgctgtgttcccctggatgtcgcgaacaaccacagtggtgggaagcgtagagtccaacttgatgataaccttcactttgggaactccaatgttaatcggatcaagccaggacttctttgtatgaagaggctcgccaattccgctagcaatgacgctaatctcttccaaggaataaaattgaggggggacttttttcagcacagcccaggtgggagcaaattgaagttcctcaagttccaatgggccattgggagaccaaggatagaccgtacaagagcaatttccagcttgccagaagccaatgtcaaccacccatttccgggtagcggtcgacggaatgaagattagagctgctgtctctgagatcattcgaaccgtaatgttgccaaacttaccccagatggggtgtaggtctgtgaagatcgtggtcgaagaagggcagagaccgtggaattgggcaacaagatgacccttccacattgcagctatttttaagaggatcgatgggagagccactacaactggggtgccatcttccaagaaggaagggggatccatttgcttcagattcctaagggaatctttgaattttgtggcccaaggacggtcataattcgaggactgagaaacttcagcaaaggatttcacggaagtgtgacctgaggagttgtttatctgcaggtttgctccagccactggcgagcttcctagaatgctggcggtaatcacaatggaggaggtctagttgacacaaagaggataggcacaaagtgttccggaatcccagcggtggccagagtggaggagatctctaacactggagatgccacagagctaataggaaccgacaaaacaggtagttggtcggaaatcacagtggaggagttctctaacactggagtcgcaacagagctaataggaactgacgaaacaggaagatggtcggaaaccacagtggaggagttctttaacactggagtcgccgagaggaagagagtgagcaggaagctcagcgacgcaacacaaagcttcaactggggattcacgaggagaagacacatcttcagatccagggaatcaaagaaggagacggagacccaacaggctcgggaatagtcccggaagggctaactggaagaggaggcgaggcggcacccgaggaaagaacctcagaagacaacggagccggaacagcccgaggagcagacaacgaagacgacgccactaaggaagccagcactcgatcgaacttggaggaagggcgaaaaggaaggggcgagagggcttcttctttttcttcgacatcgagaaattctcgtttgccggcgtgaggccggccaatggcggcgattgggttagggattgcaatcgccagaaaagttgcctttaatagagagaaaatcgagtcctttcacggttaaaagttaatatagtgatcattttgaccgtatatttgagaacgtattatcataaaccaaagcaacacgctctttagtttgaacaaaaaaatttgtgttggctatgtcatcttcttcttcaaatttactagacgaagctcatctctactgaatgaatcctctttttccttcgctataaattcaatcaaattttaattaacaaaccaagacttgtaaactagatccatattgactatcaagaataatttcattaccagttaaatgattactctccactgcgatctgcactaaccattttaatattcgtatttatattatgtcatataaaccatgctaacgactaccttatgatcatgattgacatatttctccggattcataaagttcttcatcatctttgacatatatagatgtaattttcatgtttgcacgttgaaaatttgctaggacatatacttttttttttgtcaaacaacttgatttcattcatctaataactgaaacaagtttacatgtagtcaaggagcaaaaattaaaaaggctttaaaacaaagtagcaacaacaagaagcaaatgttaaaacaaatgctacacaaagatagcaaagataaatcgacaaaggatccatgaaaactttagggccaatgctacagaacagactggtacaagttaaagtacgagttgtcgaagcatcatccacaaacagagcggtggacgaagtaatggtaatggtccataatagacaaggtgacgttgaaaaggtttccaaagtcgagattctcgttgtcccaggtagaacaagcaggaaatggtcgtcgacaaggaaaggagttgagtgggttctgtcatctaatgggtttaaaggtatagagttgaaaagtatttggtaagcaccactacacagagccggtttcataatgccatagcttctcaaaaccttgctttcatgaatatcaatcttaaaaacgttagacaagtacgactcggattcaatattcaacggattcggggagagaggaataaagaaattccggtaaccgtctctccgtagggaggagatcataatgccgttattccctaatctaatagcatatctaaaacctagatacaccaagtccattagccttaaactttgatgagaagatgaagcacttgaggaattacaattggcctaggttctagagataaaattacacgccaaaaccattaaaatcaacaaagagcttaagcagagtccataaccaattaaggcgctaagtcgggatatcaagtctaatgggctaattggagatttaagagtaacagacctgggccaaactagtggagaaagtaggctgccaattccagggatgggccgaagataacagttaggcccaaaggagactcgcccaaaaggagaaaccctagaaaacctctagaaagaggaactctatcgtacaccgccgccaacatcgtcggagaagccaatccaataagtgaagcgctgggcaacaactggtgcatggatctttcaagagaagatcaggatctataaaggctttgaagagcagggaaggagggttctgatttgtgagaaaaaccacctacgggaagggagtgatctttcttcttcgaattcgaaagtgaaatcgggagagagcaagttcggaagaaggtctttggagaccaccttggtcctctatcacagatctgttcgaatcccatcgaaaaattggattttagggatgattgaagagttagccagaagaaagaagaagagagatttgtgtggtgcatctgagaagaaggagagatgttccgacgccggcaagacggagcttcaccggcgtcataaaagaaaatcggaggagaagctttgataaacgtgtctgggaaaagacatgtcgcttttgtttttcctttagcttgtatttgtcagtttatattgacatataccttctaatcaattagatttgcatgtaaaaattacaaaaaacattttgggagaaaagctaaagcaaaaaaaagaggtctgatctcaatgaaaatacttgtcaatcatcatactaattaattatttaggaattcaaatgattatgtaaccatactaaaaataatctacgttataaatacaagtagaaaaaatcatccaaataccttgacaaacaataaaaaaaatttatcctttcatctcaatttcccctccttttagcgctaaattgtgagagccaaaactcgcacaagagaaattgtactaagggttccttcaaagaacggatctatgtgagattctcaaagaacaacagaattgttgattaccgcggacggtgttcttggttatattattgaaataatgaggattcgatcgtacaagtgtttagaaatatggaaaataagtgttttgccttcaaaatcagagcgtttttgatagcctgaagttgagagcgtttttgtgcgtgtcccctttattggtcccttgaggcactttatatagggctttggtgaaccgcccctcgcgatattcttcgaagattcattgttatcttagaggcggtggtgatttatctttatcttctgtagattttcgcgggatcttctccctatggataatatccttgcgtcgggtctgagtcttttcctcgggtctgagtcttttcctcgggtttaaggtgctttggccttggtacgaagtttattccgagtcgggtgcctcttgtcgacctgtagctagacggctcgtttcgcgcgagctaaatcgtttacccgaagtgcttctgaggttcgtctcggggtggtttcctgagagcacccgagacgttcctatggtcgggtcggaaggttacttgcagagacctccgagcctccttagtgggcagttcgacgataaaatcggctgaacctgggattttgcacatgttttgttccgatactcgatgtcatattcaatgagctcgattgtccatttagctaggcgtcctgattggcttggactgtgtaagatagcgcggagcggcatggatcccattactatgatggaatgggactgaaagtagggtcgcagtttttgagccgacattatgactgctaaggcgagtttctccatttgcgggtagcgagattctgcgccggtgaatgtttgcgagacgtaaaaaatcggtttctgttcatctctgtcttctcggactaacactccgctgactgcagtatccgatacggcaacatacaagtatagtggttctccgattacgggttgtgcgaggatgggtggtgttgccagatacttcttgagttcctgaaaagcttcttcgcaccgggtcgtccattcgaacttcttgtttccccgaagcacatcgtaaaaggccaagcatttgtcggttgagcgagagttgaaacggttaagggccgcaactcttccggttaggcgctgcacttctcgcttgttctgaggtgatgacattcccaacaatgcctcgatttgcttcggatttgcctcgatgccgcggtgcgtgactagatacccgaggaactctccggatcttaccccgaagcggcacttggctagattgagttagacgttgtagaggttaagctgctggaaacattcgcgcaaatgggatacgtgttcttcctctgccaaggatttcaccaacatgtcgtcgatgtaaacttccattgtcttcccgatctataatgcggagattttgttgacgaaacgttgataagtttccccagcgtttttgagttcgaatggcattactcggtaacaaaagatgccttgttctgtgtagaatgcagttttttcttgaacctcggggttcatcatgatctggttgtaaccagcgaaagcgtccatgaatgacagcaacttgtttccagaagttgattctacgaggcgatcgatgtgtggtaatgagaaactgtctttcgggcaggctttgttaaggtcgatgaaatctacgcagactctccatttgccgcttttttttttactacgttgggtttgctagccaatcgagatattttgcctcggtgatagagctgatccttagtaatttttcaacctcgactttcacagcttctgctcgctcccgacccaattttctcctcttctgcttaacaggtttgaacatcgggtcgatgttgagctcgtgtgatacgatgtcaacacttactccgggcagatcttctggggaccaggcgaatgtattgacgttctctttgaggaaagcggtaagttcagctgttaattcttctcctaggtcgccgctgccgatttccacgcatcgctcgggatttttgtcatcaaggcagatagagattaccggatcggggattggtctcgtggattcccgagactcctcaatctttaactgctataaatgctcggaaattgctttctcttcagctctgccaagcttagctttattatgattcgcgtcagtcgtcgactcagtgacggggttcttgagcttgtgtgctgccatgaagcagattcgagcatttttctgatttccccagatggttttcacgccattgctcgtgggaaatttcaggcagagatgatatgtcgaagcgacagctcggaattgatttaaccatggtgtatcgataattgcattgtaaacggtcggttggtcggtaacagagaaatcgacgatttttgttacccctttggctcggactggtaacttgatggtcccgagagtcatagtggtttctccagaaaatctgagcacaggtcgcggagatggtataatttgcgtcatgtcgaccttcatttcttgcagggttgtaagaaaaatgatatccagtgtgcttcccgggtcgaccagaactcattcgacgttgaaatcaccaatggttagtgtaatgactaaaggatcgttgtgtggacggtccaagccgttggtatcgctttcatgaaaagttatttcgtcgtttgatccgttaaatggccgcgtccagttacgatttgagtcaggccttcctctgataagctttgattgatgccgtcgtgtcttgacagaaagcaaaatctcctaaaattgtgaagatccttccccgagcagcttctggctcatcgtcatctgtttcgcgattgcctcggcctcttttggatccttcgaggtttgccacgggggccgcctgctcgggattggccacagcattgacctactcggttttggccttttctgctactaagtcctcgatggttaagcctccaccgatttttctggctaggaatttcgctgccaacttcgccctgaggctacgacatctggaagtatgatggctgtaactcttatgcaactcacagtattcctgctcgtttcctgcgggttgatccttcgtccaagtgtaggattctcgtccgcggcctcgtcctcggcctcggggtgtatcagcttggtaattgtgggctccggagaaattttgtccttcatggtgaacgaatgtcccgccttgagcgccctttttgtggttcggagcgctgagttgagatttatcgctacgaggcgtttgcttaggcggctcgtgtctttttgatagtagttccatttcttcttcatgggaaacgtaatctgaggctcggtgcaaggcatctcggattgtctgtggtttggacaagtttagctcctttcgaaatttggacttgtaccatagtgcttttttcagagcagagagagccgctacgtcgttgattccttcgactttggctagggtagatcagaattttacgaggaagtctcgaagtggctcattcggctgctgagacaatgaccacagatcggcgtctaacgtgccaggatcgattagcaccgaatattcctttaggaagagcgtcgatagctcctgaaaactgtccacggaatttccctcgagtcttgagaaccaatccagggctggtcctttcaagtgttcgacgaacaggtgacagagaccggcgtctctttcgtcgggtctgaatttggctcgggccacagagattatgaatgacttcaagtgtcctttcgggtcggaggatccattgaagtatttgatccttagctttcctggatctgagatattgtgttggagatcgtgcgagtgaaaggagtgttgtgggactcctccagaatgcggtcgatatttggggccgaggagactgcgttatgcatttgggatctcacaagcttcatctcgttttctgccttggctagggagagcttgatagcgcttatttcctattctctggcgtattcctcagcccatcgaacgttctcttctgaatctccatcgtccgagaccctgatctgatcggcctaagcaatttctgctcggggaagagggagctgtggatcgtttccttctgttcggtcgtcgtgtcccgatttcccaagattgccgactctgctcggtctcttccaatttccggcgcggttcggcgaatgggtgcaaggaccggatgtgatgcttcgggaagcatccattcgccccctatataagggaggacgcccaagcaatctcacatcatctcacaacatccaaaacaccataaaacattcttaaaggagtcccaacacatcctagagttgttggtcggaaagggggtgcggctcggtgagtataactcgaccgaactgatgcgcatgctacctctcgatccaacggttcgatggagtgtagaggatggagagggtagaccgttcgtcttagagacgaatcggatctggtagactgatcgttggatcggatcggccagaccgatcgtcagacggatcggccagaccgatcgtcagacggatcggatcggccagacggatcggactgaccgatcgtcggacgggtcggatgggacaggcagatcgtctgacggaacgggtcggacagaccgatcgtcggatgggatggatcgagaaaagtgttcgaggaagcacaaggataagtgcatccgaacacacccaagggtcgcccatagatgcaatcttaccgataaagggagaaagcaccaagaatgggtaagaaacgtgattcaccatataggatcaacatcgcggccgccttcatgtatctatctcctcagccatggtgaaaccgatcagagatcggtaagatcaaagggtgactcgacggataaccaacgggaaagtccacggtgggaaccgatggacaaaacggatgttggacccacgagcaaacctaaggccgacggaagaaagatttcatgggctagcctacgatgatccagtggatgaatccacggacccttgggtgtgataaggatatcgttcggaccgcatggatggatcattaagccgaaagctttatcgaccaccatggaccggacgggtaaacggttagtaaaccgtgggcggtcgtagtgttaaacgaccggaacggaaacatggatggttcgataagccgagggctcaatcgtccaccatgtagccggaggggcgtacgtttggagaacgaatggaccaataagccaagagcttgatttggccatcgtgaaccaagggaatcgtacgatctccaatctctatcgttgtacttagaccagtggggttggttggttgtatggctaagtaacgatagggattggttcatcaattcacgactgatgacgagtcgttgaacgaatggagtaaggcgacaaacgggttaaggaatcaaatccgtatattggccaaggtatgtaacgatctagcttattagttaagatagacgtttggtaattgaccgtgaaagtaggataaaggaatatgcgattgtttggcttagaatgattagcgaacatatgcatgtcttgaccgagtaaaggatccatctaagtctaagggacaaagacgatgaaaccggtacaagagttggttagaattaaacctaggttagaaagacttccgctgtgtaataagagagcgattatagaatttagcctcgtaaaggcaattctatgttgaatagcgaaaaactaagaggttcggccggggagaggcgcgaacttgagtacaacgtcgccggacgccgagacgtccgggacggggtctcacaagttggtatcagagcatgcttgatcctaggatggataggtgctcgggaaaacgtcatagtaaggttttggcggataaggaagttgagggatcgatgtgtttggaaacggaaacagttacccaactcacgatcaggaaccaagatattatccttgttatcaaaacttaaacatgacgggaaaatgggttgatatattcggagatggaccgatatcaatgaaatttggatctagtcggaacttgactaagatcgggtacagacttagtcaggatttgactatttctagggttttgatcttatcggaaattgaccaagatcatggaaaaacgacaaggtcggaagagacctatgtcgggaatattgaccgagtccggtggggaccagggtcggaaatattgacaaagtcggaaaaagacttaagtcgagaatatgatcgagtccgggaaaggaccaggatcaaaaatttgatcgaatgtcggaagagacaaagatcagaaaacattgatcaagtctaggaaaggacaaagatcgggaaataatgatcgagtccgggaaaggaccaggatcagaaatttgatcgaatgtcggaaaagacaaagatcagaaaacgttgatcaagtcaagaaaaggacaaagattggaaaacgttgatcaagtccaagaaaggacaaagatcggaaaacatggatcaagtccaggaaaggacaaatatcgggaaataatgatcgagtccgggagaggaccaggatcaggaatttgatcgagtgtcgtaagagacaaagatcgaaaaacttgatcaaactcggaaatagagatttgatcaaatgtgatatctaaagtctcggagagactaaagatgggaaagcgttaaggagtaaacaagatctaacacccgctgaattcgaggacgaattcagtttaaggggggtagacttgtaacgcccgtgtcccgagttagggagtaagcaagatcttacacacgccgaattcgaggacgaattcagtttaaggggggtagacttgtaacgaccgcgtcccgcgttcataaagaggccaggttgttttaggagaaaactagaccatggtcaagaaacggactaaaatacttagtcggatgaacgagaaagttcaagctgaaccagctaggtgagctggacaagctaggatgaactagctagctaagctaggtgagctaaaccagctggaagactagctagctaagctagatgagctgaccgacagctcgactgagctcggtgagctgatcgtgtactgacccagttgggtggtctggtcagctgacactcgagctggtggactgtggtagctcacgggtgaaaaggtgtctcggccaaaaggtgtaaggtcgagcgggtaccaacgaacggttgtgaccttttggaaggaacggatgtgacctttcgaaaggatgcaaagaacggatgtgacctttcggaagggtgcaaggaccggatgtgatgcttcgggaagcatccattcgccccctatataagggaggacgcccaagcaatctcacatcatctcacaacatccaaaacaccataaaacattcttaaaggagtcccaacacatcctagagttgttggtcggaaagggggtgcggctcggcgagtataactcgaccgaactgatgcgcatgctacctcccgatccaacggttcgatggagtgtagaggatggagagggtagaccgttcgtcttagagacgaatcggatctggtagaccgatcgttggatcggatcggccagaccgatcgtcagacggatcggccagaccgatcgtcagacggatcggatcggccagacggatcggactgaccgatcgtcggacgggtcggatgggacaggccgatcgtctgacggaacgggtcggacagaccgatcgtcggatgggatggatcgagaaaagtgttcgaggaagcataaggataagtgcatccgaacacacccaagggtcgcccatagatgcaatcttaccgataaagggagaaagcaccaagaatgggtaagaaacgtgattcaccatataggatcaacatcgcggccgccttcatgtatctatctcctcagccatggtgaaaccgatcagagatcggtaagatcaaagggtgactcgacggataaccaacgggaaagtccacggtgggaaccgatggacaaaacggatgttggacccacgagcaaacctaaggccgacggaagaaagatttcatgggctagcctacgatgatccagtggatgaatccacggacccttgggtgtgataaggatatcgttcggaccgcatggatggatcattaagccgaaagctttatcgaccaccatggaccggacgggtaaacggttagtaaaccgtgggcggtcgtagtgttaaacgaccggaacggaaacatggatggttcgataagccgagggctcaatcgtccaccatgtagccggaggggcgtacgtttggagaacgaatggaccaataagccaagagcttgatttggccatcgtgaaccaagggaatcgtacgatctccaatctctatcgttgtacttagaccagtggggttggttggttgtatggctaagtaacgatagggattggttcatcaattcacgactgatgacgagtcgttgaacgaatggagtaaggcgacaaacgggttaaggaatcaaatccgcatattggccaaggtatgtaacgatctagcttattagttaagatagacgtttggtaattgaccgtgaaagtaggataaaggaatatgcgattgtttggcttagaatgattagcgaacatatgcatgtcttgaccgagtaaaggatccatctaagtctaagggacaaagacgatgaaaccggtacaagagttggttagaattaaagcaaggttagaaagacttccgctgtgtaataagagagcgattatagaatttagcctcgtaaaggcaattctatgttgaatagcgaaaaactaagaggttcggccggggagaggcgcgaacttgagtacaacgtcgccggacgccgagacgtccgggacggggtctcacaagttggtatcagagcatgcttgatcctaggatggataggtgctcgggaaaacgtcatagtaaggttttggcggataaggaagttgagggatcgatgtgtttggaaacggaaacagttacccaactcacgatcaggaaccaagatattatccttgttatcaaaacttaaacatgacgggaaaatgggttgatatattcggagatggaccgatatcaatgaaatttggatctagtcggaacttgactaagatcgggtacagacttagtcaggatttgactatttctagggttttgatcttatcggaaattgaccaagatcatggaaaaacgacaaggtcggaagagacgtatgtcgggaatattgaccgagtccggtggggaccagggtcggaaatattgacaaagtcggaaaaagacttaagtcgagaatatgatcgagtccgggaaaggaccaggatcaaaaatttgatcgaatgtcggaagagacaaagatcagaaaacattgatcaagtctaggaaaggacaaagatcgggaaataatgatcgagtccgggaaaggaccaggatcagaaatttgatcgaatgtcggaaaagacaaagatcagaaaacgttgatcaagtcaagaaaaggacaaagattggaaaacgttgatcaagtccaagaaaggacaaagatcggaaaacatggatcaagtccaggaaaggacaaatatcgggaaataatgatcgagtccgggagaggaccaggatcaggaatttgatcgagtgtcgtaagagacaaagatcgaaaaacttgatcaaactcggaaatagagatttgatcaaatgtgatatctaaagtctcggagagactaaagatgggaaagcgttaaggagtaaacaagatctaacacccgctgaattcgaggacgaattcagtttaaggggggtagacttgtaacgcccgtgtcccgagttagggagtaagcaagatcttacacacgccgaattcgaggacgaattcagtttaaggggggtagacttgtaacgaccgcgtcccgcgttcataaagaggccaggttgttttaggagaaaactagaccatggtcaagaaacggactaaaatacttagtcggatgaacgagaaagttcaagctgaaccagctaggtgagctggacaagctaggatgaactagctagctaagctaggtgagctaaaccagctggaagactagctagctaagctagatgagctgaccgacagctcgactgagctcggtgagctgatcgtgtactgacccagctgggtggtctggtcagctgacactcgagctggtggactgtggtagctcacgggtgaaaaggtgtctcggccaaaaggtgtaaggtcgagcgggtaccaacgaacggttgtgaccttttggaaggaacggatgtgacctttcgaaaggatgcaaagaacggatgtgacctttcggaagggtgcaaggaccggatgtgatgcttcgggaagcatccattcgccccctatataagggaggacgcccaagcaatctcacatcatctcacaacatccaaaacaccataaaacattcttaaaggagtcccaacacatcctagagttgttggtcggaaagggggtgcggctcggcgagtataactcgaccgaactgatgcgcatgctacctcccgatccaacggttcgatggagtgtagaggatggagagggtagaccgttcgtcttagagacgaatcggatctggtagaccgatcgttggatcggatcggccagaccgatcgtcagacggatcggccagaccgatcgtcagacggatcggatcggccagacggatcggactgaccgatcgtcggacgggtcggatgggacaggccgatcgtctgacggaacgggtcggacagaccgatcgtcggatgggatggatcgagaaaagtgttcgaggaagcacaaggataagtgcatccgaacacacccaagggtcgcccatagatgcaatcttaccgataaagggagaaagcaccaagaatgggtaagaaacgtgattcaccatataggatcaacatcgcggccgccttcatgtatctatctcctcagccatggtgaaaccgatcagagatcggtaagatcaaagggtgactcgacggataaccaacgggaaagtccacggtgggaaccgatggacaaaacggatgttggacccacgagcaaacctaaggccgacggaagaaagatttcatgggctagcctacgatgatccagtggatgaatccacggacccttgggtgtgataaggatatcgttcggaccgcatggatggatcattaagccgaaagctttatcgaccaccatggaccggacgggtaaacggttagtaaaccgtgggcggtcgtagtgttaaacgaccggaacggaaacatggatggttcgataagccgagggctcaatcgtccaccatgtagccggaggggcgtacgtttggagaacgaatggaccaataagccaagagcttgatttggccatcgtgaaccaagggaatcgtacgatccccaatctctatcgttgtacttagaccagtggggttggttggttgtatggctaagtaacgatagggattggttcatcaattcacgactgatgacgagtcgttgaacgaatggagtaaggcgacaaacgggttaaggaatcaaatccgcatattggccaaggtatgtaacgatctagcttattagttaagatagacgtttggtaattgaccgtgaaagtaggataaaggaatatgcgattgtttggcttagaatgattagcgaacatatgcatgtcttgaccgagtaaaggatccatctaagtctaagggacaaagacgatgaaaccggtacaagagttggttagaattaaagcaaggttagaaagacttccgctgtgtaataagagagcgattatagaatttagcctcgtaaaggcaattctatgttgaatagcgaaaaactaagaggttcggccggggagaggcgcgaacttgagtacaacgtcgccggacgccgagacgtccgggacggggtctcacagaaacgagtagtcctgacctgtccttggaaggtagctgcttcgagttgttgcgccaaagattgattcgcctgttcttgatcgtttaccttcttctgaagttgagccatcatacttcttaattctactaggaccgcaggagcggtggcttcaggaacgtttgtctggtttggagggatcgggtttccctttgcgtcaactatgttatcggggatctgattgttgaccattgtggattggttggtttgttctgtgttctgggagtaagagaaatctcaatttcccctccttttagcgctaaattgtgagagccaaaactcgcacaagagaaattgtactaagggtttcttcaaagaacggatctatgtgagattctcaaagaacaacagaattgttgattaccgcggacggtgttcttggttatattattgaaataatgaggattcgatcgtacaagtgtttagaaatatggaaaataagtgttttgccttcaaaatcagagcgtttttgatagcctgaaattgagagcgtttttgtgcgtgtcccctgtattgttcccttgaagcactttatatagggttttcgtgaaccgcccctcgtgatattcttgggagattcattgttatcttagaggcggtggtgatttatctttatcttctgtagattttcgcgggatcttctccctatcgataatatccttaaagatttcccaatatcatttccggggttttcggaaatggtatcttgatcttgcatcgggtctgagtcttttcctcgggtttaaggtgctttggccttggtacgaagtttcttccgagtcgggtgcctcttgtcggcctgtagctagacggctcgtttcgcgcgagctaaatcgtttacccaaagtgcttctgaggttcgcctcggggtagtttcctgagagcacccgaggcgttcctaaggtcgggtcgaaaggttacttgcagcgaccccgaggtgttttcaaggctggctcgggatgtttctccgatgcgatttccgagatatttgtcatcggcctggagtgtgcgtcctgaaatgatacccgagccgaagtatctgaaagattggtttccgaggcgttctcggaaattgcttggttggctcggttcctacgagaccaaatccgaccccaacaatagatactccttcaatttcattataattgtattttaaggtttcttcacacagattacaaaggaaacacaaaaatctcatttaatttatctcttttctataaaaacatcattaacattacacctattttaactaataagaaagtatgctgtaaagtataattgtccaaaaattattaaatacatttactttttgcatagataaatgaaaacaatacttattttacaaaaaagaaaaaaaaaataaactacaaatataatgaaagagaggaagtatagtgcataagatccttgtacttaattaactgacattagttgacaactctatcttctttgtccactaaggaagatgaatcaatcctacatttccttgtccactgcccgtttgctcagaaggtatggtctcttgccccttttaaaaatggtcttaaccttgctggaatcctttcagtgctggaagggatctcctcagccaacaagtttatttgtctcccatccattggaattggcgatggtcctctcttctcaaggctattttggacaatctggacctcacacaaccagctcatcttcaacaaaagaaaagttaaagaagaggaagcatttcatatagctattgtttggggaaaatagtggcaatcggcccaaatctccagttcccaccttaaaacaacccatcaaccttcctcccaccatatccaaattctcgttgaatgcaaatgattcacatatgcttcttggaaagctgacaagtctgtgcaatttggatgtttctgtctaggttaaaatgaacaactaatttttgatggatccgcctctgtaaaagatacaggctcacccctgattgtcgaagcaattgcaactcttacagccgtggaaattgccatcacatcagaaatcaagtccatctctttcgcttctgactctcctacctttgtcaaagcaattaaccagaagctttacgtcaaggagcttcactcgattctccatgatatcctatctctattaatttcttttctgtatgttctttcaatttcatctctcgcaatcaaaaccatcgagcatatgctctaacaaaggaggcttaaaagaaaacaaactcagtcgagatcatttgaagttcaatttttttcattttttaaaggatagttaagagaaaacacaatcgtgatttgctataaccaactgtttaaatttttaatttttaatagaaatattcattattcaggttttagaaaaaaatatattagttaatataatatataaaatgcaatggagatagagatctatgctctagaatctactaatacttggtcagttattagcttccatttttattatttataatttaatttccatgcatatttgtagtcatggccacggttacagttattacggttacggtttattaaccaccggttatggttacaaattttctttaaccttaactttaaccgctgaatatacggttagaacggttacggttaaatacagttacggttgtttgataattataatacaattaatctatgaagcaaaatattatattttcttaaataatttttttttaaagaataattatataaattattattttacagcaaataaataactacgaaatgattaaggtactatttgagtgaaataattatgtaattagaaaaatgaagtaaccaaaaaattcatatttattaattataacagtatttattaagctaactaaaataagtaataaaaaataaactttaatcactatcttctgatctcgttgatgatacatcactatcaatatcttctaattcttcttcattctcttgaaagaattctttttgtctatatccggctctggtccaatcgtcagatatgcttgagcttcaagagaatctggactcattcttgatcgagttttatctagtatttgacctcccatgctaaaagctcgctcgacggaaactgtagaaacgggtgaagaaaaaacgtcttttgcgatcatggttaaattggatattaagattggtgactcttccaccaatgaatgttttgaaagttattacctgcatctgcatcactaaactcaaaattagtagataaatatttttcaagttttgcattattatcttgtgatggtcattgcgttttacgtcgccgcattctttctgcaagacttaacgtagaagtttatgacatatcattttgtagagatgattcagttccttgtggtaccaaatgctcatataatctataatattcatcatacaaattttctatgtcttttcttgagttaaaaataatgtttggaacattaatactatcagacaaatgtaatagattataatatgcgacgaagtaatcatataaactatcaaatttagttcgaagatcaaaaacagatgcaagcaaattaagaggtgggatttatctatagtattttaaccatttatctctcatactagttatgcatgatgacaaaacaatattattttcatgttcattcatcacatcagcaatatgaacacattcatataaaagtaaatgactagtatgataataaacactggataataaaaacgttgcatcactaaaacattttaataactttaaaagtgcattacaagcatcccaatgagtgagccataaagttaaagaactgtaattttattaaataaaactacacaataaatctttataaccaatagaatcaacaagcatatcatatgttgaattccaacgagtaggaacatctcaagaaaaccttttggaggatacattatgcatttacaaaaccgaaaccattttttcattaattgtggatgaccccgtgaataattcaaagcagttttaattggtgaaataagataattttgagaaaccaataaaccatcttgaaaacataaatttaagacgtgacaaatgcatcgaacatgaaaatattttcctcctaaaataggactacaattatttattaattcatcaatggaagcagtattagcggatgcattatcaaacgaaatagaaaatattttgtttgttaaattatattcttctaacattatttttattaatttaaaaatattatcagatgtatgtctttcatcaaaaactcgaaaagcaataattctcttttgaataatccaatcactatcaagccaatgagaagtaattcccatataatgatgaatttgccactgatcactccaaatatcagagcatattgaaacattattaggtaaaccagaaaacaaacattctaaatcttttgggaaaactaaatctaaaagagttgtacaaatttttttatccatatgcaccttagaaaaatattgttatttagttgaaaaagttgatttttttatagataaagttttgtctaaatttcttagaaaacgatttctaatgatctacttagtttagaatttctattctaatattttgtacatattctacgatatttagactatttttctttctaaaatttttagaaaataggatattcaatatctaaaaattgtagaacatgtattctaaaatttccttcatgttctaaactatgtgtgaaattgtattataaaaatttctatagtttctaaaaatagtagaaaacattttctaagaaatattcacttttaaaatttatattctaaccaaatttagaattttggtttctaaactatttaaaattcctagatatagaaagtgaatctttgaaaaaggaaagtaaatatttattaaatattatattttaatagtatattttctgttaagattacgatttttactggatttagaaaataaattctaattttttagaatacaaaaataaacgcccaaaaataaattgtaaacaaacgattggtgccctattattgatctcttcttcttcacgttctttctttcccatctcgtgttctgtttttcattatgcatatctatgtgaggagtggtatgtggagattgtatgataacaaggagtgaagatttattgttgatgaaaaaggagtggagatttattgaaaacctctatttcaaacaaagggtttcaaaataggaaaatatatcagaattttgtaaatatattaggacatactccctctgttccttttgtttgattttttagaaaaaaaaattgtttcagaaaaattgattttttaggttttcaatgcaatagttattagttataattgagaaattgtaaacttcaatacaaattattgaatataattggtttagagttattgaaaattgtaaatcacaaagaacaatacatttaaaagcaacatttaatatgttttcttaatatttgtgttttttctaaaaaatcaaacaaaaaggaacagagggagtatatttttaatttctttgttaatttaattttgaaaaattaagggtaaattgggttagaaaatcttaagaaaacgtatttgactaatctaaaaagaagaggaatagatggacaatttattttgtagatatcctttagatttagtttccccaaatcttttttttgtttttcgataaagtgatgtacgagtaagagtagttcgaagaactctcttagcttgagcatttaattcttttagcaataattattaaaaccgagtttctcaccaaagctaaatgaaaggtggtcaacagcaacacattttgctaattcttctcgattttttttatccgaataataaaaatttgaaagattagcagaaacagcattttgagtttctccatcatatttttcacgatgattgttaaccaaatgatatttatatgatccatattttgaacctgatttccaaatgaaacttttattgcagtaattacaacatgcttttatttttcaatcaattttttcttttcgaaagtgtaccttgaaaatatcggaagcattcagacgttactttcctgagcttgttcttcggttgccctttcttgagtactgatggctggtgttgagttatgaacatcttctatgggtgtaccgatgttagatcgaaatgaatcggaaaacatttttaaacaaaattaataaaactcaaaaatatgatgaaaaagaaatctctttaacgttggatgaagcaagaagaataatttttattttagaaatttttagcatatggaacaatgaaaacaatatttatagaaaaactggttactatatttatggaaaaagtctttgaatttttttaagttaaacaaacattgatgacttggtcgtaaacggctatattccacaacttggtcaagctcaagtctttaacgatctaattctacagttttgccacgtatgatttgacttggtcataaattttaaagattgaaatgaactaacggattgccacataaattttaaagattgaaactttattttatttcaatcaggctacattcaagtgctcgtgcgttttgccacataaattttattttattttatttttatttgataacatcaaacttagctctctcgttttctcttcctaatcacattttttctcttgtcaatcaaattatcggttttgaaaatactttactacttctttgggttatgagaattgaagatttcttaaaatcatttatcattgttaataatgcaaaactaatgaccagctttttaataataatgcaacttggtcagctttcatatttttaaggttacggttaaccgtacagttaaccaacggttttgatacggttacggttaattaacggttacatttagtatatatttttaaccttaaataatatatttttacggttaacagttacagttattaaccgttttatacggttacggtttaaaacggtcggttacagttagatcattttggtcatgcttacatatttgattacatgtgaaggtcatatgtgaaggtcagaaggtggtgagactttggaggcatgatcttatgtcatatatggtgatgttctagaatattttcttggtgtcaaaaaataatatataacttcaaatggaatggtgaaatcaattacaaaatttgattttttcattttttattgttaataaataactcaaatgttgttctactattaacatttaagttaattgtattacaatttaacttgataaaagaatattgacttgaggacagtattttaagttagtattgactattgacagttaccataagacatgttcagtagatatccctcgttaacaattctaaatatgcaatcatgtttaacaaaaactggattgactataatgacaatgaaaatgcaatctttattttgaaaaacaatcattgagatgccaaagaattagagaataaaagcttaacctcataggtgaaataatgatattacaaaaaaaaaaaattgatttataatcttaattggggcactagggtccgcattcgtgattcagttcatttaaaaataggatagagttttttttcctaagtcatcatttaaaaataatgcatttatgtaatccaaaattaatgtacaaatatcttaattaatttgaatgaataaagaatccgtcttcttaatgggtcatggattagattttgatatgatttaattaaacacttatatatatgataactaacataatgatatataattttcttgactttatatgagaaacattgaaaaaaataagtaatgtgtataaaagcattaattggttttcggtttttgttttcttgatatctcatggagatttaaatttagcatttacagaaataacaaatccaatcaaaatctttgcagtagtattaacaaataaaaatcttcaaatcttctcattaaaaaataattgctgagaatgccatttttacactactctttttcaattttactctttcccattgctattttcatttttggaggaatttgttttttttgatggaatttttttttggcaggaaaaataaagttttgcgtcaaaaatttgacaggaaaatttcagtttccaattacattttcttattagatgagggtaatttggtcattctgtttaagagaaggggtatttttaaaaatagacaccataaaagggtattgttgtaaaaggatagtaaaaaaaaaagtagttttgcaaatttccttaaattaaattaaattttcataatttgacaagctgtattaaaaaatttagacaagattcagagtcataatataaataagagaataatgaataaaaatctgaatgaacatgaatttaacatgcactcaaaataaaaaatttgtacccggcttaatttatttgttgaaccatttattcgtacagaaaataataaattttgaaactttcaaaatattaaatattttaatcattatgtataactccaaatttacaatactaaaatacacatataccacaagttaaatcgaaaattcactaataatttaaatcatataatttaactacttaacccaaaaaactgtaaatctaacatcattatttgtaaaaataaaaagactattatgtacgtaaaatataagaaggacgatttatcttttttatatttatttgattctttaatatatatatatatatatatatatatatatttctatatcaatttcagtcaagtatctgattagttttagtctattaagatgcaactatgagaattatattgggtctttaggtgcgaaatggttcattcaaaccaaaataggcaacaatattataccattatatatataatatactacattaaacaaataaaatttgtatttattttaaattactataaaattattattttcaaaacaaactacatacatattttgaaactatattacagattactacataatattatagttactattcgatcatgcatatgatttaagaatatatacctccaaaactgaaattaccagattttgttttttcaaacacgttaaacatatattgcattgcattaagtttacaatatgtcaccatcattaataagcatgcacacttacaaattcaaataacataaatacatcaaataacataataacataaacacattgttgttgggaacaaatgtttgggccgtattgattgtggttttagaaagactccgctctcattgatgatgagccgtgtgctctgatacataataagcaagctgtgtaaccttgaacaatgaaaaatgaaaaaaattggcttcattttctctcttgaacaatgaaaaacaaaatctttctttgcgaacccatcaatgagggagggaattgatctctcaaaaatcacttaggcggcaaatattaactctttgttaatgaaccaactatacgacattcgcggattgagtcaaccaatataaacttttacctatataaataaataattttgaaaaaccaaatgtatttaactattctccatactattcttgaatcattctttttaaatggcaatttactctgtcacaaatgtgacatgatcttccatctttatcattcttgtgaataagtaatctttttattgaagagaacattgtgtgaatataaattgcatccaggttatttttactctagtatcacagtaaatagagcataactaattaagaacattgtatagagcattgataagaactgtttctacaagcattaataaattgcaagcattaataaatgaaaactacttgctaatatgtactcaagttctctaaccaaattgaccaactatctggcacatgttcacattgttgctgacaacaaaagtttaggccatacggataatggttctgtaaagattttgtccaccataatgatacgctctgtgctctaatacataagaagcaagttgtgtaattatcaaaaattaacattggcttcctcttctatcttgagaatgcaaaaacaatattttttaagtctaggcccatcaataaagtagggaattgatctctcgagaatcgcttggacatcgaatattatctcattaatgaagctaccatacaacatccgcggattgaaccggccaatataaacttttggatgaataaacttagaaaaccaaataaaataaaaaaattattaatatatttaactattttcgatacaattttttgaaccattcattttaatggcaatgttcttctatcccaaatgacaaccattcatgaatggcatagaatgtgataacgcaaacaacgcctctttggtattggttctcagcccttctaaacttgattactcgaactcccctcctagccataatatttttaaaacaaatatttgaaataagaaaataaaaaaattattattaaaacaaataatattacaaatacttcaaatacaatacgatagaagcacacaacacaattaatactaaacacacataactttatgaaattggtctaaagatggattttgaaattgataattatttggagttggataaggaaaaagatcattggtagataattattagaaaatttgaaaaatttgaatttttttgtgaatgattattattagaatctgtttcccaaacttaaaattaaaaaactacaaacacatcatcctagtcagcatttgttaacggaacagtagcaccgtctaattatttggggctttccaccggatttacatagtttgtattgtaaattcaaattaaatcaaagttcatgtagttaaaagcacataagaaagtttcgtgtatgaaagcgataaagtaacttagttcatggtggaatatgtaacactcgccccgccatataggccaagacggcatgttattcatctgatcttgccaaaacgttttttttaaacttcacacacaaacgaaatattgcacacaactcctcacgcttactaacctgaggaaaaagggaaaaaaaggggtgagtaaagaatactcagtgaggagaatcaactctgcccactgaaacataaaacactttccaaagctatacaaccatcatcataacatataaacttagacacacgcaatcaacttaacatgctttaacttctagtaacacattcataacaatcatcttatatatatatatatattaatataaacatacacatcattaggtccagtcatcctcataagtgatgactagaacctcataagtggaggctggccctcgtggctcagaacctcataacatgtttttgaccagctgttaaccggtcagtccatcactgtccacatcactagggagaccacggccaatagctcgattctccccagtcttacatacatcatacatacatagatactcattatcatacttaacatacatatacttataatatcatacataactttacattatcaaacatcatactcaacaatcatcaaatcatatcatcacataatcttatcctatgcaatcagatctaagcctacatatcatgcgtcaagaagcataacaaaagaaaatgataccatgtttcgcaaataccaccttcaccttagcctagttgaagatgacaacacacttctccttctctttccccttagacaatctttattgtaaccatataatcataagctctaacttggttctccataaaccaggacctgaatccatgagtcatgaaagctcctacaaagcttcagctcaagccgagttcattttcccaatcaaacaataaaaatcgttaggattttctctatataaatctgtctcgaaaacatacgcataagtcaggaactaaccattacaaatgctatcccaccgttgaatatgtagccagtagtatcatgaataatcccacgaagtttcatcccgatcagatttcacaatatcccacgttcttctgaagatgatgcatcagaactgatatttaggtttctgcaacttgagatgattctggacaaacttccaagatcaattccggatggagcttaaatctgatggacaagctgtcagctactatgagttccttgaatcaagatctttccatagacatcttaatcgtgatctaattccttctggtccatcgggaaaacgcatcataaaaccagtagtcacacactgttcttgatttatacttaacacagatttggacaacttctgcagttacttgcccagaaagaaacactcataacttctcgaatataaacccgattgaaactctgtcagttgctatggcttcatacaacgtgatctttgcagatatgtcttatttagaaactgattctctctggtttgacgggaaacatccttgtataacctcaacttgaagctaccattctctcttcatcttcttccttatatgcttctagttttacctagcccccttctctgatttactaggatctgcttcatctcacttctccttactgtcacaacgaaatctccatctcttaatgcctttcctttgcagtggtgatgatctcttttcctctgccacgtatcgtccttcgtctccgcttcctctcatcttcctcacggttatccttcatctcttccctttctcttctcctcttcaagcgttccacaatgactaacatactcaacaacaacggtagtggctgacctttaattagggttaagattaagacgacgcggtgacgctcggtttaggaacggttgcatgaatcgctttggtttccttcacttgtgaactctcttctctctcggatatggtaacgaccccactatagaactcatgtgttgatgctttggatttgctttctcaagattcttatttggtttccgttagtggctcagagaaaagggagatagattcacctatatatatgtgcaaccaacaacacacgtaacaaaaccctttaacattagggagttgcttcacttgggtttaaatgggctccatgggttccatgggctttgctttttgacaaaacgaatagggtgggctattgatgttgggtttggagtgttacagaataagtcgttctttatctttttggttttagttaggtgtttcaactctttcttctgctaatcaaggttcagtgttaagatagtgagaaaaaatactcataatgcaagcatataatggaagccataagatcagtgtaaacttttaagtttcatgtttgatcttattgtgatttattatgagtctgctattaacaagctactattttactcctttctctttagtaataaacaatgttgtacttctttagtttgtttggtttgtaaatttacttgttgtatgttgtgtcttcaactcgggttcttcaatgatggacgatgctgttgatatatatatatatatatatatatatatatatatatatatatatataaaggattcttttgaaacaaaaaagtatgcatttgcggatttgcctttagttacttttgtacgtgtttttcaattccagtcacctacctctctataatctttattattctttttttctttttttgggcaaacctctctatagtctatatgatgtataaaaggaataaagaaaactacggtattcatttttcgaaatcggtttttattttatttgatttgatttgtttcatgtgacctttatatatgaaatgaaattataaacaaaaaactatggtattcaagaaaaaaatgtaaaaaggcccagaaaatccaaaatagatgggcccaacattgggttgtaatgcattgacaactactcgtggacaagtacacgtgaataccatttccttccatacgtataaaaccaaattattttcccaaatagtatcctcttattattctattggtcaaatcaaaaataatgaccaatagaattatgtattctactttcatttttcaaatttaatagattttgatctatcaatagagaaaaatgcatggcgatgaaaatacatattccggatccaaccaaacaacatagcttttttattagactataaacaagaaaataaaatagaaagagactagatttagagagagaaataatgatgatagtgaagctgacactttctgcaagtttcataagtattttattcttttctatattttttctgtaaaaattaaaaaattgcaattgctcgaaattttcataatttttcgagttatgatggattcttgtagttgaaggcttgaagcatgacatttggttaaacaaaagcatagcatttttggaccatcatgatctctagattactattgaggataagattgtatcttatgcgataagtttgaatcctagttgtatatgtttaggaatcgacatttaagggtttggtgtttatcttgtgttgattccctcttgtataaatagcaatgttgagttcactaataaagcaagtcagttcgatatctaattctacatggtacagagctaaagatctagcaaaaaaaaaaaaacatctaaattttttcttttttttatcgattgtttcgatctttgtttttcttgcgtgacaagaaaacatggcatcgatagatgatggttcatctacaacaaggatgacgtcttcctcgtctccggtggttacgatgggcgtttctcctttaccttatcaagttctgaaaatccaggaactacgatctcatctgtggtgttgaacggtgacaattacaacgaatggtcttcggagatgataaacgctctccaagctaaacgcaaaatagggttcatcaacggatcgattccaaaaccttcagctaatgatcctaattttgagaattggatggcagtgaattcaatgatagtgggttggattcgtacgtctatcgaacctaaggtgaaatctacggtttctttcatctccgattcacaccaactttgggaagatttgaagcaacgtttctccgtgggaaacaaagtgagaattcatcaaatcaaagcacagatcgcacgatgtcaacaagacggccaatcagttctggattattacggtcaactgtgcactctttgggaagaatatcaaacctacaaaccagtgactgtctgcaagtgtggattgtgcacatgtggtgctactcgtgaaccggcaaaagagagagaagaggagaagattcaccaatttgttttgggtctcgatgaatcacggtttggaggtctcagcacccctctcatcgccgtggatcctttgcccactcttggtgaaatttattctcgagtagtgagagaagagcaacgattggcttctgtccaggttcgtgaacaacgacaagatgcagttggttttgtggctcgcaacgatcagagttccttcccatcctcacgacccgatatgcaaaacggaggccgtttagactcctctatcattaaatctcggtctgtgacttgctcacattgtggccgtgtgggtcatgaaaagaaggactgctggcagattgttggatttccagagtggtggactgatcgcaatggaggtggtcgtggatctggttcccgtggaagaggtggtcgtggatctggtcgaggaagagaccaatctgtgacagctcatgcaacaagctctaacccgaccagccttccagaattcacaccagctcagctgcaagctctcgcacaaatgattaaaggtcaacctaacaacagcagctccgacaaattatctggtaagacaaatcttggcaatgtaattcgtgatactggagcatctcatcatatgaccggaacactatctctgttgtctaacatggtctccataccaccttgtgcggtgggttttgcggacggaagcaacacaatggctatgagtgtgggagtgttatctctttccaatgatgttgcgttggttgacgttctttatgtcccaaatttgacatgcactttaatctctgtttctaaaattgtgaaacaaataaagtgcattgcaacgtttactgatacgtattgcgttttacaggaccgtttcacgaggactttgattggaagcggtgaagagcgtggtggggtttattatcttacggatgtcgctacagcaaaaatccatacggcaaaaatctcctcagatcaaactttgtggcatcaacgtttagggcatcccagtttctctgttctttcatctttaccaaagttttctagtacttcaattcctgttggttctcgttcttgtgacgtatgctttcgagctaaacaaacaagggaggtttttccccttagtattaataaatcaagcgagtgtttctctttgattcattgtgacgtttggggtccatatcgggttccttcatcttgtggtgcagtttattttttaacgatagttgatgacttttctcgagccgtttggacctatctactactagcaaaatctgaagtgcgctatgtactcatgaattttatggcttacactgaaaaacaatttggcaagtccgtcaaaacagtgcagagtgacaatggcacataatttatgtgtcttgctgcttactttcgtgaacatgggatcattcatcagacctcttgtgttgggactcctcaacaaaatggtcgagtagaacgcaagcatagacatatccttaatgtggctagggctctattgtttcaagcaagcatgccggtcaaattttggggtgaagcggtactaagtgcngcatatttgattaaccggactccttcatctcttcacaaaggtatctcgccctatgaaattcttcacggttgtaaaccaaattatgatcagctccgtgtgtttggatcagcttgttacgttcaccgcgtcacccgtgataaagacaaatttgggaaacgaagtcgtttgtacgttttcgttggctacccttttgctcaaaaaggctggaaagtgtttgacattgacaagaatgagtttatcattactcgtgatgtcgtgtttcaggaagacgtcttcccgtatgatgctaaggatgatcattcttcacttgtacctccatctcctatagtttgcgattcagattggatgatcacactgtctctctcgaacagggggagttctgtcatctttgactccaacactgaatttgatgccggtgagaacgtgatctctatttcaaccccgacgcttccctcggtttttgaaccggaatctgaatctgcatctgtaccagtttctgaaccggattcggaatctgcatttgtaccagtttctgaaccagaatctgattctgcatctgtaccagtttctaaaccggattctgatcaaattgaaaaatcagtctctaaaccaattgtaccggttcatacgtctataccggtcgtaacagaaccttctcgtgttgctgactcaagcgctgcttctccgttgtctgtgacaaggactccagctaaaactaagctcaaatttgttcccgtttccacaccagctcgggcaaccaatctgattgttcaatcagagacaccatcgcctcctccacgtcaaggtaagcgaaaacttatacaatcagttcgtttgcaagactatgtcctctacaatactacatgttctccgataaacccccacgctctccccgattctactcaacagtcctcgtcaacagtcctaggtaattcgttggattccctaacaaattttatttctgacgatcaattctcgtcaggtcatcgtgcctatttgacagctataacgagtactgttgagcccaaacattttaaggaagctgttcatattaaagtttggaatgatgctatggttaaggaagttgactctcttgagattaacaaaacatgggatattgtcgatttaccagctggaaaagtggctattgggagtcaatgggtctacaaaacaaaatacaatgccgatggttctattgaacgttacaaggcttgtcttgtcgttcttgggaacaaacaggtagcaggcgaggactacaatgaaacttttgctcctgttgtcaaaatgacaacggtccgtactcttctttgccttgttgctgcaaatcaatgggaggtgttccaaatggatgtcaacaatgcttttcttcacggcgatcttgaagaagaggtttacatgcagctgcctccgggatttcgtcattctcaccctaacaaagtggctcgacttcgcaaatcgttatatggtctgaagcaagctcctcgttgttggttcaaaaagctttccgattcattgctcaagtttgggtttgttcagtcctatgatgattactctctcttctcctacactaaagaaaacattgagctgcgtgtgttgatttatgttgatgatcttctcatttgtgggaatgacggttacatgatacaaaaattcaaggactatttgagtcgttgcttctctatgaaagatttgggcaagctcaaatattttcttggtattgaagttagtcggggtcctgatggaatttttttgtcacaacgcaagtatgcgtctgacattgtctccgacaatgggcttcttggtactaaaccggctgcaactccgttggaacaaaatcataggcttgcaagtgatgatggtccgctccttgctgatccaaagccatatcgtcgcttagttggccgtttgatttacctcactcatacacgccctgatttgtgctattcagttcatgttttatctcagttcatgcagactcctagggaggctcattgggacgcggcacttcgtgtggttcgtttcttacaaggtacttcgggacaaggaatattgctttctgcaaactctgatcttaccctcacagttttttgtgactcggattgggcgtcttgtcctttgactaggcgttcccttagtgcatttgttgttttacttggcggttctcccatttcatggaaaaccaagaaacaagacacagtttctcactcttccgcagaagcagaatatcgtgctatggccgctgcacttcgagagattaaatggcttcgtcggttgttaaaagaattaggcatcgaacagcatgcacccactcgtcttttctgcgatagcaaggctgccattcacattgctgctaatccggtgtttcacgaacgcaccaaacacatcgaatcagattgtcactcggttcgggatgcggttcgtgatggtatcattgagacgcaacatgttcgaaccaccgaacagcttgctgacgttttaacgaaagcccttggtcgtctacattttcttgatttagtatccaagttgggtgttcggtctcctcccacgccaacgtgagggggagtattgaggataagattgtatcttatgcgataagtttgaatcctagttatgatatgtttaggaatggacatttaagggtttggtgtttatcttgtgttgattccctcttgtataaatagcaatgttaagttcattaataaagcaagtcagttcgatatctaattctataattactatatttagtgtttcctggttttttactcacatcatttatgtacgtaccataaaacattaaaacattaaagagttggaaaatgataaccttttgcttgtcatccatttacttattttttttcttatagatgatgttcttaagaaccaatgcactcgccaatattttaacaccagctcctacgttcggaaatcataaatttattaaagctttaacaaccaaaaagagaataacaattagcagtattatatacttcaattatatttatgtaagtcgtgcttgcatttatgaatcttcgatggacccattacaatgctaaagctattaattatttattgagtttcttaaagatgaaattattatgggagaactgatcaacagagtagatataattgattacatattgtcttgcgttagttaactaaaaaaaagtttcgtgtaatcccaacaaaagtaaaattcaaaaattgtaagaaagaacaaatataatccaagttgttgaagagatggtcgaagaagaagaagaaaaaaaattgtacgaaagataatccatttaataatttgatactctaataaggtattagcagcaaaaggactaaatgagcacaatgtccgggcttacttgtttcaaaatgaataattttgtatgtatcgaatttatacgtttgacatatgcaattcgatcatgatggtttttgacgaactaacatttaatttgctaaaacaaaaattaatttttattttttaagattaaccagtgttctaaaaaacggtttaggtgatcgtttagatcctgataaagtggtaggcgctcatgcgatgtttagacaaccgtctaccccacctaaaatagtatatacctcattttaatatatttttctagttttcaactaagtttatatttatataaatagttataaatgtctatataatatttaatatagttaaatggatattttgtctaatttttgtttacgattcaaagtatttatttttttctttatagatattttatataatatttatgtataaaattatatttataatatttatattataaatgctttaactacctaaaatcgtgtaagatccgattaaatgttttagggctaaacttttggatcatcatccgtttactgttaacgttttgttgaacactgagattaacaataacattataagaatgtaactgtccactttatttttaacttataaggtcctgcattctttctggacatgtcagaaattcagaatctctaatttgactttacaattttaaacaatattctgatattgattctctaacattgaatatcccacaaattcactaaatattagatcctaaaaaataaagtattagatagaatccaaaaaaaaattcatacaaaataatcgtcaaacacccaaatcgtattcatacaaaatacaaaattaaaaaattgaattttttaaaagatatgtgaacccaaattgttcaacaaaactatttatataattctctctttttttgggcaaacgtttagggatgtcaatttatgccgactcaattctggttaggtgcttttttatttcctggtttttaaatttggtaataattctgagagtgaaaggagtctcctttttgtctctttctgtctccgttttgagtttttatcagaagaccaaaacacacattttactttaccgatttgctctctcaaatctcaaatctcattccttgatttctcttggagacaacggatccaaaaccgacgacactctcaaaccaaatccatggagattttccagattccgattcagtttctccttctctaatcaatctcataaggtaaaattttcactttttctttctgggtttcttcttctcttactgtatccgtcattgtcttagtcaaatttcgtctctttataacttttagattcgcccaccaagtgtttgttgaaattcctgagagagagatgaaggattttccttcttgctttggtgaaaatggagttcaagttgcggattcatcgtcttcttcgaactccggtaaaaacgctcagaatttggttacttgtatctaccaatgtcgaattcgcggaagaaattgtttgatcactgtgacatggactaagaatctgatgggtcaaagtgtaacagttggtgttgatgattcttgtaaccaaagtctttgtaaagtcgagattaagccgtggctgtttactaaacggaaagggtctaagagtttagaggcgtattcgtgtaatatcgatgttttttgggatctttcgtctgcgaaattcggatcaggtcctgaagctttgggaggattctatgttggtgttgttgttgacaaagaaatggttttgcttcttggtgatatgaagaaagaagcttttaagaagacgaatgcttcgccttcgtctttaggtgctgtgttcattgctaagaaagagcatgtttttggtaagagagtgtttgcaacgaaagctcagctttttgctgatgggaaatttcatgatctgttgattgagtgtgacacgaatgtcaccgatccttgtctcgttgttcgtgtggatggtaagacgttgttgcaggtgaagcggcttaagtggaagtttcgtggcaacgatacgatagttgttaataaaatgactgtggaagttctatgggatgttcatagttggctctttgggttgcctacaacgggaaacgctgtgttcatgttcaggacttgtcaatctactgagaagagcttgtctttctcacaggacgtgacaacaacaaactccaagtctcatagttttggcttttcgttgattctgtacgcttggaagagcgagtagaacaaaagagagagtttctgggtgctaacaaaaaccttataagagtttgttgattccttatcgacattttttttgttgattcatgattggtttctgcaatatatatttccttacacaatgctggaaccagtttggtcttgaggaatgtgatctctgtatacatctgttacttatgttctagaaagtgtttcttatggtctattacctaattacactgctctttgatcttgtagcttgtgaatgtttagatgcttagcaaactattgattagcttcttctttctaataacagactgctcataaagattgtttatagaagaagcatatagagatcgtgggatttgtacatgatgattcctatattgcgaatcattaagttgaatgtttcttagctttgacatttcgtttcttcggactttacattggtctacttctttggtcacacaagaccgtaaaagtttttggttttctatagagttaaacttctaaaggcttaaaagagaatttggtattgtgtcagttttaaacatgaatttggatttgatcataagatttgtctaaagccatagtttttgaaatgtgaattgcgattagtggcaatattactggaaaaggcataaaaattgtctctgtctaagagattctattaataaccacttttgaaaaaaaattgaattgtcaagtcacggaaactttctgtagagagcagacagctttatacagttacagtatatagtgtatacagtaaaaaaaatcaaacttcacgctgtttagctgagaatctcagcaactacttgccgtttcatgcctcttgtctgttttggtcggaaaagtacacatgagaagactcaaagtgacgaagagtgtttctttcttctgttattgcaacattcttttgtgacatcatttgtttgcttcttctgtttcagtttcttgtaatagtaaaataaaatcatgccacgtcgtccccatccaaacgggcttattaagcccattttcgcaaactataaaagtaaaaaacaatcaatgaataaaatatgactttgcctttttagttttttgttcaccactactcagccacattagggttttgaatagccaaatatcgccgtttcagtctcctttgaatccctaggaaattttgttatacctttgatcattattagctcttcgtggtgtttatgtcatctacttttttatacagcaagcaactttctagtttctaacgactatgaattctgaagtcgaacgtccatcgtttttgtcactacctgatgaaatcatcttgagctgtttagcccgcatatcgagatcgtactatccgaaactctccctagtttgcaagaccttccgcactctcctcatatctaatgagctcattgtggcgcgattgcacctcaaaacccatgaaaccttttgtcatgtctgcttaaagtttcctgataaacctaatccgtcaatgttcaccctctggataaaacctggtacaatcttaaccaaccaacttgagaagaacaagaggtctacaagagatactcggttggtacaaataccttcttcatattattataatgtaccgttttacctcgttatggttggttccgaagtatacggactcagccaacgcaatgatccgtcctccaacatgtttgtccgtaataagggggatatttttttgtgtaaagccccaaacatgactgtagctcgagctaaagccagtgcagttgtcttcaatgggaaaatatatgtgatgggaggttgcatggctgatgaatccgtgaattggggtgaagtttttgacataaagactcaaacttgggaagctttacctgaccctggtcctgagttccgtttttcttcaattagaaaaatagatgtgttccaagaaaagctttacgttagaagcaacgagaagaaagactctgtttatgatccaaaagaaggtaaatggaatgttggagtaaaagcacacatgcaaatatgcaatgtatgatagataatgtatggtatcattgtgataaaaagtggtgctggtggtatgacacaagtcctaaagaatggagagtggtcaaaggtttagacatgttgaacaggaatcttggttgtggtacgattgaaattgttcactatggcggaaaactcttaatcttatgggacaaggtagatctttctcatgacaaagatatttggtgtgcggtgattgcgcttgaaaaacgtcatggtagtgatgaagtttggggaaacattgaatgggctgatattgtgctgacggttcctagctcatacgttttcgtgaatagtctagaaactggtttttgatcaaatctaatcatgttttttgatttgattctcaaaggcttttttcttctttattttttagtgtattgttgcttttatacttgtaatatttgcaacatcacgagaaatattgagtcggctaatattgtgctgacggttcctagctcatatgttttcctgaatagtttaccaaataggttttgataaaatttaactatgtttttctgttttgccaatgccttattttttgtttgaattctgtagtgtgtttatggttaaactaaattgttggcaacatcacatccaacttcaaaataacagttttatatcgaaatgtgacttagtggtaggatttgtatatgatgtgaatcagtaagtcagatgtttgatagctttcatattccaattcttcgtcttaattttgtcagtttctttagtcacacaaaaccacataagtttttagttaccagttaatattggagagagactacaaaagataaatgctattgtgtgagttttgaaatctgaagttaaacataccttttttttgtccgttatagcattctctaaagaatagctcttttctgtatttggtatttaaaaagattttgtaccaatttctaataacatatgtatgatgtaaccttgagaaaaagaaaatgatgtaaaatgtgattactagaaaggcctataagatatgagagtttctattcataacaatgtatatcagatgtgaacttatggagtgcaaagaccatctgttcttcgaatgtggctacgccaaagagatttggacaggactgagcaggaagatccttggacacaagttcacaacaacatggagtgccatccacattactcttttagatatatctttgggactaataaacatcttcttgcactacaagaaaacaagcaaacgacgactacgaaaggcgactaacaatgtagtcgtccttttttgcgactaacttacgactgatggacgacgacattacgacaacagacaaattggtcgttccataatcgtattttagcgactacaagctttagtcggtacatagtcatccaaatacgactatttgacgacgacattactggaaaaaataagtagtcatattttgacgactacatgtccgacttcatacattagtcgtaaaaccggcgacgataatacgactatttttcctttgtcgtaaaatagtcgcataagtgtcgtataatacggttggaaaacgtttttcgtgttgctgggtaggtacacctaatttctgagcgtctacaatgtttagtcgtaaaatagtcgtaaaaaatcctctatataatccacgacactcttcattctcattcaccaacaaatcaaaacaacatcaaaagaaaaaaaacgatttcgaaggaaaaaatataagtttagtttatgctataatggcgggaaacttcaattatgacggtggtggcggtttctatcgagattggatgtataagagatttgatgaagtaacgggaaatttgtcagccgaatacgtcgtaggagtggaggagttcatgacattcgctaataatcagcctatagtacatagtagtcgaggtaaatttcattgtccttgtagtgtatgcaagaatgaaaaacacatcatctcgggtaaaagagttagtagtcatttgtttagtcaaagatttatgcctgattattatgtttggtataagcatggagaagaattgaatatggatataggaactagttacacggataggacgtattttagttcgaatcatgaagaagtgggtaatgttgtagaaaatgcatatgtggatatggtgaacgatgcattaattttaacgtggggtttgatgataactatcatcaggatagttatcatcaggatagtagttatcaaaatgtggaagaaccggtccgtaatcattcaaagaaattctaggacttgttagaaggtgcaaatactccattgtacgatggttgtcgtgaagtcagtcgcagttatccttagcatctcgactcatgcagaacaaggcggattataatatgagtgaaaagttggtggattccgtttgcgaaatgtttatagtttttttaccaaaagaaaaccaggctaccagttcacattaccaaaccgaaaagttgatgcgcaatttaggacttccatatcatacgattgatgtttgctcgaacaattgtatgcttttctggaaagaagacgaaaaagaagatcattgtcgattttgtggcgcacaaagatggaagcctaaagatgaatgtcgaataaccaaagtaccatatagtcgtatgtggtatctacctattggagaccggttaaaaagaatgtatcagattcacaagacagctgcagcaatgcgatggcatggtgagcaccaatcaaaggagggagaaatgaatcatccttcagatgcggcagagtggagatatttccaaaagttacatcctcggtttgcggaagaacctcataacgtttatctcgggttgtgtactgatgggttcaatccgtttggcatgtctcgtaatcattcgttgtggcctgtgatcctgactccatataatttaccccctggtatgtgcatgaatacagagtacttatttcttacaattttgaattctgggccaaatcatccttgagctagtcttgatgtcttcctccaacttcttattgaggagctaaaagagttgtggtctactggagtcgatgcgtacgatgtatcattgagtcagaattttaatctaaaagcagtgctactgtggacgataagagattttccggcgtatagcatgttatcaagatggactactcatggtaaattgtcttgtccaatttgtatggaaagtacaaagtctttttatctacccaatggacggaagacatgctggtttgattgtcatcgtagatttcttcctcatggtcatctatcccgtaggaacaagaaagactttctgaagggaagagacgcttctagcgagtatccacccgagtctttgacaggggagcaagtttattacgagcggttggctagtgtaaatccagcaaaaacgaaggacgttggtggaaacggtcatgaaaagaagatgctagactatggaaaggaacataattggcacaaggaaagcatcttgtgggagttgtcttactggaaggacctcaatcttcgacataatattgatgtgatgcatacagagaagaattttcttgacaacatcatgaacactctcatgagtgttaagggtaaatcaaaagataatatcatgtcaagattggatattgaaaatttttgttctcggtgagacttacatattgatagtcagggtaaagctccatttccagcgtatgcattaaccgaagaagtcaaaaagagtttattgtcatgtgtgaaactcgaggttaaatttcccgatggttattcttcagatttggctacttgtgtagacatggagaatgaaaagttttcaggcatgaagagtcatgattgtcatatttttatggagcgactactgccatttatctttgctgaactccttgaccggaatgtccaccttgcattatcaggtacaataatgttgtttaagttgccacacttttttaaacctctgatttaacttaaacatatatatatatatatattttagggattggagcatttttccgggacttatgttcgagaactttacagaaaagtgaggttcaaattctcaaacagaacatagttttaataatctgtaacttggaaaagatctttccaccatcattttttgatgttatggaacacctacctatccatctcccatacgaagctgaattgggtggccctgtccaatatcggtggatgtacccatttgagagatttttcaaaaaattgaaaggaaaagcaaagaacaaaagatatgcggcaggatcaattgttgagtcatatatcaatgacgagattgcttatttttcagagcactactttgccgatcatatacaaacaaaatcaagataaatataattatttattttacgattcgcaatctatacttcagaattaaaatcaattacatggatcagattaacaagattcgatgaaggagaagttcctgtatatcatgtctctggagtacctaacatatttatgcacgtcggccgtccaagtggtgaaaagcacgtagaatgactttcagagaaagactaccaaagcgcacatgcatatgttttaagaaattgtgactattttcaaccacttgagaagtattttatatcactccttaatttaaaatttccattatgataactttgatttatttatctttggttgtaaatatagtatgttcgaggattttctttctgtgaaatatccaaccttgtccgaaaaagaactctacgcgaaaagagctgaagaatattatcaatgggttaaagaatatgtaagtctacatcattttagtaatttttaaaagtgatcatttaaattatgttgatattgatattgtttatttattatgtaggtaacatattggaaccctagttttccatttcctacttgggttcaagagattgtgcatggacctttgaacaaggttaaaacttggccaatgtatttcacacgaggatatttgtttcatccaaaaaatcatggcgctggacgaaaaacatgtaactatggggtatgtgttaaaggagaaaattacgcggattcatctgatgaagcgaatttctacggtaccttaactaatattatagaactcgagtatgatggcatcgtcaatttgaaaatcacactttttaagtgtaagtggtatgaccctgtgattggtagaggcactcggcgaagccatggtggtgttgtagacgttctatcatctaagaaatacaataaatacgagccatttattctaggtacgtaattaagaatacataaggttctctataaattattaaataattttgtatatttattaatatgtataatttgtgtatgcagcatcccaggcagatcaagtttgttatattgcgtatccatatacaaagaaaccaaaaagcatttggctaaatgttttaaaagttaatcctcggggaaacatttctggagaatatgaaaacaatgatccgactcttttgcaaacagaaaatgatgaagttgtattgctgactacaattgaagatctggtactagacaatccggtagaaagcttaaactcaatcatactcgattacgatgtcggagatgctgaatcagaggatgaattccgatgtaatttatcgtcttcagacgatgatgaaatcgaagatgatgaagagtactaaatgtgtgctttatatgtatattaattttcctatttatttgaaattttttgtttaagaatatatcagataatgtttaattatttgaataaatattatagaaatcttataattatcatgaatacttataaatataattaatttgttgggctgtcgacatcccaagcccaagcccaataaaattaacgacggtaatacgactaacagacgacagacgtctaatgatattgggcttttaaatttcgagcccaaacccaaaagaattaacgactataatacgattaacttgcgacatactttttatttattgggcttagtaattccgaagcccaaacccaataatgctaacgacgatattacgactaacatgcgagacaccataaatttgtcgggcttttaaattctgaagcccaaacccaataaaaattaacgaaaattcaacgactattcggcgacatttgtctttattgttgggctttcatatttcgcggcccaaacccaataatgctaacgacgaaaatacgactacgttgcgactacctgtataaagaaaaccctaattcgatcgattcacttctcatttcatccaaacaaaacctcttagatctttttcttcaacttcttcttcttcgatcttcttcttcaacttcttcttcttcgatcttcttctgcaacttcttcttcgcctcttctctttcttagatctgattcgaatcgaatcatcttctctttcttcgatctcttctctttcttcgatcgtcctctttctttgatctgattcgaatctcttcaaccatccctatcgccggtcgtggaggttcacgaaagaggaagacaacccccaacgttacatagagagctggagggtccacaccgcttggaagaccagcttcgctgcctcagcagtacgacttcactctggcggcggcgcctcaagttcctctgacgcagcctcctcaagccgtcagagcctcaacgtcagcaccccactacttcaactatccgccgctgcagcaactattccaaagctccaccacttagcgtgttgatccgccgccaccgcgatctgaagaggcgcagtttaatccaccgccataagatcctctaaaccaagagctaccggagtctccaaatcccaactctcagggacacagccatccatcttctcaaggcaacaactttcaagagggagctcctcaatcattgccggagctacaagaagactcggcgagggctctctccgacatacttatggttcccgggagggaaatgtggaccaccgtactgtatcctattcccaagccgaagactgaatggtatgtgctcttcctcaaccctattagcttgttttagattctgtattagcttgtgttacgttgcagcaatgattagcttgtgttaggttgtgtcttgattagcttgtgtcttgatttgcttgtgttagattgtggtggattgctcttgtgtccgctttgttaatttgttgtaaacatagattgtgtcttgatatgcttgtattagattgtttcattggattgtgtcttgattagcttctgtaatactctgtcttgatgagcttgtgttagattgtggtcgcttgctatcttgtgtaaacatagtggtcatgtcttgatgagcttgtgttctgttgtggtggcttactcacttgtggtttgttgtggtggtttgttctgttgtggtggcttgctatcttgtgttctgttgtggtggcttgctctcttgtgaacgcttgctatcttctgtgaacatagtggtcatgtctagcctctcttgtgttctgttgtggtggtttgttctgttgtggtggcttgctatcttgtgttctgttgtggtggcttgctctcttgtgttctcttgctatcttgtgtgaacatagtggtcatgtctagcctatcttgtgttctgttgtggtggcttgctatcttgtgttctgttgtggtggcttgttctgttgtggtcgcttgctatcttctgtgaacatagtggtcatatctagcaatacttgtgttctgttgtggtggcttgctctcttgtgttctgttgtggtggcttgctattctttctgttgagttgtttcactaatgtaacatgtttttatctttcattgtttcatgtgtttggaggtttactcgcgacagaggttcaaagttggttagaaagatcactcggatttttacacaaaaatttaatgctccctactataactggtcatgtgtgccattggataaaagagagaggttatttttctagagtttgcggtaagctgtcatgcatctctcttactttcttaactttccggcttaatcttttgaatttcactaactcaagctacaatgttttgtagaaaactcacagttgggatcccttaataacaggcactgtgcagtattacttcaatgaggtctgcaaacggcgcttgaaagacatggttagcaccacgaggagaactagagagcagcctccatggattggtgaaactctgtgggctgttatgtgcgcttactaggacaccgaaccaacacaaaaacagagtcggacctattccaaagctcgtctctctgaccgtaacggtcttggtcctcacatccacttctctgggccaaagtcttttcaggaaatccaagacgaattggtaagttcttctgttacctctttcagttacctcacatgtatgtttttgaatatttgagctgtgttggtttcattgcaggaggagaaattgggaagaatgctcactattggtgaggtgtttgtagatactcatactaagtcggatggtacgtatgttgatcggaaggcggagatgattgctcaaacttatgagcagaatgtgagagatagattgtcacagctagaggcggaagcttctgctgtgtctgatggcacttcacgacctcgggagctgacaaatgaggagtacacaaccatctttctcgagataaaatgctgcagtctaaacctcttgactttgagtttatggttattctatcactaatctcttctttatttcttttcagtccaccgaaagggattccagaggcaatccttatagacttggcagcttcaaagacacattaggctgtgccaaccgcaatctccctggagaatcatcatcatccttcctagatttagaagaacggctgaaggaagcgcaacgcaagattgaggagcaggctgcctacaatgagaagcgagattctgagattgctgcgcgtgaagctgagacagcctgaatcacggttgagcaaaaggacaagctcgaacacttgtccttagtggagaagtatctccgacaaacagatccgcaattccttgacttcatggcctctcaatcttcgacaaccacaaagcctctaccagctactccacagaatgatcaataggtttagatttcagtcccttttcccttgaactttgaacaataatgtgtgtgtgtgttttagaactttgaacataagtgtaagttgtgttttatgtatttgataggattttcaataataattgtctttttgttatactttatagcatttcaaacaacaaacaaaccgaattctcataatcgatgaccaaccaacaaaaaatcaagataagaccaaattcttatttggaaacaaaatgtcgtcgtaaagtcgtcgtaaaatagtcgtccaatagtcgtatcatagtcgtaaaatagtcaccaatattaccgactattatctaacaacataagaaagtcgttaagtgatcgtaaaggcgtcgtaaaatagtcgtaaactatttagcgactacgatacgacaaccagaatagtgtctacagtccagtacaattgatcgtaaattagtcgcaaagtagtcgtcaataaaagtacgacaattttacgactaaaagaataatcccccatatacagtttaattaatcgtaacatagtcgccatatagtcgccaaatgttacgaccaatcaacgactatttcatgccgactgttaagtagtcgtaaattagtcgtaaacttacgactaacatacgactatgttgcttagcgactatgtatatacgactactctgtttagtcgtctaatagtcgtattatttccgtttacgactatgaaacgactaatgttgtagtcgggtaaacgcatgttttcttgtagtgttgctaaggtacgcttttcagctggccatctacaccatatggagagaaagaaacaacaagagacatggtgaaacaccattaccaccatcacaactgcttcaacgcatcgacaagcaagtccgaaaccgaatctcctctatacgtgaacaaggagatagaaaatatgacggatgcatggaggcttggtttgcttcaagataaaaacaaagagaaatagaaagacctttggaacaacgtgtattgaatatgttaactaaacgctgcatttgttgtaaaaacgttttttctaataaatttttaaattttattcaaaaaaagaaaaaataacaaatttcaaaagattttgaattctcaagtcacaaaattacactatgtacaagttggctaacacatcattggtagatcattatccacacttctctcacatggaaacttctaccaacaccaacataattctcctaaacaaactgatatgactatttgtagtaaaacatttgataagtaattatgttactaatcgtaaccgcctctatcgtctacattgaattgaatctattcttcatctctgaggttcactcttttcatgttacttgttctcttcttagagttgacgtgacggtatacaattatgagcttttcatttggtcctcacccaaacacaagtatttttttgttacacgctagcttggtccacatttagtagcccttagtcaaaataatatttagattcccaatttatgttaaagttgcacgcctattttattcgttagtatttgtcacacacataagtttttatttgatgattctacgttaaaccctctattcagttgctccactgattacacttgctttctccaccactttctcatcaaccgacagctcatgcatacattttttatttttatttttttggtttagagcatacattctttctgtaagttgtggattgaagattatagatgcagatcaatatacgtaaacaaatacgttcactttatagaataagtaacaaataagaaaaacaattattacagaactgaaactcacttcacgatctcttctattcttacgtcaatgataaacgcttgcgatatcgcaatctcctaagacagaatttagtcctacggtagtgtacgtagctttgtgtaggtttctattttgcagaatataactatcgatttctgttttgacaccgtacagagaccctagcaaactctactttgaaattctcataaattgatttggagaaaaaaaagatgagaatcaatccatctttctcccatttgtttctcttgtattgttcttctctattgtctctctctctctgtttttcttcatcgtcattgtctcttttgtattaatgaatcaatgtttgattcaaaagatgtttctcttctctcaaccggtgtatcggtataatctaactaagagacgtgatctaatttgcacaaaaagaagggcatttacataaatacaaatgtttatgtaaataaacatgtttatataaaataaacaccaacataagtataaccaatttttatgcttatttaatcgctagtaatagtcatgaatataaaattttcgatgaattctacatcattcctctattcaattgctccaatgatttcagttggtttctcgaccattgtctcgtcaatcgacctaatattgatacattctctccgtaagtataagtaactatcttgtttaaagtttaagaaacgataataacagttatatgcatttttctttttgaaaattatttacattttttattttgtttaaattgttactcggttaaggttaacggtttcctatgttttgaattttttggaggtgaaatttcatatatagtgtaacctcattgtaaatgcattcttcttcctatttaaaaatgctaaaatgttcggagatttaattctttagctcctttaatttttttactttttcgttgtatctttttaaatattgtgttactggtgagtggtgactaatacaataagacattgctttcgtcttttgtctattaacttcaccttattttgttttgttttaatcatttgtgtattactttcacagttgcacttattctttaatttttttggttcattcacatcatgtaaccaactaattttcagtgtaattaaattaaaatttagcgaaatctataattcatattggaaaaatgtagtaaaattaagatgtaattttatagaactaaccgaaacctgaattatcaaaaaaacaaacaaagatatatatgtttcggtgaatatctaaaacctcccagacacaattatcgggaagcctttcccgacaatgttttttgacgccgacggaggtaaaaatcaccagtgtcgggatctcttcatcctgctgtgcttcctctgtgctcttgttatgcattttttttattttgagttccgttttctctcaaaggcttccaacggcgacccaaactccagtgacggaggccagcgatggggtcccgcgttcgtcctcaggtctcaccctctgttcgcacgatctcagccaaagccaccaattccaagtgctgcaagccaaacgacagatttcggcgagcttttcactttccaaatgggcccaattgataaattaacaattaaaccaaatcaaggctcatacacttttaaggttgcttcaaaatgttgtataacaaacctagaataaaaatttcgttttttttttattgtatttaactatcttatataataagagaaggttttttctaactttgcataccaatgcgacatttggcactctattttgatgacatgtgtacttatcattaattatagtttgactaaaataatttattaaactataaaattactacatattaaactacaattttgaaatgattttttttctagcataattgcaactctcttaactaattacaaaatcaaatcttttaaattttgacatgatattatgttttagactgcacattaatagttcacaactacaaataattctccaattttataagatttttttccatttttagttcttttaaacagtaattaattaaaataattttgtttcaatattatatgattaaatttttaaaaaatctgttaaaatttgatatcttatatttgctcatattttaacagtttttctttttctatgttatttatgcatgtatatattaataaacatatcatatcttatttttacaaaataaatgtatgataaagtaaattacaaaataatttgttgatataaacttatacataatagttccaaaatattttattttgtaagtgatttattcaaaacaatgataaaagaatagtaattatagtatatattttatgatgtatcacttatcaatatttaaatactacatatgcttttaaacatatgatttaataagtaataaatgagtagatgtaaaactcacctgattaaaaaagactgaaatgaccatagttttgataacggttaagagcaacgagagaaagaaaattaggattaaacaccatgagattgaatactcaatgtctcatgtaatgttttaaaaaaaaagaaattattagtttgttactcatgtaacattcgtataaatagcaaatatttacacagacacaacacacacatatttacaagtgcttttgtttcctttgacaattgaagttactcaattactgaaagaaaaatggaagatggtttgctgtatcaccaacatttacggtatcaccaacgtttacggcaagagtcctaaccttatcaatttgtctctttcatttaaggtttggactcatattacctttcagttttttttttctttttcttttagtttttgtgaatgatttcatattgtttaatgtttctaaaatggttatattgagtcttacatacatgtttttgttttgttctaaatgtaaatcgagaaatttttgcatctttttttttttttggaagtaggcatcaaatgcaccaaatgcactttaaaccataaatgaatatgaaagaggaagcaaaacatgcaagaatcccaaccttatcaatttgtctccttcatttaaggtttggattcataatagctttcagatttcgttttagtgtaaatttttgtaaatgatttcacattgtttaaagtttctaaaatagttatattgagtctaacttatatatttttgttagtttttttttttggtaggcatcaaatgcactttaaaccatttaaatggatatgaaagaaaaaactagcatactatggatagtagagtcaattgcaagagaaagaaagaatcaaagttttgatcattcataaaatacaaaaattcaggcaagtgttttagttagtctcaaaaaataacaggtatgaccacaataattatataactatttctttgtctttccaaattaaatattttgaattaaattttgctataaatagttaccaaattttgttgacttatatgctctctaaaacaaaacttaattttttttctgatttttagtataaggaagctaaactaagataaacattagttcactcctattaggaaattgtttaattgttttctatcattacttacatttaagagaatattacacgtagaggcactatttcaaaactttggacacaatagaacactttaaaaccattagtcactttaactcggtataattacccatttaccctgaaatcgttggtttaataaaacataacaaatttagccggttttctctaatccggttccggttgaaccacgtattatcagttactgtctgggttaaatcttcatttaccaacacgatcgtaaaaaaccgcttacccagtaaaaaccctaatttactgtatctccacatcgcgactgctcccaatccgtcgactgctccgaatccggcgactcctccgtcgctgtccatcaatccgccactcaggcgagtctatactcgctgaataaaaaccaaatagtaatttcccccaaatctctgcaataatcgaattcgatttcgatttattgttctcgtaagccagattcattagcattccagttgattctcactgatcggaatactcaatggaaggtacaaatcgtttccaatcatcttattttggtccaattaactcagaagaagaaatcctcttctcgctgaatgtttctgcaattttttttttgaatcgaaaaatgtttcccaattgtttgtagctaagcacagacgtttgtggttttagtagtttgtacaaatactcgttaatctaatctttatctcttgaactggtttcttgccaatgaacagggtcgacatctcaggaaccatcttctcagtgggattcaaaccttccaaatagactcttcgccaccgatcattatccgaggggaaggctgaacgtatactctagaccggatattctatcctttatcaagaaggtttttgatgggacagaggatttagattttatacttcagtcttgctttggtcctttattccatttgccagttagtagggttgcgacttcgggtaaggtcattcatgccttgttatgtagacccgatgaccctatggaggtatacattttcaactagttccttgatttattggacaccggtgagggatgcttcatcactcagtccttgtccaaaaaaatatttacaggccaattctccagactgtaattctccacagggcaatgcagcatctcagtgcattctaaaagatccaaatggccatgaagcagatgatgagggaaaaatccaggtacaaaaatacaaacacaacacatcaaacaatttattttacaggttatagattctcacaaaattgactactgtactttacaatcagtttgattcaagtgcaaacctaagccaaaaagaacaatctcctctcgagcaagacaatattatggagataagcttatatataaaccaaattattgtcagaactttattaaaccaaattattgtcacagcccttaagacatatctgtttgtaattcataattcaggaaaccttggagacggttgaagcttctcattcagtgttggagacgcaacccgaagaaaacattgacgatgatcatatgacggaggtaagctaatacataatttgatttaacacattggatttagtccttaatataaataatgactcttgtgcatagttattgtggacatgattttgtggatacttactagtgtacttcaacattcaggttactttggagtcagctgcaacatctcactcagtcgaactacctcaacccgatgaccctgtggaggtatacatttttaactagttccttgctttatttgacactggagagggatgcttcttctatcagatcttttccaaaacaacatttataagccaattctcaacagggcaagccaatacctttaatcattacatatattaatggctttacaaaaaataatctaaaaaaacaactacaattactaaaaatggattataactacttttcctgttaaaacatcatctccatatggatacgagtttatggatagttaaacgggattgcacagatttgcggtttagcaagatatgctaattatagactattttaacacaataaataaacatatatacttatatttggtacatcaagaactaggtttacagaaacggaaaaacatttatgggaatatcttacaataagaaatgaaatattttacaaaaacatggaaactagttacagatcatacattaattaacaacttaaattcaaaaataaaatttctcattgtattagatcaacttgtcctgttatgacccaatctaaaaaaacaactacacgtactcaaaatggattagaactactttacctgtttaaaaaacatctccatatggatatggctttatggataagcaaacggtattgcagaggattgcgatacaatcaggatataaaatcagcaaaaactaattataagaactgaaatattttacaaaaaatagagcaactagttttacaataagaactgaaatattttacaaaaacatggcaactagttatagatcatacatttattaacaacttaaattcaaaaatacaatttctcattggattagatcaacttgtcctgttatgacccaatctaaaaaaatcaactacaagtactcaaaatggattagaactacattacctgttaaaaagcatctccatatggatacggctttatggataagcaaacggtattgcagaggtttgcgatacaatcaagatatgtttcagcaataactaattataagaactgaaatattttacaaaaaacatagcaactagttttacaataagaactgaaatattttacaaaaaaaaatagcaactagttaatcatcatacatatattaacaactaaaattcgaaaacacaatttctcaaattggattagaacaacttgtcctgttatgacccaatcctttgcagcgtgagcacctgttctgctgcgtccttcctgtcttaggtttctacgtttaccatgttaaccaacatgttgcattagtttggttagtttttcaaaagcttagacaatgtacgagatttacaaaatatttatctaaccttatattcccctgttgatggtattcttgctacctttaggcctccctgatggtctccgagtatatggtggaagcatggaacggtgtgggagctcttccggtatgtcttcttctttgccatttgcttcagggaatactgctcctttgtaactcgcaacccatgagtgtggtttgaaataatcatcaactaaagccttgtacgagaggttaatgctattggcagccaccaaagcatgaccacatggtatcttcagtttatcatatctcttgcaggtgcactgcttcttttctagatcaacaacattgctaccacctagcttcccaactacctcgtagctccagctggttaccctaccaaccttgcttccacttgatgttgtcaagttttttgaaatttgcttgtcaacctccggaggtactggacctgaatgtgcttgtgacttcttccgacgcgcgttgaaccaacgtgtcaacatagacctaataaatcttagcaattccacaatatgtgacgatctccccttgaacaacgccttgtttaacgtttcagcaatattgctagtcatcagattgaaacgctggccagggaaatatagccttgtccaatgagccatccctacgtcgtgtagatactttatgcaaagggggttaatggcattaatctgattataaagcgttttaaactttccactcgtaaactcatatccagcgtttttcactaactgcgtcaatcctctgttcttgaaccttgcttgtatattcctacataggtgaataatacatgcaccatgatgtgcttgcggaaataccttcttcacccctacctttatcgattcgtgcctatctgataatatagtgagtgtgttgctgtcagctattatccgctccaactttgtaaagaaccaagtccatgcatcatcgttctcgctatccaccacagcaaatgcgagtggatacacttgaaagtttgcatcttgaccacttgctgtgagtaaaacccccttgtattttcctttcaaatgtgttccatccacaaccaaaacccttctcagatgcttaaaaccttgtattgaagccccaaaagctaaaaacatatataaaaacctctctttcctttcatcttcaatatcaggttctgtttctatatgtgttatcgtccctggatttgttaacttcagaagatgcaaatattcagccaaattgctataagactcttcatcactcccgccaacatctgttaaagctgattccctagctctccaacactttttgtatgacgcagaaaccctcaaatcttctagtacaagttgctgaagatccattggaacaggaccagcagaagcttcactgtattttgccttaaatacagatgcaatcacttttgacgttgccttaaatactgccttctagtatcaaccgaacatgtgtgttgaagctgcgctttcttaatttcatagtaacctgtgccattcattacagtggccaatattctccaatcacatttctcatctgagcaactgagaacaaaataattccattttgttcttgtttgcttgaaatgaaactgattctttatcgcaaatatagccaatcctatttggcaatcttctttgctcgcatacacttttccctggtatatacctttaccatcatcatcaatgtccaaatcaggtaagttatcaacttcatactcgatgtcctcaaacaaaggtgggatgtcaaactcctcgtcatccacttcctccaactttttgacctcattactcgtttcctgagagcttccaactccaccgagcatctttcctttcataacttgtggagtcttttttgtatgctctgtctttatactttcgccagccccattcacataactccgctgccagtacagaaaaccacttcatccggattggagcccacaaccttattgttagacccgtaccttacatctaaacctcctgttgccatcaactcattagcattggagccaccataatcatctgttaagaaatttgaccaaaactccttatcataaccgccacagggcatactatcttcaggtttttccgtgactgcttcaacttcctctgtatcgttatcaacgaaaaacaacttttcaacatcattgttaaaacattcgttatcagtatcattccgtgacgatttatgcccactgttacttcctatgtttgcttctgcttgttccaattcctccatgaattcgtcatcacgaggggtcaacacaattgtaggagtttttgaacccacagacgatatatcgcgaacagatgtgacaccacttttaggcgtttttgaaccacactcttcctccaaactgctttgacgcggtcgtttagtgctactatctcctcgtgtatcaaaactttgtaaatcttcctccatttcttcaaacttcacaaacaaattaagatctctgttttctctaagtgcacttagatagtacagaaggccaacctcgcttgtaaccaaaactggaggagtcttctcctttgttgtgaacatatccttatccggtgcagcataactcaacaaaggatttacaccaatcattccgaactctttcgaaatcgctgacttaaacgctcccagtgtcattccctcagaaattggaacaaccctagaaaacagtttgttacagatctccagtttccactctccattcgacgaacaaacccaatctccacaaattaccatacaaaactcatccatcaatccctaaccaaaacaaaacagagcattcacgttaattacctaatagcgtaattgagtatcgtaaacgtgttacgatatttaaggatattttttcattgtaccttcgtcgacatcgaaataatgactgcattacaaccgtctgtaatcgtcaaataactcctttctttgtgtgaagatctcaaccgtctctttatgcactgagtggatacattttttttagataccgctacaaacctaagcaagataactggttaactaattgattgatcatattggacactcaacaatacacaagtatgaaacactcatcaattttacattttttttggatttattggacattatattgtggacataatattgtggatatatagaacacaatcagtataatggaaagttaaaaatcagcaaacaaaaaataaatcaaacaaaaacacataaaacattgtgggaaaaattttaaataatcaaataaaatcttcaattcattttttgcatgtatacactcaagtagagctgaacattttgggagaagcatcaatatgatagaagaccaaattattaggaatcctcttttctctacaacaaaaacagatacatcactaaccaatataaatcatggttttcttttttatattttttgggtttgtctaaaaaagtccaaaaaggaactaaggtcaaaaacatgaaagatataatttacatccctttacatcaaacataatcaatataacagtttaaacattcgacgatactggacaattatcagtgaacaaatatgataaaatagttggacatacagaagtggacattaatattttgcagtttatcttttattggacttgatatgttggataaatggtcaaagaaacatggataatatactttggattggcgtttattgttcatgtataaatttatgtattagtatgaaactatcatgtgagtcattagatgatcatatggactggactgcttggacaatcattaatggacaagtatgtctttgatttgctgcgaatgtgtttatagctcgataaaattgcatcaacatgtctatatacatttggataaatggtcaaagaaacatggataatgtactttggattggcgtttattgttcatgtataaacttatgtattagtatgaaactaccatatgacttattagatgaccatatgtactggactgcttggacaatcattaatggacaagtatgtctttgatttgctgtgaatgtgtttatagctcgataaaattatctcaacatgtctatacacatgtggataaatggtcaaatagacatggataatgtacttaggattgacgtttattgtttatgtataaacttatgtattagtatgaaactaccatgtgagtcattagatgaccatatggactagactgcttggacaatcattaatggacaagtatgtctttgttttgctgcgaatgtgtttatagatcgataaaattagcacttttttgtttgctcatctaacattatcattggagcccaacttgatacaacctctctagcttctcttcttcctctcttacaataaacagaataatcatcaccttctctttcaacctctttacactcctccctcgacgtcacagctacatcaaccgatgaagaaatcggagctacaaatccatcaacaccaatcggtatatcaagccttgtaggtcgtttccttttttaaaacttcttccggaagagacgatgcagaaacagagtcagatccaaacgataacccgaatctagatggaggtttctcgaaacaaagacgaaacggcgatttcggagaagaaacggtggttgatggagaggaaggagaagatgttggaggtttgcaatgagaaagagattggccggaagaattatcagccatcgacattgatattgtgagataatcggacggcctgtaattgtgaaggtaactccctttctcatctgcaaatctcatctgtcgttttattatataccaattcaaacaaaatcatgttaaccggttaagtaattgatggtttagtttaaaaaggatataattgtcattttatcctccaaaaacaaggaaaagtgcctcatccctgaaaagtgcctcaaaagtaataaaattctttgaaagtgcctaaacgtgtcacattccctacatttaatgacctttccaataattgtttttaaacctataagtcgaaattattgaaagactctacaatacaaattacaaaaatctatgtctataatacacattagaaaattatattgaagcaaaaaaaaatagattcttttatatgagtgacatattgaaatgatttaagatttatcttctccaagtttatattttcttaaattgttttaaaaatttatttaaacaaaaaaaataacagtgtaaggttcataatctaaaattaaaatttagaatttagcttttacaataatatttttcaaactcataacaacaacaaagaaaaaaacttaaaacaaaacaaaacaatatttgagatacagtggaaggggattaggaaatgagagaatgaaaataaattgtgggagttaatttttaatttattgtgtgttgaataaaatggtgtggagaaatataattaatttatatatatttatgatttcagttttgtaaataaattgtgggagttaatttttaatttattgtgtgttgaataaaatggtgtggagaaatataattaatttatatatatatttatgatttcagttttgtaaataaattgtgggagttaatttttaatttattgtgtgttgaataaagtagagtggaagaatataattgatacatatttttatgatttcagttttatattaaactgtgtgttaaatatgttatttattatttattaagaattaaaaaaaaaacttatattgccaagtggaccaataaggaaagagtgaaaccttacttttatatatacatgattcctaattttttggtttcatttttaaaggttacctaaagtatagctattattgttgccattacatcacatataaataataacaattgttatataatcttaaattaattatatataaaaattatggtttcaatttatcaaaggttataacatttaacttagagacatatttttccatcatttttttccatcatttgaagttaaaaataaataactctatatttatgcgataataattggtaaacatcaaaattgaaaatttaaattatttttgagccctatattaacaatttttaataaattatatatagaaattaacgtctttcaatacatttaacaaattttatatgacttattttttttaactgacatctgagatctttagtcaagttggagggtttttcattgaaagttatcttaaatcataagctttaaatttttaaatgtgaagaaggttcatctattgttttgactttcaaaacaattggtaatacatgcatttgcattttcacaaaaaaaaaaactgaataatttatgtttattttttaatatatagtaaaacatactgttttcacaaaaaaaaaaaaaaaaaaaaaattgaatgcaaacttttaattaactaaaatgtctttgtaaaaaacatcataatttgtaaacataaaagttactattattaattattttgatcgatatattaacaattataaataaattttatatataatttaatataaatattattctatatttaaaactaaaaccgaatataaaatccacgcatcgcgtggacaacttctagttttatataagttaagtatttgtacgttagaatcaaagaaaatgtgacaaatgggcctaattgataaattaacaattaaacccaataaaggccattaaacttcaaatccagatcatattagtgttatcatcataacttctagttgacgactggcgtctttagagttttgaacaattccatcgcaaataagtctccttgacgaatcttcttgtttggtttcatcggcttccttccttttctttgaatccctgtgtacgcttgttacatccttgatcatgattagcttttggttgatttttctttggctcttcgttgtgttggtgctactcttcgttgtgtccttactttacaaaactttctctagaaaggaaaagaagctgacgtttttgtcgctccctgatgaaatcgtcttgaactgtttagcccgcatatcgagatcgtactatccgaaactctccctagtctgcaagaccttccgcactctcctcatatctaacgagctcaccgtggcgcgagtgcaacttaaaacctacgaaagtttttttcatgtctgcttaaagtttcctgataaacctaatccatcaatgttcaccctctggataaaacctggtcaaatcttaaccaaccaacttgagaagaacgagaggtctacaggagctactcggttggtacaaataccttcttcatattgttctattgtaccacattacctaatttctgttggttccgaagtatacggactcagccaacacaatgatccgtcctccaacatgtttgtccgtaacaaggaggatttgttttggtgtaatgccccaaacatgactgtagctcgagcgaaagccatcgggcacgcctacaatgggaaactatatgtcatgggaggttgcagggatgatgaatccgtgaattggggtgaggtttttgacccaaagactcaaacttgggaagctttacctgaccctggctctgagctccgtttttcttcaattagaaaaatagatgtgttccaagaaaagctttacgttagcagcaacgagaagatagactctgtttatgatccaaaagaaggtaaatggaatgttgcagaaaaatcacctgtgcaatgtatggtaaataatgtatggtgttattgtgataaacagagctgctgatggtatgacaaaaatagtaaaaaatggagagtggtaaaaggtttagatatgttgaacaagaatcttggttgtggaatgattgaaatagctaactatggtggaaaactcttaatcttatgggacaaggttggtctttctcaagacaaagatatttggtgtgcggtgattgcgcttgaaaaacgtgatggtgttgatgaagtttgggggaaaattgagtgggctagtatcgtgcttacggttccaagctcatacgttttcttgtatagtctactaaataggatttgattaaatctaatcatgtttttgtttttaccattgctaaaggattttttttcctctctttattgtttagtgtatctacgagaaatacatcaaactacaaaatgttggtttagacggacgtgtaagtctattggtaaattgatttgtacgtcaagtgaatcaccaagtcaaatgttgcatagctttagagtttcggtttagatggagttaaaagattatattggaaagagactccatgttcaatgttctgacaagacagacccaaaagtccgaatgtgtagtttttaaacttgcaatacttggaaaagttatcataaaaaattctaaagcatatttattacttagaaagatttcgtaccagtatacaagcagttgcagttgcaaagataaagaacttaaacagatctacgtgtacaactttctatggagaccaaacagctttatacatgtctaataaatgagaatatatctctgcaactgcaactgcttgccgtttgatgcctctgtctctttttggtcagataagattcaaaagtgaagaggattagtgtttctgcaacatgtttgctactctgtttcagctctgtaatgtgatcctcagtcaaacactaatattttttgttgcctagcccaattttattgccccctggttaaaatctacagagaaattaaccagagaaactaaatttgaacaacatatgtgctatcatttactttggacattatactctttcaatttggttcgattcatttttttttagtttcggattctttgttttatatggtataaattataaccaaacgcttggtacaatatgtatggtactatatatagtttgattaagctcggattcagacttgtcgataatttgttttgataaaatttgttgtatcaaaaatatcaaaccccttaaaatatgtattttagttaattagttattctatgatttatattatcatggaagcctcattggtccattagttgactaaaagttcattaatgcttctataccaagaggtctgaggttcaagacccagataatgcgatttatcagcatatttggagattaatggaaacaagtgtgcaaaaaatctccaacgatgtacaattattgccattcgcgaggattctccgcagagactttcattataggtgtgcatcaagagcataaagaagagaaggaggtgttgtcttcgtggatctaataagggtcagaaggaattgcacgtgatagaatcgtttatgtaacagttctcataatttacaaaaaaaaataaatctagacggcaaaaaaatattatattatcagaatacaaattttcttttatgttatatcgtaacaatggaacatcatggttagtgagagaactaatacaggtaaatcgattatcttatcccaagcttgcatcccctcttgaagcggtatttatggcctatgggcagtagaatgcttgagtaacttcaggaaaaagttggttttgaactatcttctcaacaagtggtggaggtgattgaattctcttggcgtttccccttatttttatatttttttgtgcaaaaatgatgctcttacattcaaatcatgtagagtacttaaaacacaatttgaatagtttcattatgttacttcaaatcgaagatttatatactatcaggaatcttcaatcttctgtaacaaactctagagagagagagtgaaagaagaagaagatgacagaaaccaaaacaatcgtttattctcattaatttggtaaaatgtacaatgtacagtattatactcgttatatatacaaaccttgaatgttagtttatgtatacaaaccatgaatattagtttcgtgttcttgagtgcccctataatcgtgtttagctaaacatattgttcattacagaaaagtctcggattgcccctacattatatatatatatatatatatattatgcccctataatattgtctaccgaatcattgcaccaaatagaatatgacaaatgggcctatttgataaatttaagatgaagcctattaaaggcccaacaacttgaaatccagatcatattaaactattaccatcataattatgactttgcattataattattattatttgataatatatccacaattccaacacaagtctttgtacttttgactcgttagatatcatccaaccgaaatatatacaacctaagttcaaaagaaccacgcaagatgttgccatattgtccataatgtatccacttgtcgtttaacataaacaatttttaactatattggtttagaaatattttccaagagagattcttaacacgatcttacttgtatgttctttatctctcaccgccaccaccactttcctagatttattagctagtgacatttttaagtcacatgcaattgatgatgcattcgtcaaaatcgctaaataacaattcctaataatttatttttaagtaccacataatttgtttcccatcaaaccgtttgtaacctccaaaatcataatcattgcctattttctcgtaagatttgtgcaatttaaaaccagtatatccaccacctgcacacaactatagtttcacacgtatacttgatttcaggttcagtcccaaattcttactgctacaaaattgaaagttacttgcgaagtgtatacctaagaaaacatgtgtacttttcgttgattctttttctttaagccaaaatttttacttaaattaagatctcacgaatcttaaccaatatgaaagagcacacaattttattcaaacaacatcaaatcatttataacatcatacaaaaacatatgacctatcaaatatataaagcagaaacatcccaacaaagagtgtccacaatggcaaaagtaattaaaaatagaaaaatacgctattaaaagtactaactaatcctaactgttacagacggttcaaaatttataatattaaaagatataatagaattggatgcatcaggttattatttatattgaaaagatataaggttaatcaaatatatttttggttgaaaaataagaagattgacaaaataaaaatataagtttaatgtaatcacatattgtttatcaaaaatttacatttcttttttatttctatatattttgtttcttattcatatgttgtttttcaaaattgtttatttctattttttacttatatatatatatagatatatatatatatatatacattttcttcataaatatcttaatatatataatactatagttttaaaatattaattaatgtgatgtcaaaagtattaattagtgatacgactaatggcaattggtcacttataaaaatatggtagtataatcaaaattgtgagactaaaatgaattatttaatatattctaataagaaaacttatacatatcacgtttgatttttaaaaacatagaaagacatattgccataaatggtaacattgtcaatacttttcccatcacgttgaagttttatttcatgttcaaatattcatgggtaaaatgtatttttataataatttttctttttattatgtattatattttacacaaacggattttggatcataaataactgttttaaccataataattttacttgaaatgctttatcccgcatgaaatgcaggttattatctagttataattatgccctcatcatcatcaacattaaccaccaccacaacaacagtcgtcgccatgaccataaccataaccactacctatgaagttataaccactgacccacttttggtcatcataacttgcctgccatttgtgttagtttcttaatttacgcatatatagtgctatatatttaaacaatttatcaaatatgacttttttgcaaatgaccttttcctatttccttttataaaaataaaataaaaattaaaactaaatcttgaagatatcctttgtccaccaattcataatactttcgagtaagaacttcatggcgtttcttttgctaggagttcctccatataaagcctttgttaaaacaatcgtggagtccaagattctttgaacacatgtgaccaagatatccgctgtctctttggataaactcatcacctcacagatcttttctctccattcaattgtcggcggcatatccaagctgaaatcaagtaacttccacatgaacacaacattgactgcattcgtcttcttgatgcgctgcatcatgccctcctacgatgaaaagattcgacctcgaatcttgttttgatgcaggtagactttatcaaccatagcattgttctcttggtacctgtttgtgtacgtaaggagaaatgtttcttcacaaatagaaccaaacattcgcacatcccttttcatatatgcaaaaaccaaatcttcttcttcttgatttgcaggagagatcgtcttcacatcacttgtatattgctttctaatcagagcacacgagggctgcaagtggttccattgattgttccaaaatcccattgcattagttgttttccccctataggagaagattccaccgcgaatcttgatcaggatggtgttgaatacattaacgtgttcagagacatagctaaacgtgtttgcaaattcggcccaacaacacttttcttcccaacgtttactgtcacccaagaaacaaagccatatcttcttgaacattccgtgtgtgatcttcggtagagtatgtgatgatgagttaatatccaagctgagagcatgtaacttcaacatcaatgcaagaacaagcgcatttgtagtctccttacccaccaagaaacgaacatttgtagagaaacaagccactacgaagcttaactttccacaagtcaacagttttcttgattcgcaagcaacttcactccaacaaataaaagacgcccgagactctcttgaaatcgatgtagtcgggaagactaacaccatccaaaaaacatgatgaagcagcacaaaaatcacatgaaccattgatgactccatgttgacgagaacctggtggtgatgcaaaatatggacttttgacaagccaccaatcataactacaccgccaaaagaacccacaacaaccaaaaggtgatatttttcaccatcagtgtgctcctcatatagttccccagagttgttgttaccgcaatataacaaactatccttccatctacgacaagtcatgactcgaattgagaaccccatagaagacctcaaaacatgcatgagaaaaccacctatgactttggatttgatcttgtaattccctctctctgcacatatatatattcaggaatagagagatcacctagtggccgctgacggcttagtatcaacaagtcttcttgtgaggaactatcccaccaatactggctcattctgctccgaagtgatgcgatcaacgctgccacttgactgcaccattccatctcttcttgacattggtgattgatcgaggatgatgtctcttgtactaaatcatggcaacgcttagtatcaaatacgttactccggccactttttggctcgtggcgcacatcaaacaacaacagaaatattcctcttctttcaaaagttgctgtaattatggctccatacacattgagaagaaaactcatagcattggtgaccgcagacgacacatcgttaatctcatgtgttaatagcctcaccattagaatattttcaacacataaagccaccattgtaagcaaagctcccatgctagaaaaaatatcagtgtgatatatgacatttacgtcttcaccgtaaacatcagaaacgtcacttttacaacacaatgaaattgtaattggatcttctcttccaaaagcccaattcataaactccatctgtgagctgcacacatatactccctcatctgttttattagttttgtagctcacatgtgaatcttgtctagttaacccacaatgacgagaaaatatgaaaggttttgcacactcaacttcagttatctctctgtaagaatcaacatagcaaggattttcctctttatagctattagaaattaaagtaccatagatcttgttacagagatctaactcaccgtgaaaaaacaaaatctcgcttcgaccacgatctggaggttcatcattgatattgtaatgaccgtttgcaagaaaaaattgaataaatgtggtttccattatccagatatgaaacttctacctccttgtcatgattagtgatgactacttcatattgaattgacgaaagtcttctgtattccaccacttgatttccgataaaatccgtgttgtagacgtcttcttcacaaccatcatcaaccggagaaaagacattagagaagacatctaagggattaacattatcaactagatcatcgacttttgtaacatcaaagctagcgccttcgtcttgacttggatcatcatgtgaatcacaatcttcaacaacagctacaaaaacatttacatcgtcgattttatttgccacggctttgtcgttatcgtcaacgtcttgtgtgttgaaataatcatcgatgttctccgcgttggaaacaacatcatcaaatccatcatttttgacatcattaaatccatcatctttgacgccaatttttggatccccatcataggtgcgttttgtagacgatacatcatcgccaacaacatcatagataggtttattgacgaagtctttgacttgaaagccaccacaattctccgtgtaatcatccaccaagcgcccttttagtctcgaatttcgtaaacaattatacatcgtatgatcgtaattacgaggtaaaaaggttgcacacaatttctgcttaagtttagtccatgatttaattggactcttgtcagcttgcttgcgtgatttcttcacttgatgccaccatgatgatgcgtgtcctcgaaatttattcgtcacaagcgaaactataatagatcatcaggaactcttattaactccaaaatttcttcaacatccacgagccaatcaaggaaagaatcgacacgaatttcaccatggaacttaggaatatccaacttaaaactagaatcccatctcatgtctttcaaagacatcttgcttgacaggaaatcaaaccaccaggaacgagatgaatctgataccaactgatagagagcggaagctaaatagcagacgagaacacaagatctctaggagaactcggattcacgaacggatcttgcttacaacgtcgaaacttaacgaagaagcaataaaggataaggtcgagatcggttccaagagatcgatttcgacaaggttttgcaagtcctccttgcagggcttgaacacaagctcttagggttgagagtcctcctatctaggctttagacaaagctctcttaaaacttgtttattcaataatcaaaagctaattacaattatgaatcacatctttttaaataagagaagagaatgaaaaccctagcttaaagaataagcaaactaatacaatcatttaaagcccaaatcaacattaagcccatgagaagcacaaaccaaacaactaactagctcaaatgtacgatcgtcttggagatgcgctgcatcaacaagctt

SEQ ID NO: 755 - DNA, 53537 bp, Arabidopsis thaliana
gaattctacatcattcctctattcaattgctccaatgatttcagttggtttctcgaccattgtctcgtcaatcgacctaatattgatacattctctccgtaagtataagtaactatcttgtttaaagtttaagaaacgataataacagttatatgcatttttctttttgaaaattatttacattttttattttgtttaaattgttactcggttaaggttaacggtttcctatgttttgaattttttggaggtgaaatttcatatatagtgtaacctcattgtaaatgcattcttcttcctatttaaaaatgctaaaatgttcggagatttaattctttagctcctttaatttttttactttttcgttgtatctttttaaatattgtgttactggtgagtggtgactaatacaataagacattgctttcgtcttttgtctattaacttcaccttattttgttttgttttaatcatttgtgtattactttcacagttgcacttattctttaatttttttggttcattcacatcatgtaaccaactaattttcagtgtaattaaattaaaatttagcgaaatctataattcatattggaaaaatgtagtaaaattaagatgtaattttatagaactaaccgaaacctgaattatcaaaaaaacaaacaaagatatatatgtttcggtgaatatctaaaacctcccagacacaattatcgggaagcctttcccgacaatgttttttgacgccgacggaggtaaaaatcaccagtgtcgggatctcttcatcctgctgtgcttcctctgtgctcttgttatgcattttttttattttgagttccgttttctctcaaaggcttccaacggcgacccaaactccagtgacggaggccagcgatggggtcccgcgttcgtcctcaggtctcaccctctgttcgcacgatctcagccaaagccaccaattccaagtgctgcaagccaaacgacagatttcggcgagcttttcactttccaaatgggcccaattgataaattaacaattaaaccaaatcaaggctcatacacttttaaggttgcttcaaaatgttgtataacaaacctagaataaaaatttcgttttttttttattgtatttaactatcttatataataagagaaggttttttctaactttgcataccaatgcgacatttggcactctattttgatgacatgtgtacttatcattaattatagtttgactaaaataatttattaaactataaaattactacatattaaactacaattttgaaatgattttttttctagcataattgcaactctcttaactaattacaaaatcaaatcttttaaattttgacatgatattatgttttagactgcacattaatagttcacaactacaaataattctccaattttataagatttttttccatttttagttcttttaaacagtaattaattaaaataattttgtttcaatattatatgattaaatttttaaaaaatctgttaaaatttgatatcttatatttgctcatattttaacagtttttctttttctatgttatttatgcatgtatatattaataaacatatcatatcttatttttacaaaataaatgtatgataaagtaaattacaaaataatttgttgatataaacttatacataatagttccaaaatattttattttgtaagtgatttattcaaaacaatgataaaagaatagtaattatagtatatattttatgatgtatcacttatcaatatttaaatactacatatgcttttaaacatatgatttaataagtaataaatgagtagatgtaaaactcacctgattaaaaaagactgaaatgaccatagttttgataacggttaagagcaacgagagaaagaaaattaggattaaacaccatgagattgaatactcaatgtctcatgtaatgttttaaaaaaaaagaaattattagtttgttactcatgtaacattcgtataaatagcaaatatttacacagacacaacacacacatatttacaagtgcttttgtttcctttgacaattgaagttactcaattactgaaagaaaaatggaagatggtttgctgtatcaccaacatttacggtatcaccaacgtttacggcaagagtcctaaccttatcaatttgtctctttcatttaaggtttggactcatattacctttcagttttttttttctttttcttttagtttttgtgaatgatttcatattgtttaatgtttctaaaatggttatattgagtcttacatacatgtttttgttttgttctaaatgtaaatcgagaaatttttgcatctttttttttttttggaagtaggcatcaaatgcaccaaatgcactttaaaccataaatgaatatgaaagaggaagcaaaacatgcaagaatcccaaccttatcaatttgtctccttcatttaaggtttggattcataatagctttcagatttcgttttagtgtaaatttttgtaaatgatttcacattgtttaaagtttctaaaatagttatattgagtctaacttatatatttttgttagtttttttttttggtaggcatcaaatgcactttaaaccatttaaatggatatgaaagaaaaaactagcatactatggatagtagagtcaattgcaagagaaagaaagaatcaaagttttgatcattcataaaatacaaaaattcaggcaagtgttttagttagtctcaaaaaataacaggtatgaccacaataattatataactatttctttgtctttccaaattaaatattttgaattaaattttgctataaatagttaccaaattttgttgacttatatgctctctaaaacaaaacttaattttttttctgatttttagtataaggaagctaaactaagataaacattagttcactcctattaggaaattgtttaattgttttctatcattacttacatttaagagaatattacacgtagaggcactatttcaaaactttggacacaatagaacactttaaaaccattagtcactttaactcggtataattacccatttaccctgaaatcgttggtttaataaaacataacaaatttagccggttttctctaatccggttccggttgaaccacgtattatcagttactgtctgggttaaatcttcatttaccaacacgatcgtaaaaaaccgcttacccagtaaaaaccctaatttactgtatctccacatcgcgactgctcccaatccgtcgactgctccgaatccggcgactcctccgtcgctgtccatcaatccgccactcaggcgagtctatactcgctgaataaaaaccaaatagtaatttcccccaaatctctgcaataatcgaattcgatttcgatttattgttctcgtaagccagattcattagcattccagttgattctcactgatcggaatactcaatggaaggtacaaatcgtttccaatcatcttattttggtccaattaactcagaagaagaaatcctcttctcgctgaatgtttctgcaattttttttttgaatcgaaaaatgtttcccaattgtttgtagctaagcacagacgtttgtggttttagtagtttgtacaaatactcgttaatctaatctttatctcttgaactggtttcttgccaatgaacagggtcgacatctcaggaaccatcttctcagtgggattcaaaccttccaaatagactcttcgccaccgatcattatccgaggggaaggctgaacgtatactctagaccggatattctatcctttatcaagaaggtttttgatgggacagaggatttagattttatacttcagtcttgctttggtcctttattccatttgccagttagtagggttgcgacttcgggtaaggtcattcatgccttgttatgtagacccgatgaccctatggaggtatacattttcaactagttccttgatttattggacaccggtgagggatgcttcatcactcagtccttgtccaaaaaaatatttacaggccaattctccagactgtaattctccacagggcaatgcagcatctcagtgcattctaaaagatccaaatggccatgaagcagatgatgagggaaaaatccaggtacaaaaatacaaacacaacacatcaaacaatttattttacaggttatagattctcacaaaattgactactgtactttacaatcagtttgattcaagtgcaaacctaagccaaaaagaacaatctcctctcgagcaagacaatattatggagataagcttatatataaaccaaattattgtcagaactttattaaaccaaattattgtcacagcccttaagacatatctgtttgtaattcataattcaggaaaccttggagacggttgaagcttctcattcagtgttggagacgcaacccgaagaaaacattgacgatgatcatatgacggaggtaagctaatacataatttgatttaacacattggatttagtccttaatataaataatgactcttgtgcatagttattgtggacatgattttgtggatacttactagtgtacttcaacattcaggttactttggagtcagctgcaacatctcactcagtcgaactacctcaacccgatgaccctgtggaggtatacatttttaactagttccttgctttatttgacactggagagggatgcttcttctatcagatcttttccaaaacaacatttataagccaattctcaacagggcaagccaatacctttaatcattacatatattaatggctttacaaaaaataatctaaaaaaacaactacaattactaaaaatggattataactacttttcctgttaaaacatcatctccatatggatacgagtttatggatagttaaacgggattgcacagatttgcggtttagcaagatatgctaattatagactattttaacacaataaataaacatatatacttatatttggtacatcaagaactaggtttacagaaacggaaaaacatttatgggaatatcttacaataagaaatgaaatattttacaaaaacatggaaactagttacagatcatacattaattaacaacttaaattcaaaaataaaatttctcattgtattagatcaacttgtcctgttatgacccaatctaaaaaaacaactacacgtactcaaaatggattagaactactttacctgtttaaaaaacatctccatatggatatggctttatggataagcaaacggtattgcagaggattgcgatacaatcaggatataaaatcagcaaaaactaattataagaactgaaatattttacaaaaaatagagcaactagttttacaataagaactgaaatattttacaaaaacatggcaactagttatagatcatacatttattaacaacttaaattcaaaaatacaatttctcattggattagatcaacttgtcctgttatgacccaatctaaaaaaatcaactacaagtactcaaaatggattagaactacattacctgttaaaaagcatctccatatggatacggctttatggataagcaaacggtattgcagaggtttgcgatacaatcaagatatgtttcagcaataactaattataagaactgaaatattttacaaaaaacatagcaactagttttacaataagaactgaaatattttacaaaaaaaaatagcaactagttaatcatcatacatatattaacaactaaaattcgaaaacacaatttctcaaattggattagaacaacttgtcctgttatgacccaatcctttgcagcgtgagcacctgttctgctgcgtccttcctgtcttaggtttctacgtttaccatgttaaccaacatgttgcattagtttggttagtttttcaaaagcttagacaatgtacgagatttacaaaatatttatctaaccttatattcccctgttgatggtattcttgctacctttaggcctccctgatggtctccgagtatatggtggaagcatggaacggtgtgggagctcttccggtatgtcttcttctttgccatttgcttcagggaatactgctcctttgtaactcgcaacccatgagtgtggtttgaaataatcatcaactaaagccttgtacgagaggttaatgctattggcagccaccaaagcatgaccacatggtatcttcagtttatcatatctcttgcaggtgcactgcttcttttctagatcaacaacattgctaccacctagcttcccaactacctcgtagctccagctggttaccctaccaaccttgcttccacttgatgttgtcaagttttttgaaatttgcttgtcaacctccggaggtactggacctgaatgtgcttgtgacttcttccgacgcgcgttgaaccaacgtgtcaacatagacctaataaatcttagcaattccacaatatgtgacgatctccccttgaacaacgccttgtttaacgtttcagcaatattgctagtcatcagattgaaacgctggccagggaaatatagccttgtccaatgagccatccctacgtcgtgtagatactttatgcaaagggggttaatggcattaatctgattataaagcgttttaaactttccactcgtaaactcatatccagcgtttttcactaactgcgtcaatcctctgttcttgaaccttgcttgtatattcctacataggtgaataatacatgcaccatgatgtgcttgcggaaataccttcttcacccctacctttatcgattcgtgcctatctgataatatagtgagtgtgttgctgtcagctattatccgctccaactttgtaaagaaccaagtccatgcatcatcgttctcgctatccaccacagcaaatgcgagtggatacacttgaaagtttgcatcttgaccacttgctgtgagtaaaacccccttgtattttcctttcaaatgtgttccatccacaaccaaaacccttctcagatgcttaaaaccttgtattgaagccccaaaagctaaaaacatatataaaaacctctctttcctttcatcttcaatatcaggttctgtttctatatgtgttatcgtccctggatttgttaacttcagaagatgcaaatattcagccaaattgctataagactcttcatcactcccgccaacatctgttaaagctgattccctagctctccaacactttttgtatgacgcagaaaccctcaaatcttctagtacaagttgctgaagatccattggaacaggaccagcagaagcttcactgtattttgccttaaatacagatgcaatcacttttgacgttgccttaaatactgccttctagtatcaaccgaacatgtgtgttgaagctgcgctttcttaatttcatagtaacctgtgccattcattacagtggccaatattctccaatcacatttctcatctgagcaactgagaacaaaataattccattttgttcttgtttgcttgaaatgaaactgattctttatcgcaaatatagccaatcctatttggcaatcttctttgctcgcatacacttttccctggtatatacctttaccatcatcatcaatgtccaaatcaggtaagttatcaacttcatactcgatgtcctcaaacaaaggtgggatgtcaaactcctcgtcatccacttcctccaactttttgacctcattactcgtttcctgagagcttccaactccaccgagcatctttcctttcataacttgtggagtcttttttgtatgctctgtctttatactttcgccagccccattcacataactccgctgccagtacagaaaaccacttcatccggattggagcccacaaccttattgttagacccgtaccttacatctaaacctcctgttgccatcaactcattagcattggagccaccataatcatctgttaagaaatttgaccaaaactccttatcataaccgccacagggcatactatcttcaggtttttccgtgactgcttcaacttcctctgtatcgttatcaacgaaaaacaacttttcaacatcattgttaaaacattcgttatcagtatcattccgtgacgatttatgcccactgttacttcctatgtttgcttctgcttgttccaattcctccatgaattcgtcatcacgaggggtcaacacaattgtaggagtttttgaacccacagacgatatatcgcgaacagatgtgacaccacttttaggcgtttttgaaccacactcttcctccaaactgctttgacgcggtcgtttagtgctactatctcctcgtgtatcaaaactttgtaaatcttcctccatttcttcaaacttcacaaacaaattaagatctctgttttctctaagtgcacttagatagtacagaaggccaacctcgcttgtaaccaaaactggaggagtcttctcctttgttgtgaacatatccttatccggtgcagcataactcaacaaaggatttacaccaatcattccgaactctttcgaaatcgctgacttaaacgctcccagtgtcattccctcagaaattggaacaaccctagaaaacagtttgttacagatctccagtttccactctccattcgacgaacaaacccaatctccacaaattaccatacaaaactcatccatcaatccctaaccaaaacaaaacagagcattcacgttaattacctaatagcgtaattgagtatcgtaaacgtgttacgatatttaaggatattttttcattgtaccttcgtcgacatcgaaataatgactgcattacaaccgtctgtaatcgtcaaataactcctttctttgtgtgaagatctcaaccgtctctttatgcactgagtggatacattttttttagataccgctacaaacctaagcaagataactggttaactaattgattgatcatattggacactcaacaatacacaagtatgaaacactcatcaattttacattttttttggatttattggacattatattgtggacataatattgtggatatatagaacacaatcagtataatggaaagttaaaaatcagcaaacaaaaaataaatcaaacaaaaacacataaaacattgtgggaaaaattttaaataatcaaataaaatcttcaattcattttttgcatgtatacactcaagtagagctgaacattttgggagaagcatcaatatgatagaagaccaaattattaggaatcctcttttctctacaacaaaaacagatacatcactaaccaatataaatcatggttttcttttttatattttttgggtttgtctaaaaaagtccaaaaaggaactaaggtcaaaaacatgaaagatataatttacatccctttacatcaaacataatcaatataacagtttaaacattcgacgatactggacaattatcagtgaacaaatatgataaaatagttggacatacagaagtggacattaatattttgcagtttatcttttattggacttgatatgttggataaatggtcaaagaaacatggataatatactttggattggcgtttattgttcatgtataaatttatgtattagtatgaaactatcatgtgagtcattagatgatcatatggactggactgcttggacaatcattaatggacaagtatgtctttgatttgctgcgaatgtgtttatagctcgataaaattgcatcaacatgtctatatacatttggataaatggtcaaagaaacatggataatgtactttggattggcgtttattgttcatgtataaacttatgtattagtatgaaactaccatatgacttattagatgaccatatgtactggactgcttggacaatcattaatggacaagtatgtctttgatttgctgtgaatgtgtttatagctcgataaaattatctcaacatgtctatacacatgtggataaatggtcaaatagacatggataatgtacttaggattgacgtttattgtttatgtataaacttatgtattagtatgaaactaccatgtgagtcattagatgaccatatggactagactgcttggacaatcattaatggacaagtatgtctttgttttgctgcgaatgtgtttatagatcgataaaattagcacttttttgtttgctcatctaacattatcattggagcccaacttgatacaacctctctagcttctcttcttcctctcttacaataaacagaataatcatcaccttctctttcaacctctttacactcctccctcgacgtcacagctacatcaaccgatgaagaaatcggagctacaaatccatcaacaccaatcggtatatcaagccttgtaggtcgtttccttttttaaaacttcttccggaagagacgatgcagaaacagagtcagatccaaacgataacccgaatctagatggaggtttctcgaaacaaagacgaaacggcgatttcggagaagaaacggtggttgatggagaggaaggagaagatgttggaggtttgcaatgagaaagagattggccggaagaattatcagccatcgacattgatattgtgagataatcggacggcctgtaattgtgaaggtaactccctttctcatctgcaaatctcatctgtcgttttattatataccaattcaaacaaaatcatgttaaccggttaagtaattgatggtttagtttaaaaaggatataattgtcattttatcctccaaaaacaaggaaaagtgcctcatccctgaaaagtgcctcaaaagtaataaaattctttgaaagtgcctaaacgtgtcacattccctacatttaatgacctttccaataattgtttttaaacctataagtcgaaattattgaaagactctacaatacaaattacaaaaatctatgtctataatacacattagaaaattatattgaagcaaaaaaaaatagattcttttatatgagtgacatattgaaatgatttaagatttatcttctccaagtttatattttcttaaattgttttaaaaatttatttaaacaaaaaaaataacagtgtaaggttcataatctaaaattaaaatttagaatttagcttttacaataatatttttcaaactcataacaacaacaaagaaaaaaacttaaaacaaaacaaaacaatatttgagatacagtggaaggggattaggaaatgagagaatgaaaataaattgtgggagttaatttttaatttattgtgtgttgaataaaatggtgtggagaaatataattaatttatatatatttatgatttcagttttgtaaataaattgtgggagttaatttttaatttattgtgtgttgaataaaatggtgtggagaaatataattaatttatatatatatttatgatttcagttttgtaaataaattgtgggagttaatttttaatttattgtgtgttgaataaagtagagtggaagaatataattgatacatatttttatgatttcagttttatattaaactgtgtgttaaatatgttatttattatttattaagaattaaaaaaaaaacttatattgccaagtggaccaataaggaaagagtgaaaccttacttttatatatacatgattcctaattttttggtttcatttttaaaggttacctaaagtatagctattattgttgccattacatcacatataaataataacaattgttatataatcttaaattaattatatataaaaattatggtttcaatttatcaaaggttataacatttaacttagagacatatttttccatcatttttttccatcatttgaagttaaaaataaataactctatatttatgcgataataattggtaaacatcaaaattgaaaatttaaattatttttgagccctatattaacaatttttaataaattatatatagaaattaacgtctttcaatacatttaacaaattttatatgacttattttttttaactgacatctgagatctttagtcaagttggagggtttttcattgaaagttatcttaaatcataagctttaaatttttaaatgtgaagaaggttcatctattgttttgactttcaaaacaattggtaatacatgcatttgcattttcacaaaaaaaaaaactgaataatttatgtttattttttaatatatagtaaaacatactgttttcacaaaaaaaaaaaaaaaaaaaaaattgaatgcaaacttttaattaactaaaatgtctttgtaaaaaacatcataatttgtaaacataaaagttactattattaattattttgatcgatatattaacaattataaataaattttatatataatttaatataaatattattctatatttaaaactaaaaccgaatataaaatccacgcatcgcgtggacaacttctagttttatataagttaagtatttgtacgttagaatcaaagaaaatgtgacaaatgggcctaattgataaattaacaattaaacccaataaaggccattaaacttcaaatccagatcatattagtgttatcatcataacttctagttgacgactggcgtctttagagttttgaacaattccatcgcaaataagtctccttgacgaatcttcttgtttggtttcatcggcttccttccttttctttgaatccctgtgtacgcttgttacatccttgatcatgattagcttttggttgatttttctttggctcttcgttgtgttggtgctactcttcgttgtgtccttactttacaaaactttctctagaaaggaaaagaagctgacgtttttgtcgctccctgatgaaatcgtcttgaactgtttagcccgcatatcgagatcgtactatccgaaactctccctagtctgcaagaccttccgcactctcctcatatctaacgagctcaccgtggcgcgagtgcaacttaaaacctacgaaagtttttttcatgtctgcttaaagtttcctgataaacctaatccatcaatgttcaccctctggataaaacctggtcaaatcttaaccaaccaacttgagaagaacgagaggtctacaggagctactcggttggtacaaataccttcttcatattgttctattgtaccacattacctaatttctgttggttccgaagtatacggactcagccaacacaatgatccgtcctccaacatgtttgtccgtaacaaggaggatttgttttggtgtaatgccccaaacatgactgtagctcgagcgaaagccatcgggcacgcctacaatgggaaactatatgtcatgggaggttgcagggatgatgaatccgtgaattggggtgaggtttttgacccaaagactcaaacttgggaagctttacctgaccctggctctgagctccgtttttcttcaattagaaaaatagatgtgttccaagaaaagctttacgttagcagcaacgagaagatagactctgtttatgatccaaaagaaggtaaatggaatgttgcagaaaaatcacctgtgcaatgtatggtaaataatgtatggtgttattgtgataaacagagctgctgatggtatgacaaaaatagtaaaaaatggagagtggtaaaaggtttagatatgttgaacaagaatcttggttgtggaatgattgaaatagctaactatggtggaaaactcttaatcttatgggacaaggttggtctttctcaagacaaagatatttggtgtgcggtgattgcgcttgaaaaacgtgatggtgttgatgaagtttgggggaaaattgagtgggctagtatcgtgcttacggttccaagctcatacgttttcttgtatagtctactaaataggatttgattaaatctaatcatgtttttgtttttaccattgctaaaggattttttttcctctctttattgtttagtgtatctacgagaaatacatcaaactacaaaatgttggtttagacggacgtgtaagtctattggtaaattgatttgtacgtcaagtgaatcaccaagtcaaatgttgcatagctttagagtttcggtttagatggagttaaaagattatattggaaagagactccatgttcaatgttctgacaagacagacccaaaagtccgaatgtgtagtttttaaacttgcaatacttggaaaagttatcataaaaaattctaaagcatatttattacttagaaagatttcgtaccagtatacaagcagttgcagttgcaaagataaagaacttaaacagatctacgtgtacaactttctatggagaccaaacagctttatacatgtctaataaatgagaatatatctctgcaactgcaactgcttgccgtttgatgcctctgtctctttttggtcagataagattcaaaagtgaagaggattagtgtttctgcaacatgtttgctactctgtttcagctctgtaatgtgatcctcagtcaaacactaatattttttgttgcctagcccaattttattgccccctggttaaaatctacagagaaattaaccagagaaactaaatttgaacaacatatgtgctatcatttactttggacattatactctttcaatttggttcgattcatttttttttagtttcggattctttgttttatatggtataaattataaccaaacgcttggtacaatatgtatggtactatatatagtttgattaagctcggattcagacttgtcgataatttgttttgataaaatttgttgtatcaaaaatatcaaaccccttaaaatatgtattttagttaattagttattctatgatttatattatcatggaagcctcattggtccattagttgactaaaagttcattaatgcttctataccaagaggtctgaggttcaagacccagataatgcgatttatcagcatatttggagattaatggaaacaagtgtgcaaaaaatctccaacgatgtacaattattgccattcgcgaggattctccgcagagactttcattataggtgtgcatcaagagcataaagaagagaaggaggtgttgtcttcgtggatctaataagggtcagaaggaattgcacgtgatagaatcgtttatgtaacagttctcataatttacaaaaaaaaataaatctagacggcaaaaaaatattatattatcagaatacaaattttcttttatgttatatcgtaacaatggaacatcatggttagtgagagaactaatacaggtaaatcgattatcttatcccaagcttgcatcccctcttgaagcggtatttatggcctatgggcagtagaatgcttgagtaacttcaggaaaaagttggttttgaactatcttctcaacaagtggtggaggtgattgaattctcttggcgtttccccttatttttatatttttttgtgcaaaaatgatgctcttacattcaaatcatgtagagtacttaaaacacaatttgaatagtttcattatgttacttcaaatcgaagatttatatactatcaggaatcttcaatcttctgtaacaaactctagagagagagagtgaaagaagaagaagatgacagaaaccaaaacaatcgtttattctcattaatttggtaaaatgtacaatgtacagtattatactcgttatatatacaaaccttgaatgttagtttatgtatacaaaccatgaatattagtttcgtgttcttgagtgcccctataatcgtgtttagctaaacatattgttcattacagaaaagtctcggattgcccctacattatatatatatatatatatatattatgcccctataatattgtctaccgaatcattgcaccaaatagaatatgacaaatgggcctatttgataaatttaagatgaagcctattaaaggcccaacaacttgaaatccagatcatattaaactattaccatcataattatgactttgcattataattattattatttgataatatatccacaattccaacacaagtctttgtacttttgactcgttagatatcatccaaccgaaatatatacaacctaagttcaaaagaaccacgcaagatgttgccatattgtccataatgtatccacttgtcgtttaacataaacaatttttaactatattggtttagaaatattttccaagagagattcttaacacgatcttacttgtatgttctttatctctcaccgccaccaccactttcctagatttattagctagtgacatttttaagtcacatgcaattgatgatgcattcgtcaaaatcgctaaataacaattcctaataatttatttttaagtaccacataatttgtttcccatcaaaccgtttgtaacctccaaaatcataatcattgcctattttctcgtaagatttgtgcaatttaaaaccagtatatccaccacctgcacacaactatagtttcacacgtatacttgatttcaggttcagtcccaaattcttactgctacaaaattgaaagttacttgcgaagtgtatacctaagaaaacatgtgtacttttcgttgattctttttctttaagccaaaatttttacttaaattaagatctcacgaatcttaaccaatatgaaagagcacacaattttattcaaacaacatcaaatcatttataacatcatacaaaaacatatgacctatcaaatatataaagcagaaacatcccaacaaagagtgtccacaatggcaaaagtaattaaaaatagaaaaatacgctattaaaagtactaactaatcctaactgttacagacggttcaaaatttataatattaaaagatataatagaattggatgcatcaggttattatttatattgaaaagatataaggttaatcaaatatatttttggttgaaaaataagaagattgacaaaataaaaatataagtttaatgtaatcacatattgtttatcaaaaatttacatttcttttttatttctatatattttgtttcttattcatatgttgtttttcaaaattgtttatttctattttttacttatatatatatatagatatatatatatatatatacattttcttcataaatatcttaatatatataatactatagttttaaaatattaattaatgtgatgtcaaaagtattaattagtgatacgactaatggcaattggtcacttataaaaatatggtagtataatcaaaattgtgagactaaaatgaattatttaatatattctaataagaaaacttatacatatcacgtttgatttttaaaaacatagaaagacatattgccataaatggtaacattgtcaatacttttcccatcacgttgaagttttatttcatgttcaaatattcatgggtaaaatgtatttttataataatttttctttttattatgtattatattttacacaaacggattttggatcataaataactgttttaaccataataattttacttgaaatgctttatcccgcatgaaatgcaggttattatctagttataattatgccctcatcatcatcaacattaaccaccaccacaacaacagtcgtcgccatgaccataaccataaccactacctatgaagttataaccactgacccacttttggtcatcataacttgcctgccatttgtgttagtttcttaatttacgcatatatagtgctatatatttaaacaatttatcaaatatgacttttttgcaaatgaccttttcctatttccttttataaaaataaaataaaaattaaaactaaatcttgaagatatcctttgtccaccaattcataatactttcgagtaagaacttcatggcgtttcttttgctaggagttcctccatataaagcctttgttaaaacaatcgtggagtccaagattctttgaacacatgtgaccaagatatccgctgtctctttggataaactcatcacctcacagatcttttctctccattcaattgtcggcggcatatccaagctgaaatcaagtaacttccacatgaacacaacattgactgcattcgtcttcttgatgcgctgcatcatgccctcctacgatgaaaagattcgacctcgaatcttgttttgatgcaggtagactttatcaaccatagcattgttctcttggtacctgtttgtgtacgtaaggagaaatgtttcttcacaaatagaaccaaacattcgcacatcccttttcatatatgcaaaaaccaaatcttcttcttcttgatttgcaggagagatcgtcttcacatcacttgtatattgctttctaatcagagcacacgagggctgcaagtggttccattgattgttccaaaatcccattgcattagttgttttccccctataggagaagattccaccgcgaatcttgatcaggatggtgttgaatacattaacgtgttcagagacatagctaaacgtgtttgcaaattcggcccaacaacacttttcttcccaacgtttactgtcacccaagaaacaaagccatatcttcttgaacattccgtgtgtgatcttcggtagagtatgtgatgatgagttaatatccaagctgagagcatgtaacttcaacatcaatgcaagaacaagcgcatttgtagtctccttacccaccaagaaacgaacatttgtagagaaacaagccactacgaagcttaactttccacaagtcaacagttttcttgattcgcaagcaacttcactccaacaaataaaagacgcccgagactctcttgaaatcgatgtagtcgggaagactaacaccatccaaaaaacatgatgaagcagcacaaaaatcacatgaaccattgatgactccatgttgacgagaacctggtggtgatgcaaaatatggacttttgacaagccaccaatcataactacaccgccaaaagaacccacaacaaccaaaaggtgatatttttcaccatcagtgtgctcctcatatagttccccagagttgttgttaccgcaatataacaaactatccttccatctacgacaagtcatgactcgaattgagaaccccatagaagacctcaaaacatgcatgagaaaaccacctatgactttggatttgatcttgtaattccctctctctgcacatatatatattcaggaatagagagatcacctagtggccgctgacggcttagtatcaacaagtcttcttgtgaggaactatcccaccaatactggctcattctgctccgaagtgatgcgatcaacgctgccacttgactgcaccattccatctcttcttgacattggtgattgatcgaggatgatgtctcttgtactaaatcatggcaacgcttagtatcaaatacgttactccggccactttttggctcgtggcgcacatcaaacaacaacagaaatattcctcttctttcaaaagttgctgtaattatggctccatacacattgagaagaaaactcatagcattggtgaccgcagacgacacatcgttaatctcatgtgttaatagcctcaccattagaatattttcaacacataaagccaccattgtaagcaaagctcccatgctagaaaaaatatcagtgtgatatatgacatttacgtcttcaccgtaaacatcagaaacgtcacttttacaacacaatgaaattgtaattggatcttctcttccaaaagcccaattcataaactccatctgtgagctgcacacatatactccctcatctgttttattagttttgtagctcacatgtgaatcttgtctagttaacccacaatgacgagaaaatatgaaaggttttgcacactcaacttcagttatctctctgtaagaatcaacatagcaaggattttcctctttatagctattagaaattaaagtaccatagatcttgttacagagatctaactcaccgtgaaaaaacaaaatctcgcttcgaccacgatctggaggttcatcattgatattgtaatgaccgtttgcaagaaaaaattgaataaatgtggtttccattatccagatatgaaacttctacctccttgtcatgattagtgatgactacttcatattgaattgacgaaagtcttctgtattccaccacttgatttccgataaaatccgtgttgtagacgtcttcttcacaaccatcatcaaccggagaaaagacattagagaagacatctaagggattaacattatcaactagatcatcgacttttgtaacatcaaagctagcgccttcgtcttgacttggatcatcatgtgaatcacaatcttcaacaacagctacaaaaacatttacatcgtcgattttatttgccacggctttgtcgttatcgtcaacgtcttgtgtgttgaaataatcatcgatgttctccgcgttggaaacaacatcatcaaatccatcatttttgacatcattaaatccatcatctttgacgccaatttttggatccccatcataggtgcgttttgtagacgatacatcatcgccaacaacatcatagataggtttattgacgaagtctttgacttgaaagccaccacaattctccgtgtaatcatccaccaagcgcccttttagtctcgaatttcgtaaacaattatacatcgtatgatcgtaattacgaggtaaaaaggttgcacacaatttctgcttaagtttagtccatgatttaattggactcttgtcagcttgcttgcgtgatttcttcacttgatgccaccatgatgatgcgtgtcctcgaaatttattcgtcacaagcgaaactataatagatcatcaggaactcttattaactccaaaatttcttcaacatccacgagccaatcaaggaaagaatcgacacgaatttcaccatggaacttaggaatatccaacttaaaactagaatcccatctcatgtctttcaaagacatcttgcttgacaggaaatcaaaccaccaggaacgagatgaatctgataccaactgatagagagcggaagctaaatagcagacgagaacacaagatctctaggagaactcggattcacgaacggatcttgcttacaacgtcgaaacttaacgaagaagcaataaaggataaggtcgagatcggttccaagagatcgatttcgacaaggttttgcaagtcctccttgcagggcttgaacacaagctcttagggttgagagtcctcctatctaggctttagacaaagctctcttaaaacttgtttattcaataatcaaaagctaattacaattatgaatcacatctttttaaataagagaagagaatgaaaaccctagcttaaagaataagcaaactaatacaatcatttaaagcccaaatcaacattaagcccatgagaagcacaaaccaaacaactaactagctcaaatgtacgatcgtcttggagatgcgctgcatcaacaagcttaccttgccaacttctgatagagaatcaatcaagtaagtttgtgtcaatcttcatgactctctccactctccatgtttggatatcacgagactataatgatcaaagttaagaaaaattagtttttttctaaaaactgatgtgttctaaaatcagaatcttttagctgctccgtgatgatgtagttgcactccattataaatacaaaagtggcaatgttctaatgctagcttgatatgcacgtagagcttagatatggcaattacgacgatgagggaggcaaatcacatttaagaatatagtttgtgtgcaattacgacgatggacgaaagaaagctttaatagtggaagttcatatatatagaaaatgtgaaagatatgttaaattagtgtatcagtagtatcattagtggagcaagtggatgcgaccgaattagaggtaagtgcacttacactcttctggatagttattgtggtcactatgagaactgatttcaaacaacagtagcccattaaccaaatcattgacaattaaccaaaagaaaaagtttgaaaaaatatctaattcatttatttctcttttttgctctcgtctcaggtttggaagacgactctcgtgaatacttcaggagatcaatttgaagaaatatctttttgttatctctggagattatgtcttgtgttgtgtacaattctttataactaatatgtttttaaatttgctactttaaaaactggtaattcgtagtattcttatgtaatcagattacctttaaagttaacatgtgatgttaactaatatgtttttaaatttgctactttatgttgcctgtgcattctcaaaggaatatttggccgtacatactaagcttcttcttcttctgtacagcctctgaagaaaggtggctggaaaaaggttcaaataagagctgtcagcctttcttatgggcaatcaattttcagagtagaggaaagtgaagtacgatgaacggtattgacattattccaaaagaaagcaaagcataccacatattcgttgtaaagaatcttcatcacaattctgtctggcaattctgcgctggacaaaagcaaataagtaacaaactctgtaatctggcaattctgtttagtgtctttatcaacaaagctaggatactaaccattttgcaagctgaactcgtgctgtcactacaatcataaaatatttatcaattaatcactactgatgtatatataaaattcgtttattgatcctatagggttgttgaattgatggagattatatgagctagacaggcaagagatgatgagattgattcatgaaaaacaatatgcgcatgaggggagaagaatatatgttaaaaagatattagataatattgggagttcgagactagaactttctatgataaatgcacaataagatattaagatcaatagccaaagagactacatctggtattagtggctccattaccgctcatggaagggactcgcttgatgagaagtcatgaattttctttcttaaattgtaagattgatggaaccaggaaggtgtggcttgggaaaacccttgagagcctatgcagttgtgtttttctctcaaatttacatgtttcgagtcatctctcccgacggatggaatgactggggaaatctaaccgagacaagtaaatatagtaactttcatttcaagtcatatactacataatctgaattatgctaaaatgagttttgttttcatttagactattgatgtatatagtgtaatactacgacgtccttaacgtctagatttttgaaagaaaataataacatatatttatatataatgtacgaaatttttacaattcatcttgaatcatcttctcaactaataactttctcctacatatcaagtatgcgaaaataacaacaaatgtgtgttggctgttgacgcttgcaaatacatatattgagaattataaattaaaacaaaagaatccatcatcaattatcattgatctttatttttggggggcaaattatcattgatctatgttctcattcttctagtcaggaacacaaatcttattgaatatatatttggatacgtatgcatttagattctctagcaaaccatcatcatttcctgaaaaatgtaaatatgcatgaaaaattgacaagtttgaataaaaatttcttacattggtgaagaccaaagagagaaaaaattatgagaaccataaccaaactcttgcacaccatcatccttggctcttcccaacccttttcatttttcttatgacttgtgtgcgtttccattttcgcttagtcattgagagtttatataggagagaatccatcacagaaatgttagacaaaatcactaagatgttaatttggtagatatatttcttttatttagtcactttattagtttattgtatatttttccttttcttggcaaccatgtctctatatctctcataattaaaatttctaaaagctaaataatcttttactaaaaatagatatatatgcgttttgagcgggagattcatcttggcccatcagccataactatagtgacatcgtggataatgtagaccctgccccataataagcaaggaagaatgcataggtctaatttatcctaaagtaacttttaagcaaatgttaagcattatgatgaaaacgacgtccaaatcctaaagtaacatcaaggagtttttgactaacaatgtccaattcaatgttgattttcgctaatgatgacagtatcaactatccatcgatctcaaaagtccaaataattattcaattaacgttagatttttaacataattacatatctattttatatatgtgattaaaatgcactaaaaaaactacatagaaaaaggcttgtaacgtcctctatttttttcattaaaaaaaaacatcattctttatttttttctagttaacaacgcttcaaaccggtgacgttatgatttcttgttaagatgccttgaatttactgcgtattcctgcttgtagtgaaaaaggtggtttttatatcaaaccattttgatttggttttctacgatcaattttgggtataattttgaatacacagtttacactccaacttccacaattcttgactcttcaataaatctttcatttttttacactcttacattaatctcttagccatcattcaattcttttttggatcattatatatttattaacaaaaaatgatccttagcttataagatacatcattattcatgggagaatcgttttggtatacgtgatatcaatcaaataatcttaatcaaccaaacacatttctataactacaatcaccatgtttatagaattatagattattaaaattcaaattggtgaataaaccttatctatttaaaaaacttgcattaacaaatataattttgtattgcgtttttataatttatgatagtttctcaaaaaagatcagttttttatttttttgaaaataattactcaccaacgtaaaaacaaaatgtgtactattttgtttcttagataataaaaatagataccaaaataagatgagtaatgttaaaagcatcatatgcaaaaagctatgcaagacaccaacttacgaggacgtttaagagtctcaaaattctttaatgcctacactacaaaccatgtaatgttgaaaatactcaaataaaaaggtttcatatgaagttaaaaagtaaaaacttaaaattaaggaaatctttttctttatgagagctaaaaatatcaaatgaatttggtataaggtctttgtcaaagaaataatagtttgtaatgtagtgatcatagcataactaagtttcgaatgagagagtaagagtagctatactagagcctttgcctttttcttcacaacattagaatttgaagaaaccttaacttattgactaagtagtgaggaaagagtagttatcactaatgcctaattaggcaaatggatggaggttgattgcaattgtaagtagccctattaacttttttccttcttgtccctttaagatgaaaactccctgattcaagcaagtacaagcaatttttaagcaaatctacttaacatttttgaagtacaaaataaggatttttcgggccgtttttttttttggttttacccggttttttacccggttttttggcccatttgctgaaactctttaatatttagcccacatcctattattttaaatgttaatcaaatcttaccaaaattaatcactttaaatacgaattgaatacaattaattatttccgttcagcaaagtaaatccgacttatatggaatcgaatatgtaacattgcaaaacaaatccgactcatatggtaatttagtatttatccgttcagcaaagtaattacttgagtaaatattctattaactacaaaatcttcaacacataattttcggagatcttgagaactaaattaaaacatattccttaaacatcctctattcaattcctataacttttgaaaaatatacttttcaaagaattctaacaatcattatgaaacaacctaacgagatactttttccataacaactaatcattcaattcattttctaattctagccaataagaaaatagaaaaaaatattgcttgcacacaaagatattttttattcgaaatcaaaactaaccctaattgtcaatgactactatatatactctctcattagcaagccaaatatcacatcttcattgtttttttcattacctgcacctatatataacatctctcatcttcatcttcatcgttttgtttttgttttctgttataagaattttcatattttatgtttttagttagaaaatatactaaacatttaatctgttttgcagctaatcttacaaacatatcaacaaatacactctcaaatctggtgagttattgaaatggtccatagtcttttattatcttcataaatatgattctaaattcttttattatttactaactaaatatgttctatatctttatagttaaagattactttttcaatttcaatcttcatctctatggtatggatgtatctcttcaaactttgatagctcaatctgcatcaaaactcctagataattcatttgagcagtgttcaaatgtacaaaattttattttttatgatgatataagagttgtatttcttatacaatttctgctcatcttttctttgttaataactacaaaatattaaatatataggaataaattttgcaatatattgaaaaatatagccttgaatatcaaatcctactaataaggaaagttaaaatttattcctttaacaacttatatactcgcttacatcttctctaataaggcaaattacgaaatattctctaaacatttaatacacgatagctaaacgttatctattcctattaaaaaaaaaaaaatctaacaagagaaagttgcaatttcggtaagattgagtactatattatgtataactaatattgtaaacaatctaaccttatttgtatttttaaatctcatagaatatgcttcatataaaccctaacataaagacctaaccataaacactataaatataaccttcactattttaccgtaagtcataaccaaaaactaactatatttatttgcctacacaattacattagattttatgtttaatgactaggaaaactttgcttgctaaccggatatggttgctctaaaatattcattgatcctaatttcagatgtttggataaaaagaactacatgtaagtcactctctttacttaattttcctaaatgtataaaaaaaattaaggtttacttaatgattttttttgttgttttataggaatgcatttaaaggtgatgatgatgacgactatgagctttatgaggagattgttgaaacaaacttccaaatgttttttagtatcaaaaaatagcaaacattcatgtttgattgtcctttcgtttttttttttgttttgtacttatgacttatcaacatcgtacattttgttatatttctactaatcaaactatcaagttattaaaacaagttataagattttatgttggtggtttattaatttattattactcaattacgagacatacattctaacaatatattttacagttctaatacttactactataattatatttgtactttatgacaattaagtataagtattgatcccaactaaccttataaatagcgatttatccttcacgtgctcttcaatcatagtaatcaacttccatctaccaaataattattttggaaataaattatgaaggatgacattataacaatgatatagtaaaaggaataaaatattacaaaactctaatttaggtaaatataatcattaagatcttttcaaataaacataaatcaaaacagaagattttggtaatattaaatataggcctcgattacattagaaaacttaactaagcagtgattatagggattctgtaaagaaaataacacgcatgttactttttctttttggttttgtcattactctcaaccatttatctttcgacacatattcacctcttaactctaaaataacatcttagctaagattcactgcttaacattttaatctgttttgatttaatttttaaatcttataacataagatattatgctaagatataccgttggagaggctcttagaaactagaggtaaatgttttgtttcaaaagtatatatgaataaatcatataaaaaactgaatagaatatacacacataggacaactctagcatgacggcggatttattaaaacactataactattaacttatttcaaatattatagggtgatcatattttagaactaattaacttacaaattatatccatatttattatatgaactacaaaatttaaacctattaacaccttcttactttcaaaacaattaatttaaattggtacattttcaaataaatatttaatttgtatttacatcaaacaaacaactgagtgtactaatttatagtatcgttacattgcataattaaaataaatgagtgtactaatttataaactcgatcgcttaataaaatgtcatatataatatacacacaacaaaagatatagttttcatataagaaaatgaaatatcaacaataatttgaaatcatatgcttacagagatagacacattgtatagaataatttttataaatccgtagaataaccaatattatcgttaccttaaatacgtgtcatttaattctacatacaacggaacatataatttgccagtaataaaaaatacaacaatcatactatacatatactacattgtcaaaacccaaaaaaccaaaactataaacaaacaaaaatcctgcggtgtaccgcgggtcatatcctagtgttaagcattttttgagcaaatgttaagcatttttctgccttttaagataagttatgaacatttacaccatgtggagtggcataagtcgtgttttaccataaattcaattgacataatttttttttttttaagttttgtatagtttggtaataacatatgtttttaaatgagattttctcaaacaatgtttattgaaaagtaaatacttaaaaaaacataatgtgtgcttttatttaaatattttattagaatataacaaaaagaaaaaattaagatgagtgttaaaaacatcttgatcactgtacaagataccaactctaataataaatacatgtaaaagtcatcaattgaacgaacgagattcgttttcgtgagttgcaagattaaaggaagcatgtaaaccttatgcaagtgttgtcttctccaagacatatatgtctagagttatttctctttatgggtagaatgacttgggagatcacaagacacaaaggttagtcaacataaatcagaaataacaaatttgttagcattctcgtaattttaatctttgaaaccctaaagtaaaatcctgaaaatttgttatttctgaatattttacaggtataaatggcgtttgtgctgagattggtacctggagaatggaaaagagatgaaaacggatttttcgagcacgtctcgcatgtggatgggtttgaactaggaatctgactgcgtgagcaagatgggttttccaaagtggtgatggcggtaaaggaaaggttagcgctgggtccagaagacgaaatcgagttaacgtatcaattgtcgcagtggatcatgggccctgattggaaacgtgcaaacccaatcgatatattagacgacgaagacatgactctgttcatggcgataagggcggatctagatgaagtgcatctgcgagtaaagattatacgaggtggaaatgttcgaaacgttactagttaccagagtaacatggatctaagcggatctaatctaagagttgtatggggtaccgcactaacaagaatgctgctgcaaaacctttctggtgaaattgataacacaatctttagtacgttaactcaatgggtagaaaaaaaaatgttaactcaacgagcagaaaaaaacaccaactcatcaaagttggaaggggaacaattatataaacaatattaaatttaaaaactaacctcattaacatcacctttatcgttaacatcaccttcaggagggaggtcgtcttggacgaaattgtggttagcgacctaccaaacatttacaaaaattactctcttatagaagcgaaaataaactgataatcgataatcaccataatttctaacctctgcgctatcttcaacaacaacatgtggggggggggattaacaacaatcgttacatcaccttcatcgttaacatcaccttcaggagggaggtcgtcttggacggaattgtggttagcgacctaccaaacatttacaaaaaattgctctcttataaaagtgaaaatgataatcgttaagacaaattttagaccataatcaccataacttctaacctctgcgttatcttcaacaacaacatgggggagggggggggggattaacgacaatcgttacattgttaacaccctaccaaacacaattcccacattatttgttatcccacaaaaaccctcaaaaatgatattattgattttgcgcgtgatctaactgttaaaactaacaacaaaccggatactatgttagttaactacaatggacactatccttgcgtactagctcacctgtgtatcatggaccatcgcggcttgggagatgagatcttcattaattgggacattgttcccacgctataacgaaacaaaaaaaaattccagatagttaacacgaaaacatggttaacaataaaaactcaaaatttttaatgactcctaacctctgatttatcttcaggaccagaatatagagggggaacaacctcatctgtaacattgttagcgacctacaaaacaatttagcagaatgtttgttatacaccaaaaacccacacaaaaataaaacaccacctttttgaagataatgtcattgttaacatctaagtaaactaataactaaattctaagttaacttaaacaaatacaaccatctacacctcgcccacctgtagattatccaccacgttgccttcatatcgactatcttcatccattggaaattggaacaactttctcacgctataccgcaacaaaaaagaaaggggatcatgaagatattcaaccacccagcaaaaaacgtaactggttagaaaacaacatattacctccgcctctttgcaattgacaccacttgacaccttgttagtgtagaaagataaaatttcatccacacttgcctcgagattagaagttctttcacggcaatgagaccgagaattggggcggagagtattgaaagcaaattcatcattaccacaattgcaacccaaatcatcggaatttgaagcaccaacattactagccgggacaggctccttaggacgattaatcccacaatcaggatcctttgagtgttctccttcgataaaactgtttttggcaaaccaatcagtcagcgtggatatcattgttttcccctgagtttcaagtttggcatccaacatacgggaaatagcgtccacagaaacagctcctgaactcccgccttcctcatggatgggtctgtgatgtttggtcctaaccccaccaaggttcttagacggtttggctgctttcctatttcaactaacattagacttagcaccacggttttgttttttagataccaattgcatctgggatggaaaacatccaccaccaaacatgtcattattaaaaattaaaccctcattagccaacattagaagattatcaaccctctcatcctcctcatcatcagaccaagacaaatcttccgccggatccgacacataattaggacaaatgatgttagcaacatgaatctgcaaaaacacgacaaataataatattagactcgataagtagatatcataaaacaaaacttaatgattaactatctcgttaccgtcaataatgtggtaacggttaacaaaattaatatataagagcattatcgaacatttctcatctaactctttagcgttcccgagcttgaaagggacagactctcgaggggccacttcaacatcgtcttccgcaccttcagaatcagactcaatagtctcgtcaattagaggaccatcttgaatggatggagcagcctataagacaaccaattgcagagcatacaccaacccctgaacaacaaaacaagtacttgcttattgtttaatttccctctcttttatcgacttaatcatcatctcgaaagtgaaacggccccaggaataagcaagaaatgcatccacgtccacaaccattttggcgtgagccttaacaatcttaggataatgagaggttgggacaagaaaaccatcaacaatagctaagcaagcacatcggattctcataccaggatctgaaacaatcattctcttcaacattgtaataacccctatcgacggtgaaatcctcttcaaggccaaacaacttactgtaaaaaggaatcgtctttcctgcagtacctttttcttcttcatcgttaaactcagatacttatcacagggtaatctggtgatgatcttgaactctctcaaagaaaaacgaacaggtgtaccagcgaatagcatccaaatctcgctaggcttagccacctccaactatctttccaaaataaaaattccaaaactagcggaccaggcaggattgttaggaaactccaacaggcgagcgaaaagagatcgagaaagatattgtcgttcaccatcatcgagagcattgaagataccgcagagggttttcatcttctgatacacattaaccctctcgccgcgaggttcttcgccaaaagcaatcaaccggagagggaaaggaatcagaggcatcgtctacagaaaaaggaaaaaccctagtgagacacacgcaagagatgtagagggaaacaaaatcacagaggagggactaaaatcgattacccaaaaagtcgaatgaacaaaacccaaatctgaaagagaggttataatttcttaatcgattcatttcatctattttcggagaggaagaagaagatatgagaaatcgatttctcaattcgaaaccctagtattcataatttcccccaattttaaaacacagaactttgcgtgtttttaatttaaaacgttttaggtatattcgatgaatgttgttggattaattggtaattgatgcttcacatagaggaaagggttatgggttctaatctccaattttgcaaaaaaaataaaataacattaagacgacatatcaaaacatcgtttagagacacgtcatcatgcatgtgtacgatgactcagcaccgtaacggtgttgactaacatcggttagattgactctgatttttgcccattttataaagattaggtatgagattcaaattatattgaagtttaggtttgtacaataccttacaaaattgtttaggtacgaaaatacactctgaacaaaatataggtatgaaaatccccttttccctttatagctctcgccttttggtcataaattcgcaacagctattcacataactctaaatggagatgatagaatatcatataaaatatatatccttttttattataataaaaaaattaaaaatcaaatgattttgaaagtttgttcgataacgtttaattatagttaccagataagaaaaatattaccagataaaaatgatagtattgatgtatatatatttaattattattaaaggataccaaattaattatttgcaagttttaatatgggtttaaagagtatttttttctcccgaaccatttgaattgaagctacaatagacatttaaaagtgattatatatacgtatataattaaaagttattgtattttatataaatgatgtacatgcatgtacaacaacgatatgagccatgcaatctcaagctagacacgttttagattcgtccaaaaaggtaagtacgtaatgcatttcgaatacacggattttggattcgtttgctgttgtggtcttgtgggatatccgtactcacgagtgacgtactcaagcgtcgttaaccaaaaaaaaatggttcatcacaaacagagtctttcgtttagtgccttagtggtatgtagagtgtttgtagaagcatttggtttggtctatttcttcagtcgcaaaccatattggaaaaagactccatgttcaaaccaacgtcctaacttatttaaataactctctaaagaaagatgttttgtgcagtttttagatgtgacttacttggaaatgctcataaaatttgtctaaagcatagcattttttttaaaaaaattggttttttaaaagagttcgtacacaagttggaggtttttttaggcagaaaatcccaattgtgtctgttttctttttttctatctgaaatcattccattatatcgaagttagactgtgaaagtcatataagactacataaagtttttccaaagcatagcattttcttcaaaaaaagatttgctgtttacaaaggtttttttgggcagaaaaccctaaacaaagaatgaatatctatactatttagagagaatgacaagccatttaagccacttttaaatatcatgttacaacaaaaactcaaacaaaaaaaaagtaacggtaaaatagacaattttttgcatcatcaaagccgacctgagccgtgattaaaaccaacccgaataaagatgcgcggatcctgcaaaatgaaaatgggctattcactttttttggtaatctattaattctacgtaatgggcttcacggggcaaggcataagagattaccaaagtaaatatgggtgtttaatgctgaaattaaaaacaaagccgaaaaaagattcaatcacctaaaagatatttctataataaatcattcgaatagtagtaaataaagacaaatttttctataacaaacaaaaacaatttttttcgtatattctgattagtgaataaggataaaaaaaatatttaaatacgaaatcatttaatagaagataccaaacataacaaaatctataaattcgaatattaactactcaagcaaatatagtattgatgaaaataacaatacgaattcagttattatatttacaaaatataacaataactatatattaaaatcctaacgaatcgagcatatacttaatcctttatgatttgcaaatatattaaaaagatttgaagttaaccctaaaaatctttaatcggccttcttttcctataaatatgtaagtctactaacaaatctaatactcactaagttctcaaactctctctctaatcctttgctacttcgtttttcatttctaacaatggtttgacatctttgtataaccaaattttgctgacattactagattagatattagactagatctctccttttttttttcttgggcaaaagattaacactctccctattaattttatatatatttgtcatgtatgatgatgtatgtttttattgtcattcctccaaacaaacattcaagatgagtcaataagacaatttacctttgttgaagatacttctcagaaaaaaaaaaaaaagatacttctcagttctcaaaatcagttgctcatgccaacattcttcagcagatgtctctcttaacattgtgatggtttctgtatattaaaaaaaaaaacttgaaacagtgattatgtgatcttacaaaaatgaactatcaaatctttaggatacgtcttcaactttgaaaaaagaataagcaatattcatttctactccttatttactttttcttcaaccataagagagtgcattgatcaagagatttttttctattcataatcgtagcactaagacttaaaagttagacaagtttattatcagttttaatcataaagtccccattccaaaatcaattttaatggatagctagagaatgcaattggaaagagattttcaaaactttggatgtgaatcatcatcaatatcaaatagaggaggagcatatcgtcattctctcgaaaccaaattcgaaacagcaacacaaaattgtggcatatgtcaagaaatatttctctgataaaccttgaaacacttgcaaatagtaagattaactggtatacttaattatgtgattatgacttcattagttgatgatgataaccatatcaatctgtgaatcgaggagccatgattcagtgtaatttacagattatgaatcttgcataaactgaagattgatcaaactcgagacaaatattagttcaaatggttgaagtggttgaagtggttctgatactttgaagatggttggatgatcaaagtgaaaccaagtagccccgagaagttagaatctttgatgggtccaatggaatacaccaagttctgcgaggaggaagacgctgctcactaggagggtttctctctgtcttttatgttccaagttctatcagttctcatgcttattttctaaatttgcatacactctatgaccaacttcaaaaaataagagttcaagaagatgaaacagagatctaacaaacacataaagatttttttccatcatataacatatctttctaacttcttgttatcctcaaaatgcatctaatatcaccccaaaaagccagtccaataaaaaaggtgatcctaatcaaaaattactaataaaaatttggtaaccttaaagatataaccattactttaaaataaatagttggtcataagaaaagaaattggtcgtccaaatatttagaacaagtggaatgctttatacgtttatcctatcaaagtttagaaaattgaaacacaatgagctgcgattgtttacaagactttaaacatgcaatttacatgttgtctttaattaatactattgtttttaaaaggttacagaataaaagttttttacaaatgtaaattacatattgatttttttattatttttttgtttgtttgtacatattgagtttttaattgcaaccttataacacacagaaaaaaataattcagtttcaaatttatataattattagtagaattacataatttcttcattattaataaaattaactatatgtaatcaaaatattatttctaacacttgacaaacatatattataatatatagtactatccaaaattcaaatataaaatttcatccaatcaataaatgcacatccaaaaaaaatatactcaaattctacaatcataaatctaatatttcaaccgtttggtataacacttaacaacacatatatattataataaattcgtattaaaaatttgacaaaaccataatattagcaaataaaaaaaaattactcgataatacaattaaaatttcatggtacaatatctttcaaaaatccaaaattttatatttatttatcaaaacttaacacccgggcgaatcacgaattatcaatcatacttgagtaaaaaaaaaacgaatcatatatatgaaagaagactaactctctcccaccacttgacacatcagcacatgagagcttgccacctaaacttcataaaataagtaatacataattagtaattaattcaatataacaactaaaataggagaatataattaatgagaccttgaaccatcactctttctacatttttttaattcaatatatcctctttaattttgagatccacttaagtggttaaagtgatgataaaatccaaacatgttacacatattcctatcctaaaaattagacgattattatgaaagaaactaaatgaatatgcagatgaaatatatctaagcttttcgagatttatgctaagaaaacaagtaatttgaaagatatttgaggaactatccttataactaatacgtaagatataagattatgacaagaacttaactaaactttccaagaacatcaagttgaatatgcttagattgaatatgcagagacatgattaataaagacatgttatatttttagtgtaagaaatatattttctaaaatttcaccgtctcacaatctatacatataacttaagaagcaaggatatataaattcaaaaaaaaactgagaatctaaaacatcaataaaaacaactcaatcacattcgtttttcagatgaactaatatagttgggtttttcaaaaacaattacaaatcatatttatgtttcaaaacctatgcattcaattttactttatatgaacatacattatataaaacaatttgtaaatattaatacgtaaacctacgtgcgggtactcatctagtataagagatttctaatgtgccacctctataaatacgatttcgtcgcctctcaatttctattcccaactataatatcttctcgttgacgatttagggttttgaattctcagatctcaatttcagtactcctagacgaatcctctcgtttgatttctttctttgaatcctttgattgtgtgattctttgtctcttcttcttggtttgagaattcgattggttgtcacgtctagggtttttcttgcttagaaaaatccgacaaaacagtgattcggttttcttctcttgcccttttgtaagagaatgatttctacgatgtactcagaagaaacatcggaaagatcttcttttccctctaaacgacatctcgaagaccgaactgagaaccgtgaagaacatagcaaaagattgagaccaacaagtttccgtgatcagaaggtaaccatccctcaaggttggttagattgtcctcgctttggtcaacatattggattaatcattccttcgaaagttcctctcagtgaatcttacaacgattgtgttccttctggcaaaagatacaatttcaaacagtggttaactaagattggtcttgtgattgatctgactaatacaactcgttactatcatcctaacaccgagttaagacagaaccgtatcgagtatgttaagattcgttgcagtggtcgtgattctgtgccggataatgtgtctgtaaacacatttgttcacgaggttactcagttcgagaatcataacttgtcggagaagtatcttcttgtgcattgtactcacggacataatcgtacagggtttatgattgttcattaccttatgcggtctagaccgatgatgagtgttacacaagccttgaaaatattttcggatgctcgcccgccgggtatctataaacccgattacattgatgctctatacagattttatcatgaggttaaacctgggagtgttatatgtccaccaactcctgaatggaagaggtctgaagaagctaaattcgacgatgatgataatgctctgtcttaccgtgaggtacaaggaaacaatcaggaggagaatgtgcagttgtctaatgatgatgttttgggggatgaaataccctatgatcaagaggtgtcttaccagaattcaattaatcatatgctgaatatttctatgcagttccctggctcgcaccctctatcattaggtagagaggcattgcaactcttgaggcaacggtactattacgcgacatggaaggcagatggaacgcggtacatgatgctcttgactagagatggatgttatctggttaatagagagtataggtttagaagagtacaaatgcgtttcccttgtgagtacgagccaagtgattataaagtgcatcattacacattgcttgatggagagatggttgtagacacaattaaggaaggagaaacgcagcgccatgtgaggaggtacctcgtgtacgatttggtagcgatcaacgggcaatttgtggcagagaggccttttagtgaaagatggaatattcttgagagagagctgatcaaaccgcgtaatgacgagaagaaggttagggatcattggtatagatatgataaggagccttttggtgtacggatcaaagctttttgtttactctctgctgtggagaagaaggttttcaatgagttgattccactgctttcacatgaatcagacggactaatatttcaaggttgggacaatccttatgttttcggacccaacaaagatctactgaagtggaagtttgtggaaacacttgattttctgtttgatatggacaagtatggacgtcaaatgctcttcttgcaagaacgtgggaggatgaagcttatggaaggctttgccgttgagtttagaggtgatggttgggacaatgacctggctagttactgtggaaagattgtggagtgttcatgggataaggagaagaaagtatgggttagtttgcggattagagttgataaatcgaaaccgaatggtatcgggaccggtcgtagcgtgataaagtgcatagaagatgacttaacgaaagaggttttgctgaaggagatcaaagagattatccttctaccgatgtacgttgagcgcatcgaaaatgatacaaaagaagctgcacgtcgcaagcatggaaaccgtaaaggctaaggagtgatacagttatttggttttggtatctaacagtaatcaaaattctctttggtttaaactttaaagaaagttatttgaatttagagttcgatattttccgactatctactactgctaaatcgtttgcgtcttgtgggccagaacatcgtttacttgcgatcaagtcttcaagattcttaacgcggaagagatgagttgaagtttgtccggggctttttgcttgtattctttctctactgcagctgcagccagggaatgaagctctggggctgccgtagcgtctttgtcctctttgttcctgccttttgagagctgtgcaatggccgatgcacactgaaggaggaaagcggattttggcggttatctatcagttgcaaatagagaagatctatgaaaattgccgtagtagacgagaaagagactataccaagcagattccgagaagagctctagtgtttttgccgcctgttaaatctacggtcgctgcatagtattttcttgctgagataatgttttctactccaccgattgtatagagaacctgattttgaaacgaaagagcgtaaagaaaaacaaactactaaattcagagatttgatcaaatgcggtctgtttaaagaagtgacacttacctcagcatatgcgaggtggtacaatggaacagtaggctgagatagtatgagctcttcatagcagaaagctgcttgcttatacctgtaaccaagacacacaccttaaaactctgcaacagaatctggagggaagaaagaggattgaacaaggtttacatttgcaaggaaaggtaaagctctgcgagttctctccatgcatcatgatcagccatgaatctacacacaacgaaaaaaacgctgaagtgatctcatcttatagctctcctttatatgtgatttgtgataagtaaagtactcacagttcaagatatttgttaagaagctcaatggctatggaaggtttgcctagtgccttggatatagccactcttcgtttgtgtatcgcctatatgagacatttaagttttacttacaaaaccataaacttagaagcaaatgttgggtgtgaagacttacttggtcgagtggattatcctccaaaagactcgcatatgcttcctcagcctctccccataatcccttcgcttcaagaagcaatgcctcaagcctccctgagattcggaaattaggcttagacagggatcaatgtaaactacactcaaaagaatctccaattcaaaacaaccagaaaacctacgactagaccaacaatgaccaaatagaccaattcagatttttgatcggttctacttaatatttagtattgctgtgttgctgtagtttacaatttagtattgctgtatttacttaccaactcttttgctcccaggaaattttgtctgcaaagccttaatgcaactctacaaaaattcaaagggaagtcatcataagatatcaacatcgatttctcacaagttgaatgaagtgtgtgacacgaaaaaaaattgttcataaggaagaaatcgatgagataacttggcaaattggaatgtgtacttctcaatccttcattcttcggaaacatttatactacttaattcctatcacaatgcattgatgctatgtaataaaaagtatagataacgttaaacaatttggttccaaatgttacatccttcaagtcaactctaagttttgatcttgatataagataatacactataaacgttgcttcacacggtatgtatcagcggaaagcaaatataacgcacctgtgcgacaccgagacattgacagtccatagctgcaattgccacctgctcatttagtgtccattctagacaacaaagagtaacaagatccatttacatacattcataaacataagagcagaaaaatatcttaatttagtcttgattataattgcatactttacacaaaaatctatagctaaaatgaaccaaaacaaaaacatttcattgagacaagaaagtttacttttttttttttgtttaccgatattaattaagctcaaaagagccatccatgaggaatgttgtttacataggtgatatgatgcggtccggtacgaactttatccgcgacaagaaagtttactaatcattcaattttttctaaagatttttttgactaaagattaatacaaactatagcacaaaaaatgatcattactgaattgctttacagatccaattagaccagtcattatcctaatttaattcagacattgatcacttaaacaacttccttaagaacacatgtttaatttcaccggtcggatcaatgaatattaaaccagagatgaatcagggattcgaaattcgactaaccatctggaccaagagcagatcgtttcttctgatcattcaaaatcgaggaaccgtgttttaacactttctccgaccggcgaactttgagattacgaacgaggcaaagatactcccatgttccgcctccgccattatcgacttgaatctctagctggttcaattgcttctcctctgttttcgtcaccatctctctcgctcttgtgattttgcttgaacttacgagcattgtggatctgtttgattgaacgacgacgaagagaacatggagccggttcggtttatgactgtaccgatctggattgatcccaagaaccggtggaattataccaaggacattgaaaaatcaattttttttgtactaatattagctttaagttttaattttagttatggaatttaattagtactaaattttaacacacgatatactgcggatctatattttattttagtatcgggactaattgatttcttaaaatataattcacactttaatacttatttgttaatttaaattttttgtatgtttagatataatacttagtatggcttagtgagttaaatatgattgttttagtgtgtacaatctaaaggtagaaaattaagtaattacaccttaaaaatttggttatactattttatttaattttaaataatgacagtttgtaatcttcaaacgcaaagactggtatggcatacttgataccttaatactgtttaagaaatctgaactaacaggattgtttaatgaatctgaatttgaaggatctatactattagccgaaagatagattctttcttgacttgtaacaaataaaataacaatcaactcttcacaaaaagtcagaagaatggagaacataaattaaaagattaaataatatagagcaaatctaaacttactatccagtgctctagcatatactgatttattgtgttaacatcatcgttttttggagttagaatatctctcctctgaaagaattttggatcaatgattttgtggagtttagttggatttcattgacccttccataaatttttctactaatagcttttattggatatctgcttcttgaatcaacaattcttcaggtatatctattagcgtctcaccatcattaggctcattgacccttccatcaccaacatccaataaccaatcgaaaaattcttggatttctttagcttcatcaacacttaatttgttgtttaaaagtcgcatattcttagtcaatttcaacactttgcagtgatccaaaagatcatgaagcatttagagatgacataacaatttctgctctccctgcaccattaattactggtagcacttgtctgaaatcgcctccgaaaacaatgacttttccacccaataccttattgtctacgcgcttgagaatattcgaaaagcttttatctaatgcttcaaacaaaacttgctcatcattggaggttcatcatatataatgagagatgcttctttaatcagatcagctaaatctgattttggtttgatcttacaaactgaaaattcatctcgattcaaaggtattgaaaacctagaatgtgttgttctacccccttctaacaacaaaaaagcaatgccattggaggcaactttaagacagatatgtcctctagatcttactgcagcagctagcgttttccaaataaatgtttttcctgttcttctagacccataaatttaactattagaaatttcagatatttataatatttaaaatttcataaatttttttaattgaaactgttataagatttcactttaataaaggttacatatttataatatattgaaactttttaaagttttcattctatgaaataaagaaccggagtaaacggaacacttttagttttggacgttggaaaacttaagtttcttgttcattcgtattcagaatcattttggaatatttatagtatggctatgaaccattgtctaatttttttaagcgatgtgagtacatatattatttcttcattgattgaataatatatgttcgtttaaaaaaatttgaattacatcatatacaaaaaaatataaaattttattaactaaagaacaaaagaacatcattagccaaaacactcgcaggaatcaatgagctttaagttcaagattgattccaacatgtgatacaacattggcccattcctagagttatcactaaaggttcatacattctaagagaaataacaagattgtagtctgaatctaacatataaacgaaagggcattgtgtgtttgtttaattctcatgttctcatctcaaagcagactgataatgagaaagaagccttgtgtagacaatgaaaagagtctatttttttcttcactcaaattttttacctaagaaaaggttaaagtcccaagaattgcaatggcaacacttagggcattgacaggtttaacatgtttttgaaagatgatgattgaggaaacgatgaccgagatccacttcattttgtttccaacgctaaatgttagtggtgaaatctggtcgagggacatgtatgagacttgattatacaaatggtagaacacactttgtgccattacccacctgaattctaacatttagaatcaaataccttacaaggtttcaaatcaagttgtttgaaaaacttaatttttttgttttgaactaacatcaatagctcattataaaaattatcagtcaacgtttggtttgatttgggagacaacgttttgcgaaccagtagcccacaataaatggatgttgttaattaccgatcatattgaagttaagctccatgattgcagcaagagcacatcctctagtaatgggtaagagggagaggtaaacagatacatggaatgactcgcccaagaagaagcttgagacaaggactctgaaggctggctcactgcttttgatgacgtgtgtgaaggacactacaactttagacatagtcactatcgctgctacatgtccaatcgtatgcgccaaagccacctgaacaatcaaaaccatcatcacacagttgcatcagtactactacacacttgatctaaaattgtttccctttcaagatcaaacacacctaaagcaaggcaatatatgaagcaacaagactaataaaagttagatcctttaccaggaacagagttttctagaaatcaagattggttttaagagcttctacaactccagtgacccaagagacaagcgtcatcaaagagccagaaggaagagagagcgtcgaagttagacacatgtaaggaaaagcattcaaaaccttctttttctagatattgaacacaatgtgcaatgcccaccaagttgcgcaacagatcccaagcttaaccttctgtcccgattgttcgtcaggaacgttgataccgatttcaatcagacgaggccaatcagactcataagctcctactctaagaaatcactcctctacgctgctgccgccgcaaaagtgaaattcgacaaattctaagatgataaaagaggcttttgaggtaaatgattaggcttttggaagttttcgataatggaaaagggtgaaaattgaagctttggcagaattgatcgtcttatgcccgtgattgcgctaaaggaagacgaaaccggtttaattgaagaaatcatcggttgggaatttggtgtaagcgattgatctcgaagtggttttgattgaagatttgataagaaaagaaaaagagccttttgtttcttggaaaaatggaagagacaaaggaacaaagaaaaggagagaaggaggtgaggacacataggagagaaagtatgggaaaaggttttcagattatgtttaattacgtaaatacccttggattgtgtctattcgtgagctctatgagatgggtcttttaagtatttacggcttgttggccgtagagactgtccatgagctaagctaagcatccgtgtttttgataagagagattgaaactaaaatacgagttaatgattggttaagcaaaagcaagcaagttcgaacttgtctatactatactacaaaaaccattgatctacgtaggaaaggaaatctaattcgatcacagaatgatggatatataaatcttcataaaaataaaattttgtttgtattataagatgccattttaaggtccatcacataaatgaaataggaatccatttctgatatcatatctctatacgaatacaataaattgcagagcgcagtcctaaatccaaaagtgatgcgatgattcatctattgcaactattaattccaaatcctaagaaaaaacaagatgagaatttataacaaacagccaccaatctgcatagaagaaatggattctcttatcctttgacagttttctctagtttttttcatcatcatataaaaattctataggcaattagcaaaacatctcacgagtcaactcaaagtcagaaagtcgattaaaacgatttagaatttaaaaaattctttctaatgcccttttcatgatgccccttttcaactctacctttttgttttatccattttcatttctaccctctttaaatttttaatgaccattttacccttatttggaaattgttttaggttaacaaaatgaaatattaatatttttcgcctaaaatattccaaaataaattttccgccaaaaaaatcccgccaaaaaatttcgaaaaaaaacattcccgccaaaattttgttttcaaaaatatttttcctgccaacttttttttttgggcgggaaatagatttacaagggattttaaagggtttttataagatttacaagggattttaaaagggtgatttacaagggattttaaaaggtttttaaaagatttacaagggattttaaaagggttttaaaagatttacagggaattttaaagggatttaaaagatttacaaaggtcttttaaagatttttaaagggtttaaaatttgtttaaaatgattttaaaatatttacaagagattttaaaagggatttacaatatttacaagggattttaaaaggctttaaaagatttaaaaagaatttttaaagatttttaaagggtttaaaagtgttttgaaaaatttataagggattttaaaaccttttaaaattactttgaaattttttttaaacccttttaaaattccttgtaaatcttttaaaacctttttaaaatctcttataaatttggaaaatttactagagtaacccatattttatacataatgacccaaaaggaatgctaaaaatatgagttatttgagtaataattatacctaaattatccttgttttcctttgcagagaaaaaaaatattacagaaatgccattactatttaattccagcaaggcaataaaaccacatttatttacgaaaatgccatcgtcgtttttggtaaatctgtggctcttgttgcgacggatttgttatcgatcaaagttttgttggtcaaccacagattttttacaacagacttgttttgtaccacagactttcctgtgttatgttacgccagattttttttttttcgcagattttttaaccgtgactaatttgtttcatatagtctccacagattttatttaaatttcaaaagtaagaatgttgaaaccaaatctgtcactgatttgtttttcggaccacagatttttctttatggtggcaacagattttctatttgcacccaaaaatctgttgtgttataacagatttgttaacctcgaaaaatgttatataggcatgacagagttgttttgtgtaatcacagatttaattaacttgttaacaaatctggtgttttacaacagatttttgttaaaaaataaaattactacacagtcacatagtgataacagatttgtttttagtgatgacagttttttttttcagtgtcaaagcataacagatttactcatgtcaatgttatggccgatttgtttatgactagaataacctttttagtaataacagactttttttggcagatttatttttaaaatttcgaaattttttgttatatgagatttattagctagccctcaattaaattatttccggtttgattgtatgttaaatccggtttgactggattttttttttttttttttggaaaacgttacgacagacttttattagccgacagatttttccgaaatattaccatatttgagtcaaggaatattctcgtaacgcctagggtttccaatgaaaaaaactgccattgtcgttttcttttttcttctgtaacgcctaccaaatctaatttcaatacaatccattattcttctacctattcgagatcttagttgcttcatctttgatacaaattcgattcccttgtttattcgattctctctttggtatggatcaagtaattttcgtgtgtggtaaatgggtatatgagaaaacgagatggctttttgtggttgatagtacaaaaggttgtcgtgtacttgaaggtaatagtcaaaccagttatgatgatttcatccaaatggtgtatgaggattacaatatcgagaagagtgtatttgaagttattttgagttacaagatcccgaaatcaaagcaattaccagcagatactccacctgtactcattggtaataatagacagtttcagtcttatttggggcaaacgaagaatgatactgttcgactttgtgttgaattaaaagagaaagttctagatgaatatgaagaggaaatcattgatgatttaggtagcagcgacttgccgaagacaaaagcagttgatgtatacggtattgtcgaagaaaacgttgaaaacgttgacatattcactcatactgatagcgtcgttgaaggaaaaaaatctgaagcagttgaagatggtgaagatgacgggagtagatttgattactgtgatgattccgacggaacagattctgatgatgagaactttagcctctatgggattccaccagaagaagaagataaaacgaacgtatcaagcaagaagatgagtttaagtgtatacgtagaagaagataaaggagatgctacatacgagaccttagaactatcgtcattgggattggccgttggtcaatgttttgaaacgaaagatcacttggagacacgtttgaagatacttactgtgttacagaaatttgattttgatgtttcgaaatcgactcctacattatattttgtaaagtgttggattaagggatgtcgatggagagtgcgagcaacaccagttgacgagtatccaaagtttcatgtgagagtgtatgtttcggaacatacatgttctgttactaaacgctcatcacgttctcgacaagctactcacgaaatacttggattgctctataagaattacgttggtggaattggacctaaggttctcccaatgcacgttgccgaagcattgactaaacgatttcaaatcaaggtacgatttccaatttcttggctttctttgtttattaattacaccttgttttcaaccaactaatcactaaagtcaatacattttattagatggattactggaaggcttatcggacactaagatctgcccgagagatggttaggggtacaccagaaagtggttacgagcaacttccggtatacttgtacatgctaaggagggaaaatcctggaaccttcacgcgacttgaagtggatgaaacacagcgatttaagtacttgtttcttgcgtttggtgcaagtattttaggattccctttcatgaggaaagtggtggttgttgacggtacttttttacagggaaaatacttagggacacttcttacagcaacagctcaagatggtaactttcagatatacccgattgcttttgccgttgttgatactgaaaatgatgcctcatgggaatggttttttagacaactcagcagtgtgattccagatgatgaaagtctcgccattatttcagacaggcaccaatccattaaaagagcaataatgacagtttatcctaagtctagccggggaatctgtacataccacttgtacaagaatatattagttcgctttaaaggtcgggatgcatttggtttggtaaagaaggcagcaaacgctttcagattagtcgattttgaaaggatatttgatcagattttagctttgaatcctgctcttcatgcttaccttcaaagagctgatgtacgtttgtggactcgtgtgcattttcctggtgataggtacaacttgcttacaagtaacattgcggagtcaatgaataaggtcatgtcacccgcaagaagccttcctattgtacaactgttagaagaaattagatccatgatgacgagatggttttcagacagaaggaatgatgcattgaatttgtctacatatcttactcgtggagtagagaagatattgcaggtttcatttctaatacaaacacaatttatacacgtccgtatattggtgattatagctaactaatgagtagctccaactttgagtagctcctcctacgttgctttgacggtataaatgaactcaacatggcaggaatcattgtcatcacaaacatgcactgtatcgccatttctgtatccgtagtcaagctcgggatgctatcataaacattgacccgtttctttgtcaagtcaatatccagagcgacccaatgattcccgttgacaaagaggtatgcatataggtgatccacatcaacaaaccatttcttgtttgtcgccgcttcacagtgagctgtaccattgacttgatcctcataatactccctgaatttgaagcacctataatctggttgaaactgtttgtagtctttgagcattgtagagatcaaatcttggtccaaaaaagttattctctggttgggatattttgacggatcacgattgaatcttcggcgaaacaatgacattgcagctcccatgtgctgcattataatcagaacaacaattattagagttacatatagtttcagccagccaacagtaaatgatttaatcaattgaaagcaaaaacatttaaaatttgctatacttacatagtctttcagccatccatatctttctgttggccagtcgtttcttggagtcattatctgccaatagaaccgtgcattaaagttgttggtgttcaggccttctttttcactgcagaaaaaaaaaggaatgagtaatgatagcatttatatttgaagaaaaaatagagacttacaaatcaggttcgagccaatccttcagcctatcaaattggtcatcagaaacaggttgaagatgttcaggtaccgatgaagacgatggtacatcagtgattatgcgcttcactgttgaatttcctacatacggatatttctgagaacccgctagctgtggcactcgtctcctcttactagtgataccgtccaaattatctagtccttcttgaagtgctctcaatgcatcagccgttgccttattagccatctgatctgtaggattggagaatgtttcttctgaacttgaagccattttcagattgtctgcattaaccttgtcagtgacatccacaacatcatcatcaaacgtctttgttgttggagctgcaacagacttcttctgcaagggttttggactatctaccttctctaccttcacaactgtcttcttcatttcaggttttggtttttctaccttctctacattgacaattgtcttcttcttatcagattttgcaacttttttcttagtaaggacctttgtagcagcttccttgttcttcaccgaattaacagtcttcttaaccactctttgaataggcaacccatcaacagaacctggcttctcctctacaatccaagactggaaaaaaacacagtacacattcattataataaacgttgaattcaaatccaaaacagccaacagtaaaattaaaaactgacagctacttacacattggttactatttgcctcatattcatcattgttgtttgatgtggcagcttcattggatactacagggggctgagactctttaagaactctcatatcagtctccacagcttcaaaccttgtttttacactcgcttctaagcaagtaactttcttctccaacccatccaatctgctgcttgcattcttgtccatgtcactaattgtgacattcattttctccaacatattccaaatatccagcaagcttgtcttctcctcttcatcaacctataatgaagcatataacaatgttaggtaattcactgtcaacatatagacctatgtatatggaaaactcagaaatggtaaaagcaggacctttatatgagctttccctgttctttgcttcttatgagatacatcatctgcaggcgttgattcaatcactttactctcaccatcctcgtttgatgattcctgattttgtttcctcttacgccgtgctgccacatgtgtccacgcatgggattgtaaacggttgtggatgatgtctttaagcaagttgtcaagcgccgtatcatgattctcagctgagtcactccattgaggatacatgttttcttcagatatagggatcatatgcctcacacgcacctacatacatataatgacaagattaatcagtttcagttttttttaaagacaagtagcagaattgatctataaaaccttacatacctgtccgtgggcagctttctccttttcaatgaaagcggtgaagttaaaacgttttctagaagatctccaatcaagtagcggaacacccgtcagatttgtttttctaaacccacaagctt

SEQ ID NO: 756 - DNA, 77905 bp, Arabidopsis thaliana
aagcttgaactaacgaaaatcctggaagaagatttttcaagtgtagtgttcatggcttcttcaattgggcagatgttgagaagccatatggtttgcagaaggtgagcttattcaaagcaagggatgagaatcggcagcagaaggaggaactttagacacttaaagaatctctaagcgccaagagtagccaagatttaagtgcttcaacaacaatgaaccgtgtgttattgcctaacgagcaagagaaggagaagctcgaaaacgatgttgtggttgctaatgagaaggaaaaactgcttcgttagtttattgtgttgtcatggggaggcttcattgttgtaattgggatgatacttgcgatggggaagtagtgtttggttgttgttagtgttgtcttgcaatgttttgtttcttgtattgtggtatgttagttatgtaactcttgtttgtatggaatggaagcttaaaattgcttagtaatcaaatgtaactcttgtttgaagtaatggtattgaagcttaaaattgcttaaaagtcattccatttagccaaaagaacctttaagtttaggatctcaccaaaacatacaaagatccaaccatcctatatagataattaaacaacatcctacataaaataagcattcttaaaagacataatcttaaatcctagttcttgtcaggctgcaaaaacatcaaacactttgttagtccatggagacatcatgaaaacagtctgcttgggtgcttcctctttgcctttgccacgacccttgccacgagctttagaaggatctttgccttcaccatttttggttcctagaggacgccttcgagcacgtcatgttcccttttgattagctgttggagcacttgaatgttgcaaaatttgagtggactgactttgagaacaagttggtgtggactgactttgagcttgctgccacctccttggtgcattgtgtatgctccatggatcatcattatcctatgacaagtcaacaacgcaaatcaaacatagctaagagtagacaaattatagggaaaattctagagtaattaccttactcttccttggtctccctcttttgcgtggaggagctgacttatactgtggcatttttgcaggttcctttattatgtcctgattacttgcagttagtacaagtcacagtacctccttctcttgattcctttgtcagataagtcgttgattcacctggttcaagtatcctagcaaagttcttaggacgccctcttcttccttttatcaggcacttgaattgttccttttcctgtcttcttccacaacatttttccattcaatggttctatgtttttcttgtagttggattgccagacagttgtcagaaagcggctatcaacatagctgcatagaagaacaaagtatatcagcaagcatatttacaactcaatgagaggcgagttgattaaaacttatgcttggatctcggttatgttcattgatgacaaagattgcatgtggacaaggtattcatgtgagattccatttgttgcaagcacaagtcatgtggaggatgttaactctaaagcttccaataccttccaacacctcataaacgtgctcactacttttgaggacataaccgaatttggctgacttgcagtttgcttctagtatctccattatatgaggtggaaactttgtcttgcatgtagcagtcttatcccgtctcttggaaagacgctttattgcttgtcttcttacatcttcaagcatatttatcacaggtttcttcctcgcttctctgattgttctgttgaaactctcacataagttgttgctaacatcctcacaacttgagcttgaggaaacatgtctttaactgcattgagcaatcctttttgcttatctgaaatcactgtcaaatctccacctaaagctaaacccaaacccttcttgagatggtccacaaaccaagcccatgactcattatcctccactctaactacagcccaagctataaggtagattatattatctacatccctccccacagctgctagaatctcacccttcaatttccatttcaaaaatgaacccatctaggccaaaagcaatttttccaagttgttcttaacgcattaaaacatatataaaacttgtcaaattgctgcttactatcagctttgggaatggtcatgatgtctatgtggatacgctcattagatatgtgcagttcagcctcataattgtatagctttgcaaattgttgtttctgcgtttctatcaccaaatttaaagccatcctgcttgctttctggcatatccacttagagacagagattgtgtacctcatcattatctcatcttcgatgtcagtccaccacaaagaagggcgccttcttgcttcttctctgaacatccgagcaatgaccctatagtgacccgcataagggcatcgggtacggcaaaggaccgaatgagaaaaagttgctcgaatgcatggccaatggaccgcatgtgcccaaaaaatgctaaactgtcaaagggcaaacatgggcaagaatgggcacgaatgggcaaagatgggaaaagtttggcatgccgcgggcgaagtttgccacgctggccgcggaaccgacatgtgtggacacctcacttgcggtgccatgcgactcaagtcaccaaccttggagtcgaattcggctgagtcttggagccgaagctgatggggcaatggaatgacacccgtagacacctgtcgccacgccatcgcccgagacacctgtcgcatgtgggtgcggcaactgtctagacatgtggcagcgggcggtgctacatggccgaccttgggcggactataaaatgatgctattctcagcccattttcatttttgaaggcgagagagactgtaaggctgtctgaccgataactcgtccgaaaccaagaaaacttgcccgaattcagtaaatcttgcccgtggtctaggaaagtctgatcgtaagtgcaaaataatcgtatgtggtcaagagaactcgtcctagtgagaagtcgtcgaccgtgattaagagattctgcccgcgactaaaaaacttaccgaatctgtcagttgtggtcgaattgtgtttttgtttgcatgttttctagagctagtctttagattatatgcatgcttactcacttaaacttaactaatcagaatttggcttaagttagaacttgactcttaaaataatatgagcatttgacgaacttgatagttaatatcattaaggaatgaaatgaactagtgcatggctaggcttagtgaatatggactcaactaagtttacttgatgatttattattttattcgagggcgttagaattcttggtatcagagcagggttatgcgatgctcgtggacactcgggttttcaataattttaccaagtaaatttgagtcgcagaatgcaacataagattttggttgttcttcttttagatgactaagtgggggataggtttacctcgttttgcagatgtcgtctagcaaaggaagcaacaccgttagtctattgcacagtgttaatgtgcccaatcttgagaactccgctccgtcaagcagtactgacgatgaaagtttgtttgtggccatgaatgatcagtttatggcagaagatagtgattccactgagtctgacacatcgattgaatcagatccgtcagatgtttggaaagtatggaagatgctaatccgttatctagtgaagaagcaaaccatgttgagcggatgatcatcggggatggtgagttatttgcggtgccaaccgagaacgcgactgaggaacaagtgaatgatagtctgaacaatatgttgacgcaattctatgtgccatcgacggatgaggagggaagctttggtgttccgaatctgggaactattggcgagcatgggttaaagttggaagaattgaatgcagacttgttcgatgtaccagtaatccacgcaaatggtgcgtttggtgcgatgaatgagtatggggccaacgacgagtatgaaatgctaatgcttatgggaaataacaaagaagatgagaatgaagccatagagaatgagttagagcacgcgatcgatcagttgatagctgagtgtgctcaagattttggtctgatcggggaaaaaggaggaggaaatgggaacgatgggggtgattcctcatcggactcatttgagtcattgacgctagagcctaagagtccgagtgtgatcaacatctcatcggacagttcgcaacccattgtgatgatgctgaatcccagcaagccggaatcatgttgggagattgagatgtttaagggagatgagccaagtgaagaagaaggaagaggaaggtgggatccgatgctgcttgaacaggaactaaaccacgagtatttaatgaatcgtttaaaacttgatgaagaaaggtcgaaagaaaagatggttgataaggagggagaagacgagaggcgaaagggaaattgaacgaccgaagtaggaatagagttggagaagtctaaggcccaaaggatcgttggagtaaatctgcatccacttcggatcggatatgggattaattccaaggttaagcccagaatacgggcaacggcgaggaagtcagttagaaggaagttacccactccggctaagcgtccgtgggagatatgtggctatatagatcatccgactgagcagtgcttgcatccaccacaggctatgccttatatggttgattgcgccaagtgttactcttgtggaggagtgggacatgtgtccatgtattgcccgtaccttgcgccgaatgcgggcgaaggatcctcgaggtgagccgggccattaatgactgcggcggcggaggagaagtgtttgaatgaagggatgccctcgtttttatgggtaaggtgtgagtgtcccaagtgtaggaacccttgactgatggtccatgagatcttctaggaaagaatatagttaacgtttttagactaagtataaaatcgactaagtcatagtgaatttgtgtgtaaatatgctaaggcctagaacttgttgaatagtacatgtaagactaagtctaaaacccgatagttataacttgtataaacttttgaatgcataacaagttaagtatttgcttgtttgtgtggtggcctaccattatatgagtgagaaatcacttgtgtaagaatcggatgtttgtgtttgggttagaaaccccatcggaagtacaccagcaacgaccaaccgtttgaagaatcggagaaaagaaatcaaattgagttgggatcgagacaagtctaaaacaagcatacttcagggaaacaggcaaaagaagggaagttcggtctaaagtacggacaattatataatcagacaagaagataaaagagaaacagaaggaaaaggggcgagagacttccttaaaagagtaaggccgaagattttagtttgtgataaaaaaaacgaaggaactaagagtaagggagaaacaagccatgaacgtagacatgaaggagattcaaaaacctttgtaaaaatgtcagaagaattcgtgggggtcagaaatgactgagttagaattcgaggacgaattctattaaggaggggagaatgtagtcacccgcataagggcatcgggtacgaccaaaggaccgaatgagaaaaagttgccttaatgcatggccaattgaccgcatgtgcccagaaagtaccaaaccggcaaaaggcaaagatgggcaagaatgggcacgaatgggcaaagatgggaaaagttgggcatgccgcgggagaaatttcccctgcagggtgcagaaccgacatgtgtggacacctcacttgcggtgccttgcggctcaagtcaccaatcttggagccaaagtcggcttagttttggagccgaagttggctgagtcttggagccgaagctgatggggcaatggaatgacacccgtagacacctgtcgctacgccatcgcccgagacacctgtcgcatgtgggtgcggcaactgtctagacatgtggcagcgggcggtgctacatggccgaccttgggcggactataaaatgatgctattctcagcccattttcatttttgaaggcgagagagactgtaaggctgtctgaccgataactcgtccgaaaccaagaaaacttgcccgaattcagtaaatcttgcccgtggtctaggaaagtgtttccgtgtttggggaatcatcgcttgtggtcgagagaactcgtccgaggaagaagtcatcgatcgtgatcaagagattctgcctgcgactaagaaacttacagaaactgtgagttgtggtcgaattgtgtgtttgtttgcatgttttctagagctagtctttagattatatgcatgcttactcacttaaacttaagtaatcagaattcggcttatgaacttgaatcttaaaataatatgggcatttgacgaacttgatagttaatatcattaaggaatggaatgaactagtgcatggctaggctacgtaaatataaacttaactaagtttacttgatgatttatgatttgattcgggggcgttacagaccccttgtttcaacattcttgctttcccgcttatagagtggtggtactcgtccctataggtctgcactttccatttccttgtacgcttttgtgcagagcagtatatcttccagttgcagttctcgttactgcatatagctgccaacttagtcgcatcccatctacacaacttgacatcataattcatcttcaaaacatgtctcagaagttgatcttttaactcttcaccgctattaaagatctggagcatccaaatgtaaggaggtttatccttggagaactgcttttctgcttgatgctctctcgatttgctcatacatatcccattcatcatttgtctccattacgtgatcaggtcgctcagcatcatagtattgtctctcaaattcatcatcatcatcatagcattgtctctcaaaatattttttatatttacatttgtaataatttaatagtcaaaatatgcagattttcagatatttttaagtaattttaggtatttaatctacttttaagtaaatttgagtaaaaaatgttccaaagtttttagatattttgtgtattttcgagtagtttggatatatttgattataaaaatttgatttttggaaactttgggtaatccgaatctgatctgaaatatccgactagaatccgatccaaacccaaaatcttaaaatacccgaacgggttctatacttctaaattcgaaaatcggaaaacccgaaaaacctgatccgaacccaaacgggtatccgaacaccgaggcctatttgtggccacaatgacaacatcaagatcaactctatcttaggtatgttttttttttttttttgttaaagctattggtggtttttggtttttgtttcaaggaagatgcaaatagagattaatatcatggaattcgaccatactaagctgaggaaggccgatgttaagcaaggagagagatcattcggttagtcaccacaaccaaggtgacattgttcttaacctatctttctcacaaattcatccatatgcttatttccccaccgagggtggtgtgatttgagattgggggtggggtggggggtggtggggggtaatgaatctgttactactaatgatactctctatttcgttgacttgaaacctttttccactttttacaccaatacgttctaacaaagcaaaaagtttttattttgtttcttttcaaagtatcactgggcaaggacgatgtagggaacgatgaacctactatatgttgaataagaccattaaaatgtgctaactcatttcctaagtgacaagttttgcaggattcacaaggacggacaatacctagaaaccaactaccggatctttcccgtgaagtctcactacggagactctgtttgacctgacaactctattttatttggacgatttaacctgaccttaattctttctcatgaaggggtgttagatcggggaaaccagcatatacattcaggacttcttatccctttttaccactctctcctgatcctgaatggccactcacttttagtggttcctacccttaaaccctatccctctttttttaagcctcatgcattctcttttcctttttcatttagcagatatgtgcaaaaacgtcggagagaaaggaacaacacaattttccgccacaaagacggaagaaggaagtaaaagagagattgcaaaaaaggtatgctcattcgactcgatgattagaagttctgtttccccttccataaaaaaaaaatatctaaaaaaaaattacaagaaaagaaaagaaaaatatatataaaaaaaagagagaaatgaagaaggaaggaaatgaaacattacaaccaagagagtctagtagcatatgataagttgaaaggaaagacatgggccaccaaaaggagagatgagccatttacagaagagagccccctctgaaaaacccaagtctggggaaccgaaagtaagaaagaagtaatgcagaaagaggtgtttaaaagaagaagtggttggaaacagtggacctcaaccgatccgttctctcttgcaatttttcaacatatcctacattcaagactatacggtaaccctaaacactttaactacacctcttaaacaccaaaatcccctttcataccaagtgctgtctaccccgaatgacaccttctagtgagaaagctcacgccacgtataataaatgtagggagttaactgacgagattcttgagttctcttgtaggtccgagacggatggataaggatagtgaacgttttgggtctatagtgaggatgttctaacgtgatgtctttgtctttatgcatcctcaggatatcttttaggacacggtctctgatagtaggaaagttcccgctctttcaaaatctttccaccagtttggctttgttgtttccttgaggacaagcaaagtctaagtctgggggagttgataacatcgtattttattaggttttccatggagaaatcaggagttaatggacacttcaaggcatatttcgagtatatgagctttaaggaagaattatgagttttcatgcaaaaaagagtagaagtcgaccaaaatccgtttcaagacagtttccgtacctcagatgtttggcatccggccaaggtctttcctatctcgacatgaagtctttggaaatctagaagagtcaagattcacgtcgaattcgaatcgaagcaatccatgaaaccgttcagaagttatgtcccgaagagtgaagacatgtcctagaatcgcggttttggaaatgatcaatctaaaaccgccggccgaagagacttgaacccgggcgtcccctcaagttttccaccgaccactagggcgcacaaccactccttcccttcctcttgccgctgacttcaagcctccctaagaatcccaggaacttggcccatcacttactaatcaacggaaaaacgtttctaccctttgacctaatgaagccctataaatacaaagattaggggaaaccctaatcaccacccacgaaattagactgcctcccgcgactctctcgcctccaagccgtcctgctcttgttcttcattcgttttctcttctctcttctctacttgtaaaaggaagaagatttatcaaactttggattttcggagaagatctctaaacccttttctatattcatactctttttatgcaattacttatttatatgatgttgtgttctttgagtatgtgtgagtagatctgtagttaggttttatgtgggtttcgaagggcactcatggggactttagatcaagtttaggttggcggtttctatggttttgtttgattgtttacactgttctttctagttgactttaatcttaaaacacgtatgtccggaatgtcacctagtacatgatcttaggtattttatattgaggcaaaatcttgtataattgcttgaactagctcaactgaataggaaactataaccgttgttgaccgccgagtgatagggacttatggactaaaatcaaacttgaacttaatgctttgacctagtcttgttaccgtgttggcacctatattctagggttgactgtgtagcttagggagattaggtggctgccgcctctagcccagggttagcctaaccatgttatcacctaaattgggatatataccttctgtttgaaccatgttccctggagaaaaccctgatgacctagcgctttcgattacttgttttacaccgctctcttaactgtcatttactttgattgcttttttttacagtcttcttttattgctttcttctttctactgcaccctctacttattctcattgcatacacaaacccccactcactcgtttgtcttggtctaggttaactaacttcaattcttccttgtagctatactccctgtggattcgatccttaaatactactccgatatattgtgcactttcagtagtcgtgtggcctttcaggtaaaagcctaaggcgaaataaaacacgaatcacatacctaatatagagttgatcttgttttgtcggtttgaccacgagttagatcaacgtcgtggtgaaggatggtgagaatggatggcagggcagttgcggtgccagaccaaaagggtggtgtggacttatgttgttccttgatgggccggctttggtcgattacatgttggtatggtcgaccatggcaggtggggcgggacacgattgctagtctttgctttgtacatatcgggaccaatatgttggtgtcggatcccgaaccgaatgtttggatccaaccaaatattgccacataggcgaaaggtcaacattaaggagtgttaaacaaggatttattgcctaactgggctgaaggtccagggccatgcgaagtgaggacttcagaaaggaggcagcagttcgagagcaagaggtgggtcggatatcaaagtccatgaagaagtcaaaggagttcgaatataaacgttaccacatttagttggggaatcgaacaagcattttaaatgggaattattgtgtataattgtcaataattgtgattcaagtgtataaatataaggtctcgaatcatatgaaagatacatgcatttttgtacaaattcttgctaatacattacaattttcttacttaaatccttgataagagttattctttccaaagagttcattttagcttttttgatcttaagagttttcattcccacaaataaatatattcatgagtgtgcgaatccgacttccacattttggcgtcgtcagtggggacgggagattcttgagtcgtcaaatttcattacacacaagatttttaagcaaagtcacaatggccgacgatagctatatcaatgtaaccatgaccgatgcactaaaaaaactggaggaaacgatctcaggaatgacacaaaagttttcggatgtggagaaagcagtatgcgaactacaaacaacccaggtatctcttaacctaagtgttaatactatacaatctcatgtgcgaactttgagtgcaggaaatcctcggggagctcgacgaagcatgtttagtttgccagattcccaagcgtggaacgaggctggtaggcaaaacactccaagtgcaagcgagccccgatctcaaccggatgtcgtagaagttttagtcaatggtgaagagcaaagtggaaacctctatgagcagaaaaactatgacaaatatgaagctatggagaaagttagctgcgagctgaaaaaaatatatggagcctgacatcgatcgagtgatcgaagaaacaaggcaaacatctttcacctcgagaatcgccagtctaaggattctcagaaactcaacattgagccctaaaacgggctagaggaccaaaaaagttatctcgcagctttctttatagccgatggaagagtcgatatggaggaagttgatgaagatgtaggattttgcaaacttttctctgaaaaccttaccggacaagccctgatgtggttcactcactcgagctaggctatattagaaacttcaacaaattttataccacctttcagaagcaatattctatccttatggggaaaagcacttcggatgctgatctttagaacttgtcacaaggaccaaacgattcgctccgaacttacatcaccaagttcaaagccatgctcactaagctcccaaaggtgtcacatcaattgactttatctgccctaagaaaaagatttgtgtaggaatcaagattcaaggaagaattgatagtccataaaccgcccacaatcctagatgcactatttcgagctaacaagtggatggaagtggaggatgagaaggaaagctttgataaaaggactaagcaagttaagccagtggttacttttcctccaaagaagtttgaaccaagagataatcgaggatcaaagaggttcggagtcaacccatccaacaacaatgtcggaagaccattccaaggaaagagaaaacccacaacgtggacttgagatgaaatttcatattgcgacatccatagagtgaacaagcacatgacgaaggattgcagcgtattaaaaatacatttggcggagttagggagaatggtgatctcgcaaaatttgatattgaaagttttgtaaagaagtatcatgaagcaagagtcaccgccgaaaatcaaactccaataactaaaaggtcaaggtcagcaaatgatgaagagccaaggagttcaaatggaaagataaatataatcattggaggatcgtagctttgtcgggattctgtcagtgctatcaagaagcataggcgtaattttcttataaaagcaaattttagccaggaaatcgacatcctgggagcttcaatttcattcgatgaagaagaaacacgtcatctcgagaggccacacgacgatgcattagtcttgacactcgatgtcgccaattttgaagtctcaagaatcctcatcgatacaagaagttcggtggacctaatattcttaagcactttagaaagaatgagaataagccgagctgacataattggaccgccatcttcgcttgtcgcttttacaagtgacaccgccatgtctcttgggacgatcaaactccctattcttgggaaaagtgtcaaagatcgtggaacttaccgttttggataggccagcggcttataacattatcctctggactctgttgatctaccaaatgaatgcagtaccatcaatctatcatcaatgcgtcaaatttccaaccccaagtggtgtagaaacgattaggggagatcaagaggcttccggaacttgttatctcacttatatggtgttaaatatcaaaataaaagaaagttaaacattggttccttatattgaattggatattgtttcttgtatttaagtttttttgtttcatttgaaatgttgatagaaaccattaaatttaagttttttagtatataaatttgtcaaaaatttatttaccgttaaatataaagttaaattgattgttttttttttttgttagttactttgtgattttgctttcctaaataaagtttagctaacttcatttttcaaaaaacaaatagaaatcattttttcttacaatttgtttagtaaaataagaatatttcttgtacatttcaatcataagtatatatgtctaaatttaagcctcagactactacgctattcattgttgtagttttggtgtgtgcatttgttccagctttctcagtcgaagaagctgaagcaaatttattatggaatacttgtcttgttaaaatcactcttaagtgtgcgttagatataattgctgctgtcttaaaaaatggaacaatgcctgatccttgttacaacgatctcgtcaaagaaagaaaagtgtgtcacaatacgcttattaaatatattgcagataaacccatgttaattgctcacgaaacagaatacttgaagaagagtgatgacttgtggaaacattgtgtctcaatctccaaaagtgcttgaaatgtatattgcgtgtactattttcacccaataaattgatagttttatgtcgttatagttttcttcacacaagcctttatattttaacttaacaacaattttaaccaaagcgaatttctttcttaaaaagtataatttcaatttatgattatctatttgaactcgaaacaaaatttcttataaagagtcgaataataattcaaaatttaactattaagaggagctctaactaatattgtttagtgaactttaatttttgtattttctttctaattagagtaataagttattcataattcaaaaaagttgacatatttttgtttcaaagaatttatagaacttaatctatataattcaggaaaattagtatacattctttatctttattctatctttcaatgacgataaatcagtacctcacataaataaccaaaatgttttcaagtacaaatgtttaagttttaatttcaatgcgaaaacaaaaacttgaagggtgagaaaaatttgaatacgatatctactaaatcctttatatttataaattttcttaggaaaagtatgtattttctaatagatctgttagttcatacatatcttaattagtgttaaattagatctaatgattagtgataaagtttttagatatcgatataggtgtctttaccatttaacttgaatcctttgttaatgtaaaatcttaaaatattttgctttgattctacgtattggtatatatttttaacatatcaatctaatgccactcttaaattatcatgtacttttcaatatatgttctgactcacttgttatgaaacaatggattttcaccaattttggttatttattaactagaagttttagctcttgtgcaattttaaatgatatgcttttaaaattggtctagttataatagttgtatctataacataaaacttataacaaaactatacttgatattcaaaaattattgatttgctcttgtgaacttcatattagcctagagaactttgaaaacctttcaataaattgtatgtcgaataaagttttacaaacatttattagccatttcgattaagactattgtgagcaaaagttttttttattataaaataaataatatgtttaagataaattgtgagttaggcttcttatattttaaaaattatataagtttatactgaaaaagagttaaaattttcaaattttaaatttatttggcttaagaacataaatatgtcaatttgaaccttatacccactaaatattccatgttagataacgaaataaaagaaaattaactattggtttcttatattgaattggatattgttacttgtatttatgttttttgtttcattgttaaacgttgataaaaccattaaattaaggttttgtagtatatttatttgtcgaaaatttattctcattaaatataacgttaaatttatttgtcttttttaaaaaagttactttgtgattttgatttcctatataaagtttagataacttcaattttcaaataacaaatacaaatcatttttcttaggatttgtttagtaaaataagaatatttcttgtacatttcaatcataagtagatatggctaaatttaactctcagattactacgctattcattgttgtagctttggtgtgtggatttgttccagctttctcagtcgaagaagctgaagcaaatttattgtggaatacttgtcttgttaaaatcactcctaagtgtgcgttagatataattgttgttgtcttcgaaaatggaacaatgcctgatccttgttgcaacgatctcgtcaaagaaggaaaagtgtgtcacgatacgcttattaaatatattgcagataaacccatgttaattgctcacgaaacagaatacttgaagaagagtgttgacttgtcgaaacattgtgtctcaatctccaaaagtgcttgaaatgtatattgcgtgtactattttcaccctataaattgatatttttctgttgttatagttttcttcacacaagcctttatattttaacataacaacaattttaaccaaagcgaatttctttcttaaaaagtataacttcaatttatgattatctatttgaactcgaaacaaaatttcttataagagtcgaataattattcaaaatttaactattaaaaggagctctaactaatattgtttagtaaactttaatttttgtattttatttctaattagagtaatatgtttttcgtaattcaaaaaagttgacacaatattttcaaagaatttatagaacttaatctgtataattcaggaaaattagtatacattctttatctttattctatctttcaatgacgttaaatcagtacctcacataaataaccaaaatgttttcaagtacaaatgtttaatttttaatttcaatgcgaaaacaaaaacttgaagggtgagaaaaatttgaatacgatatctactaaatcctttatttttataaattttcttaggaaaagtatgtattttctaatagatctgttagttcatacatatcttaattagtgttaaattagatctaatgattagtgataaagtttttagatatcgatataggtgtctttaccatttaacttgaatcctttgttaatgtaaaattttaaaatattttgctttgattctacttattggtatatatttttaacatatcaatctaatgccactcttaaattatcatgtacttttcaatatatgttctgactcacttgttatgaaacgatggattttcaccaattttggttatttattaactagaagttttagctcttgtgcaattttaaatgatatgcttttaaaattggtctagttataatagttgtatctataatataaaacttataacaaaactatacttgatattcaaaaattattgatttgctcttgtgaacttcatattagcttagataaactttgaaaacctttcaataaattgtatgtcgaataaagttttacaaacatttattagccatttcgattaagactattgtgagcaaaagttttttttattataaaataaataatatgtttaagataaattgtgagttaggcttcttatattttaaagagtatataaatttattctgaaaaatagttagaattttcaaatttcaaattttttttggcttaagaacataaatatgtcaatttgaaccttatacccactaaatattccatgttagatatcaaaataaaagaaaattaactatcggtttcttatattgaattggatattgttacttgtatttatgttttttgtttcatttttaaacgttgataaaaccattaaattaaagttttgtagtatatttatttgtcgaaaatttattcccattaaatataacgttaaatttatttgtcttttttaaaaaatttactttgtgattttgatttcctatataaaatttagataacttcaattttcaaataaaaaatacaaatcatttttcttaggatttgtctagtaaaataaaaatatttcttgtacatttcaatcataagtagatatggctagatttaactctcagattactacgctattcattgttgtagctttggtgtgtgcatttgttccaactttctcagtcaaagaagctgaagcaaatttattatggaatacttgtcttgttaaattcactcctaagtgtgcgttagatataattgctgctgtcttcgaaaatggaacaatgcctgatccttgttgcaacgatcttgtcaaagaaggaaaagtgtgtcacgattcgcttattaaatatattgcagataaacccatgttaattgctcacgaaacagaatacttaaagaagagtgatgacttgtggaaacattgtgtctcaatctccaaaagtgcttgaaatgtatattgcgtgtactattttcacccaataaattgattgttttctgttgttatagttttcttcacacaagcctttatattttaacttaacaacaattttaaccaaagcgaatttctttcttaaaaagtataactttaatttatgattatctatttgaactcgaaacaaaatttcttataaagagtcgaataataattcaaaatttaactattaagaggagctctaactaatattgtttagtgaaatttaatttttgtattttctttctaattagagtaataagttattcataattcaaaaaagttgacataattttgtttcaaagaatttatagaacttaatctatataattcaggaaaattagtatacattatttatctttattctatctttcaatgacattaaatcagtacctcatataaataaccaaaatgttttcaagtacaaatgtttaatttttaatttcaatgcgaaaacaaaaacttgaagggtgagaaaaatttgaatacgatatctactaaatcctttatttttataaattatcttagtaaaagtatgtattttctaatagatctgttagttcatacatatcttaattagtgttaaattagatctaatgattagtgataaagtttttagatatcgatataggtgtctttaccatttaacttgaatcctttgttaatgtaaaattttaaaatattttgctttgattctacttattggtatataattttaacatatcaatccaatgccactcttaaattatcatgtacttttcgatatatgttatgactcacttgttatgaaacgatggattttcaccaattttggttatttattaactagaagttttagctctagtgcaattttaaataatatgcttttaaaattggtctagttataatagttgtatctataacataaaacttataacaaaactatacttgatattcaaaaattattgattttctcttgtgaacttcatattagcctagagaaactttgaaaacctttcaataaattgtatgtcgaataaagttttacaaacatttattagccatttcgattaagactattgtgagcaaaagttttttttattataaaataaataatttgtttaagataaattgtgaattaggcttcttatattttaaaaattatataaatttatactgaaaaattgttagaattttcaaattttaaatttatttggcttaagaacataaatatgtcaatttgaaccttatacccactaaatattccatgttagatatctaaataaaagaaaattaactattgatttcttatattgaattggatattgttacttgtatttatgttttttgtttcatttttaaacgttgataaaatcattaaactaaagttttgtagtatatttatttgtcgaaaatttattcccattaaatataacgttaaatttatttgtctttattaaaaaagttactttgtgattttgatttcctatataaaatttagataacttcaattttcaaataaaaaatacaaatcatttttcttaggatttgtttagtaaaataaaaatatttcttgtacatttcaatcataagtagatatggctaaatttaactctcagattactacgctattcattgttgtagctttggtgtgtgcatttgttccaactttctcagtcaaagaagctgaagcaaatttattatggaatacttgtcttgttaaattcactcctaagtgtgcgttagatataattgctgctgtcttcgaaaatggaacaatgtctgatccttgttgcaacgatcttgtcaaagaaggaaaagtgtgtcacgatacgcttattaaatatattgcagataaacccatgttaattgctcacgaaacagaatacttgaagaagagtgatgacttgtggaaacattgtgtctcaatctccaaaagtgcttgaaatgtatattgcgtgtactattttcacccaataaattgattgttttctgttgttatagttttcttcacacaagcctttatattttaacttaacaacaattttaaccaaagcgaatttctttcttaaaaagtataactttaatttatgattatctatttgaactcgaaacaaaatttcttataaagagtcgaataataattcaaaatttaactattaagaggagctctaactaatattgtttagtgaaatttaatttttgtattttctttctaattagagtaataagttattcataattcaaaaaagttgacatatttttgtttcaaagaatttatagaacttaatctatattattcaggaaaattagtatacattctttatctttattctatctttcaatgacgttaaatcagtacctcacataaataaccaaaatgttttcaagtacaaatgtttaatttttaatttcaatgccaaaacgaaaacttgaagggtgagaaaaatttgaatacgatatctactaaatcctttatttttataaattttcttaggaaaagtatgtattttctaatagatctgttagttcatacatatcttaattagtgttaaattagatctaatgattagtgataaagtttttagatatcgatataggtgtctttaccatttaacttgaatcctttgttaatgtaaaattttaaaatattttgcttttattctacttattggtatatatttttaacatatcaatctaatgccactcttaaattatcatgtacttttcaatatatgttatgactcacttgttatgaaacgatggatttttcaccaattttggttatttattaactagaagttttagctcttgtgcaattttaaatgatatgcttttaaaattggtctagttataatagttgtatctataacataaaacttataacaaaactatacttgatattcaaaaattattcatttgctcttgtgaacttcatattagccttgagaaactttaaaaacctttcaataaattgtatgtcgaataaagttttacaaacatttattattcatttcgattaagactattgagagcaaaagttgttttattataaaataaataatatgtttaagataaattgtgagttaggcttcttatattttaaaaattatataaatttatactaaaaaatagttaaaattttcaaattttaaatttatttggcttaagaacataaatatgtcaatttgaactttatacccactaaatattccatgttagataacgaaataaaagaaaattaactattggtttcttatattgaattggatattgttacttgtatttatgttttttgtttcatttttaaacgttgataaaaccattaaattaaagtttggtagtatatttatttgtcgaaattttattctcattaaatataacgttaaatttatttgtcttttttaaaaaagttactttgtgattttgatttcctatataaagtttagataacttcaattttcaaataacaaatacaaatcatttttcttaggatttgtttagtaaaataagaatatttcttgtacatttcaatcataagtagatatggctaaatttaactctcagattactacgctattcattgttgtagctttggtgtgtgcatttgttccagctttctcagtcgaagaagctgaagcaaatttattgtggaatacttgtcttgttaaaatcactcctaagtgtgcgttagatataattgttgttgtcttcgaaaatggaacaatgcctgatccttgttgcaacgatctcgtcaaagaaggaaaagtgtgtcacgatacgcttattaaatatattgcagataaacccatgttaattgctcacgaaacagaatacttgaagaagagtgatgacttgtggaaacattgtgtctcaatctccaaaagtgcttgaaatgtatattgcgtgtactattttcacccaataaattgattgttttctgttgttatagttttcttcacacaagcctttatattttaacttaacaacaattttaaccaaagcgaatttctttcttaaaaagtataacttcaatttatgattatctatttgaactcgaaacaaaatttcttataagagtcaaataattattcataatttaactattaaaaggagctctaactaatattgtttagtgaactttaatttttgtattttatttctaattaaagtaatatgtttttcgtaataaaaaaaagttgacataatattttcaaagaattgatgtgaagtttgtttagaatttaaaataaaattaattattttagaaaaaaaaattaatgctaatggcattgggttgtaaataagtccaactctatgatttatttgctaaaatggctccaaaaatgtatatgtagatgcgaaaacaaaaacttaaagggtgagaaaaatttgaatatgatatctactaaatcctttatttttataaattttcttacgaaaagtatgtatttttctaatcaatatgttagttcacacatatcttaattagtgttaaaatatatctaatgattagtgataaaatatttagatatcgatataggtgtctttaccatttaacttgaatcctttgttaatgtaaaattttaaaatattttgcttttattctacttattggtatatatttttaacatatcaatccaatgccactcttaaattatcatgtacttttcgatatatgttatgactcacttgttatgaaaagattgattttcaccaattttggttatttattaactaggagttttagctcttgtgcaattttaaatgatatgcttttaaaattggtctagttataatagttgtatctataacataaatcttataacaaaactatacttgatattcaaaaattattgatttgctcttgtgaattttatattagcctagagaaactttgaaaacctttctataaattgtatgtcgaaaaaagttttacaaacatttattagccatttcgataaagactattgtgagcaaaagttttttttattagaaaataaataatatgtttaatataaaatgtgagttaggcttcttatattttaaaaattatataaatttatactgaaaataggtagaattttcaaattttaaatttatttggcttaagtacataaatatgtcaatttgaaacttatacccactaaatattccatgttagatatcgaaataaaagaaaattaactattggtttcttatatgaataattcactctaatgcccttttctcaatgcccttttgcaactctaccctttttttcccattttcatttctaccctttctaatacttttctccccaaattacccttaatgagctacccacagacctaattcatttcttcactctctctcttcttcctccatcgcaaattgtgaatgccgttgaatcccatgccgtcggaaatagtgagtttactcgccgtgaaaactcatcttcgccgtcgtaagtagagctgtgtgtcgccgtcgaatctcttgcgtttcccaggtttgattttataatgttagcttaaattttcgttttcgaattggtttattcgatttttgttattgattatgtgaattcgttatttgaatcctgattcaatcgacagtttgacatttgcttcagcttcgaatttgaattttgtttgagatttgatgattgaatttgtttctaaattttttgtaaattcgttatactgttctaaaatccttttgaattcgttatactgtttcgtgatagatttgcttatgtgaattcgttatactatttcgtaatagattttggttctgatttagtgtttacctcttttgcatatgcttttgtgatagatctatgccacttacgctttaaaacgatttgtaaaccatgttaaccactttttaaagcttttaaaatcccttgtaaattattctatgctacttacttacgctttaaaacgatttgtaaaccatgttaaccacttttcaaagcttttaaaatcccttgtaagttattctatgctacttacttacgctttaaaacgatttgtaaaccatgttaatcacttttcaaagattttaaaatcccttgtaaattattctatgctacttacttactctttaaaacgatttgtaaaccatgttaaccacttttcaaagcttttaaaatcccttgtaaattattctatgctacttacttactctttaaaacgatttgtaaaccatgttaaccacttttcaaagcttttaaaatcccttgtaaattattctatgctacttacttactctttaaaacgatttgtaaaccttgcttctctctgtagtgacagtgtttttgtgggtgttgattttgttattatttatcctatcaggttataatgctagaattgtattctgtttgtggcttgtggaagttgacaaacaatatgacttgggaatttgaattagacattgaattgggagcttctttagtgctcattgatgagcacattacctatcacgcgttggttgatattcttgtagaggattttcaaatagatagttcaaccaattctttgaagcttagttacaaattagtctccacgtctacaaccatacaatctcatcctcattatattaggaacgatagacagcttgcaacttttatgcacaaattctcacatagtggaggattgcttcagttatgtttgactgtagagcaaatttctgtgacagttgagcaggtttttcaataaccttcttgtgttataattttaaaaatccttgtaaaatcatattaacgtttttaaacctcttttaaaaatccttgtaaaatcattattaacgtttttaaaccccttttaaaaatccttgtaaaattattattaagtcagtgattgtgtttattacaggctgagacgacttcaaatccttttgcttctcattctgcatctactactcaggtaataatccttttaaaaaatcttgtaaaatcattattaacgtttttaaaccccttttaaaaatccttgtaaaatcattatttaagatagattgatgtttgaggtaagctttttattttggcagccgaggttaacctctaggattattgaggcgtgtgtatctgaaacatctagtattcttgatcaacagtattctagttctgcgttttcaactggtctaagtgatgctgattctttgtttattggaaaaattttcaaagacaaagatgaaatggtattcacgttgcagatgtttccagtgaagcacagctttgagtttcatacagtgaaatcagatctcacgaggtatgttcttcattgtattgatgaaaactgtagttggagactacgtgcaactagggctggtggatccgagagttatgttattcggaagtatgttagtcatcacagttgtgactcttcattaaggaatgttagtcatcgtcaagcatctgcaaggacattaggaagattgataagtaaccattttgaaggaggaaagcttcccctcatacctaaacagctgatagaaatatttagaaaagatcatggagttggaatcaattattcgaaggcttggagagttcaagaacatgcagcagaacttgcgaggggtttacgtgatgatagttttgaggttttaccgaggtggttccacagggtacaagtgacgaatccaggttctatcacttttttcaaaaaagattctgctaataagtttaagtatgcgtttctggcttttggtgcatcaattagaggttataagttgatgagaaaagtcatatctattgatggtgcccatctgacatcaaagtttaaagggactttgcttggtgcctcagctcaggatgggaattttaatttgtatcctattgcttttgcaatagttgactctgaaaatgacgcgtcatgggactggtttttgaagtgtttgctgaatataacccctgatgagaatgatttagtttttgtgtctgaccgagctgcttctattgcaagcggactttcagggaattatccacttgctcatcatggactttgcacttttcatttgcaaaaaaacttggaaacccatttcagaggttcttcacttattccagtttactatgtggcttctagagtttacacgaagacataatttgattctttgttctgggaaatcactaatagtgataaaaagttagcacaatatctttgggaggtagatgttaggaaatggtctcgagcttattctccttcaaatcggtacaacatcatgacatctaatctagctgaatctgttaatgccttgttgaaacagaaccgcgagtatccgattgtttgcctatttgagtcaatcagatctattatgacaagatggtttaatgagcaacgtgaagagagtagtcaacatctgtctgctgttactataaatgtagggaagaaaatgaaagcgtcatatgatacttcaacacgatggcttgaggtttgtcaagttaatcaagaagagtttgaggtaaaaggagataccaaaacgcatttggctaatctggacaaaaggacttgcacatgctgtatgtttgatattgataaatttccttgcgcacatggaattgcttctgctaaacatatcaatctgaacgaaaacatgtttgttgatgagtttcattctacttacaggttttatctctattcttcacaactttacaggcgtttttaaatgttttaatatctctttttatggttttatctgtgtttatgtggttttaatctcagtttacatcgctgtaatttacaggtggcgtcaagcatattcagagagcattcacccaaatggtgatatgaaatattgggagattccagaaactattagtgaagttatttgtctcccaccttctactcgtgtacctagtggcagacggaataaaaagaggataccttctgtttgggagcatggaaggtctcagccaaaaccaaaattacacaaatgcagtaggtgtggtcagtcgggtcacaacaaatcaacttgtgttgctgcaatttagatatatctttatctccagagaattgaatattgttgggttttttaatattttcttcattgtgttgtattattactctcgtttgttaaaattactatcaaacttttacaagtaattttgaaggttattccaatattttaccttttaaaatctcttgtaaaatcctgtttaaaacgtctgtttaaatccttttaaaataccttgtaagtctttcgttatgccacttacatatactttaaacgattgtaaatcaagttaaacatttttacaagcttttaacttgaatcttttaaaatatcttgtaagtcgtttactaaaattactatcaaactttacaagtaattttaatagtaattccaataatttatctttttaaaatattttgtaaaagcctgtttaaaacgtctttgaaaatccttttaaaacaccttgtaaatatttcgttatgccacttacatatacttttaacaattgtaaatcaagttaaacacttttacaagcttttaaaatcccttataaatcattttctgacattaacttattcttcttaaacgattgttaatcaagtaaaccccttttaaaagcttttaaaatcgcttgtaaatcatgctttaccactttattatccttaaaaaccgatagcaaaccatgtaaactcttgttaagttgtttgcaaggctttacaaatcctttaaaatgtcttataaatctttcgttatgcatataagctgtttatgcctataaaatcacttgtaaatcatgacaattcttataaaaccataaacagttgacaagagtaaagcattttgattagatttgacagtcataattaaaatacaagtacaatcatagattccaaataacaaaagtaaaataaacatgtttgaaataagtcagtctaaagaactaaatccatttttgccttagtagctctgtccttctctacctgcaaataaaattcaaactgtaagttatgttttgcataacaataatattcaagtttttaaaaatatatcgttatacaaaagaagagtttaacactaaccattattatcttgcagatttgttcagctaggtatttcacttttggatgagctcgagacagtttgtcaggatgaacgagtaacgttgctttctttaatgctaatttgtatttcttctcgtcccacatttcccaaatttcgactttttgccatttactgtcgggccaaagaatctgaaatgtaaaaattccaaaatgattagaattaaaatcttttgcagcaaaacaatgatgtaaattaacttacttcttcaagtgacgatagtagatctcttattaatttgtttttcgcccattttttaacttttaggtcaatttcttccattacttcctgactcaacatgaccggcgtcaaaggagtttgaactgatacaaaaacaaaaaaaaaaaatttagaagttgtttatcaaggcaaatcatctgtgaatgtaaaaagaacttacgactgctctgtccctgggtgatttcttcttcttgcgtagagagtggtgtttgattaacatcttcatcatctttcttggtctctcttggaacctgtaaacaaaaacatcaacacaaatttttattttttgacaattttatcatgtcttttaaaacaattaaggaatgcagacctctgttgtttcttctttttgaggttgtgattctttctctgtgggtgcagtcccattatcttcatcatctgacaaaattacatatgcttcttgatcttcagtctcatcatgttcatcatgttcttctacgttttcttcttttggaacctgtataccaaaacatcaaaacaaatttttattttttgacaattttatcatgtctttttaaacaattaaggaatgcatacctctgttgtttcttctttttgaggttgtgattctttctctgtgggtgcagtcccattatcttcattatctgacaaaattacatatgcttcttgatctgcagcatcattatattcattatgttcttctactttttcttcttttccttcttctctttccatttcttcatcgccttgtttgggattctcttgtttttctgtttcttcaacattgcaagtagaattttcatataccagttttaccttctcaccaaaggacattgatttcctttttctgctttgatgcacaactgtttcaattgcaggtttcaagacatgatcaattcttccttgatgtccttgttccacttgaatccatccctgacaccaatccttcttgctcattctatatcctttgatcacaagatcaaaaacatccaacagatccttgtcttcaggattcttctgtgaaaccaagtggtcgtattcatgagtatgaacaccaactattggtgtcacttcaacctgcaaagataaacaaaattccaaactgtgtaaaaataatgcacaattcttaattaaccttttaaaatccgttgtaaatagtttaaattgcttttaaccctttgtaaatccttaaaacttgattgtaaaaactattgtaaaacatactctttatttataaacagtgtttaaaacataaaaaaagccacaactaagaaaatgtaccttgtcaccatctgctatcattgttatagcttttgcacttggagacgatgttgatctccattggagaattaatggaatatttccactaaatgattcatctctagtgccaaacttttctcccaacttctgaaccgatgataatgcccatatctgaattgattgaacaaatccaaatagaccatattgtttcctgaacaaatagtcattaccgattctcttcacttcagttaccaaatatgagtacacaatctgcgcccatggatacttacaaaacttttcgaaatcagtagctctcttcagattctcaattggcagcatggtagtgggatttcgagctagcaatatgccctccactagtaacaaacccgccaatctcagtctctcctctggctgcatttttttggaacgcatttccaaaacatatgtaagatctaaaaaagtcatttccttgtcaatccacacattttttttctgctttcccttcaaagtctgattatcttttatccaccacttttctttcttctttctcttcacatttggactgcttcctgatgcatcatccattggaagtcctgttgttatgataaactctctcagggagaatcgcataggttgatcagcaaatacaaaccacaattcgtcattgttggttagtattcttctctggagtaaatgatgaacgatatggcttgaaaatgctaagtccatttaagcgaattccactataggacccaagaatgtgtccattaatgtgttgaactctatcggctctaaagctttcctgacagtcgagacaattttgaaggatgaatgctttgatacccttgtaatattatctacttcgctgcctggttggaacagtcttttaggaaagaacagtttctttgtactcatatttctcaaaacctgattaaatacattaacacagtcattaaattaacacagttttgaaatggttttaaaaaccatttttgtaaatctattatgcatttgtagttttcgaaacataaacatagtcattacaagtcgtttaaagaactttaaaaacccttgtaaaaccatttttcaaagtcattacaagtcgttttaagactttaaaaacccttgtaaaacacagtcattactccataatcctttttaaagaccgttttgaaaccattccaaaaacaaaattttaatccttttcaaagaacacagccgctgaaaatagaaacaaaaaaaaacccttttccaaaccaattccaatcaactggtaacccataaattaagtgaggatctataaattaaaacacaaacccaaacatcaatctatttactgttgaagtttcaaaacgaaaaaactttgaaattgctacaacagagaagttaatcggcatttgaaatcttctttgaaggtttttgaaactcaaatatcaaactttaaacataaatctatcaaaattatataacaatttccaacactccttcaaaatcccaaatatcaatctattttacttgtttcgttttcaaccgaaaaacctagaaatgctagaacaaaaaagagattcggcaaaaattgaacaaacccaaatggtaaacttcagtttcgtaaattagttaccttcaattgcttcctttttgctgtataatcagattttcttcacattgttgaaaggaagaagacgaagacgacagtttgtattcttcttttttttttttgttacttttttgttgtcttttcacggttcccttccttttttgtttttgggttatagtgaatttttgggctttagtgttttttgggcttttagtgtttttttactaaaacagtttgtttttctaaataacaggcctaggcccaattagtaacagatacagtgtttaacattactgtaactttttcaacggttgatattctcttttaaaaacggttctaaatcattttaaaaacggttgtaaatcttttcaaagtgactgaccctaattcggtgaagatgtcagaagccaattcctgtttaatttgtttttaggttatagtgaatttttgggttttagtgttttttgggcttttagtgtttttttactaaaacagtttgtttttctaagtaaccggcctaggcccaattagtaacagatacagtgtttaacattactgtaactttttcaacggttgatattctcttttaaaaacggttgtaaatcatttttaaaacgattgtaaatctttttataatagcagctactgcagctttttcaacacttttaaaacgcttttaaaacagcttataattcatttaaaaaccctgtttaaaagcatgtttaaagtccttttccattcaaatcaaagcacctgttaacccaaacaaccattatacagtaattttgtaaaataggagttaaactaaataaacttcataaatcttgttccatatagatgttcataaaatattcaattgacaaagtttataaatctatcttgtactccactactttttgattagaagtctgctacttctacaaagtgactgaccctaattcggtgaagatgtcagcagccaatccctgtttaatttgtttttacgttatagtgaattttgggctttagtgttttttgggcttttagtttttttttttactaaaacagtttgtttttctaaataacaggcctaggcccaattagtaacagatacagtgtttaacattactgtaactttttcaacggttgaaattctcttttaaaaacggttgtaaatcattttaaaaacggttgtaaatctttttataataacagttactgcagctttttcaacacttttaaaacgtttttaaaacagcttataaatcgtttgtaaatctcttttaaaacggttgtaaatcattttaaaaacgattataaatttttttcataataaccgctactgcagctttttcaacacttttaaaatccttataaagcagcttgtaaatcgtttaaaaaccctgtttaaaagcatgtttaaagtccttttccattcaaatcaaagcacctgttaacccaaacaaccattatacagtaattttgtaaaacaggagttgaactaaataaacttcataaatcttgttccatacagatgttcataaaatattcaaatgacaaagttttatgaaataagaaacaaaagctgataaatctatcgtatactccactactttttgattagaagtctgctacttctacaaagtgactgaccctaattcggtgtagatgtcagcagccaacttattcctaacgttttgaattatgttcccttcaaggtttgaatggctggtatacattgagtagcattccataaacttcagcatatagataccagactcttcatttctaggagcctacaaccaaaaaccaaaagaattacttaagaaaagaagttatagaagtcaggacttacggaatattcatttctaagactatgatatatttaaagaagttacctgaggaaaagtggtaaggactttgatgctaaatggagagacatccatgtcttcttttttgaggatgttccgaacaatgtatggcatagctatagagtaggcagcaacatattttttcttgacttcttctgttaaataagaagctgcatattcccatatacaaactgtcttctgttccaagtggatgagcaaggcaacccagcattttcctttgatacaaaaaggagccaatatgcacttggtttcttcctctattatcagcttactgatttcttcagactgaaactgaaatccctctttgttatccaaaaactccatgtatgactcatcaaccacatttaagaaagacgatccaacaaatacaactgatttgtttttgaataattctggattgctttccttcctcgttttcatcaactccaaagctgcatcaacatgctaaacacaacaaaaataaaaattatcatattagaaaacccctttaaaaacgattgtaaaaagtgcaaaccctttttaaaataccttgtaaatcattctacgcaacatacttatgctttttaacgattgtaaatcaagctaaacacttttaaaagcttttaaaatcccttgtaaatcattctatgtcactaagttctgcttctaaacgattgttaatcaattaaaccctttttaatagcttttaaaaaatcccttgtaaatcaatccttaccactttctaatccgttaaaaacgattgcaagtcatgtaaatcctttttaaaataccttgtaaatcattctttaccactttctaatcttttaaaattgtttataaaccatgtaaccctttttaaaatctctttgtaaataacttaatgatgctttaaaaactatatgtaattcatgggttaccaattttacaaggatttttagacataccgttgctgttattgctttccctggcgtctctagggttgtaaaccactttgtatctacaatatttcccgcgattgatagtggcctacaacaacaaaacagtcaacaatgatgcttcttccattattaaaaaaaactcactatcttactaacaaaactcacttttttttccttgacttcttccattcagccaatttctcaagtcttgtggcatcaactttcgcaaatggatgcaaaattggatgctttttcttctcagctgtgaaaggtgcttgggtatgaatggaaggaaacgtaccccgctaactctttctttgcggagcgggctgaaaatcatcattgtcgtcatcattatcagcgttatcaccatcattgccaataattttccttttcttactctgtaccaatcaaaaagaataaaaaaaacagatgtttaaaataccttgtaaacaaaattttcaaaatcataataaattagatactaacctctttccttgttggaacatcaacatcagcactatcaacttgtttctgcctctttctcggcacctagaatagtaaaaaacaccaattaaaagtacttttaaaatcccttgtaaatatcataacaagacaattgacaaattttaaaaacagtactgttgcaaatactaacctgttttcttgttttaagattatcctcagcatgaacacttggtttaactctcttgttctgaagttgcatgaaagataaacttttaaagatttgaaaaaaatattataaacacttggttagataatacaaattttttaaaatgctaacctcatttcttcctctgctagatctcttcttatccttttgaacatccaaactttcttcagacaaaatattgaaatttggtgtagaggatcgtggagtaggagacttatccttgaaaatataacagaatgtaaaattataaaaaggatactaatcatttttgtaagacttttagagatataaattactgtacttttgatgattcttcagctacttcatcaccaacatcacattgggtgttttcatcatcacccggatagctcccatactgtgtgtttggctctctgattgaatcttcaaatgattcattgtcattctgcaacaaaataaaaacaataagtcaatcattaatataattagtagacctttaaaatagcttgtaaagattttcaattacctctgcttttctttctagtcctccttcttcttcagcctgcgaaaaaaaagagtacattgtaaaggtttactacgtattttacctttaaaatacattgtaaaacctttcctttcaaatagcttttaaagaaacatttacaattacctctggttgtctttctactcctcatcttcttgttttctttcttcatcttcctcagatctctgattattcttttcctccattctaatgtccaaaatcctctcaatcagctcgactctcttgttaagatcttcaaggattgtcaaaatcctgtcaagcttctcgctattagatattttgttattgattttgttttgacctacttcttcaagggcagcacaaacatcaacacatcttgtattccattcagttttcttcaatctgtagcccatcttaacaagttccaaaacctgttggaattctgtgtcgtttgtgtggaaatcaggaactaaagacttgaagtcttctgggtttccaataattgtattcacctcaatctgcgaagatacaataacattacaaatcttgagaaagcagaacttcaaatctcaaaaccatttaaagaattctgtaaatagacaaaagcttacctcataaacatcatttacaaggtttacgatcttgaaaaactctggagtagtagtgcttttccacttcaatatcaatggatattcagattggaattccttatctttaactccaaatgctgcaccaaatgctggaactgcgctcaacacccatattgttagcgcgagtccaaatcctctcaaatcatatttctcttttgcccaagttttctcgtccattctcagaattgaatttgatagaacactgaatgcttctttaccccacggttgggctgtgtacatctcaaaatcagaagcatgccgcaatcttggcaaaggtatcttctcttttccatatggtgtcaagagaattccttcagtcaacactactgcagcaagacacaacttttcttcatcttcaacagcaggttcaccttccttaggttttaaaaacaatcgatcttcgagatcaccaagagtataagatcctttactagcccaaaagtatggttcttttacaggatctttcccctttcgtcgaagttccctatgaacaggttcacattgaattcctgtatgaacaaaagacagtgtagagactattattacaggttttatagtaaatactttaaaaacgattgtaaatcatgtttaacacttttaaaagcttttaaaatcccttataaatcattcaatgccacttacttatgctttaaaaacgattgtaaaccatgcagacacttttaaaatcccttgtaaatcattatatgacacttacttatgctttaaaaacgattgtaaatcatgtttaacctttctaaaagcttttaaaatctcttgtaagtcattctattcaacttacttatgcttaaaaaacgattgtaaatcatgtttaacccttagaaaaggttttaaaatcccttgtaaatattctatgccacttacttatgttttaaaatcgattgtaaactatgcaaacacttctaaaatcccttgtaaatcgttttaagacacttacttatgcttttaaaatcccttgtaaacgtgtttaacacttctttaagcttttaaaatcccttgtaaattattctatgctagttacttatgcctaaaaacggttgtaaaccatgcataccctttttaaaatcccttgtaaatcattatctgccactaacttatgcttcttaaacgattgttaatgaagtaaaccccttttaaaagcttttaaaatcccttgtaaattatctatgacacttacttatgttttaaaaacgattgtaaactacgcaaacagttatgcaaatgccttgtaaatcattctacgacagttaattaagctttaaaaacgattgtaaaactttattacctgttgtgagatagaactctctcaaggagaaacggataggttgagaatcaactctaaaccaaagagttgatccttttgttttcactctctgctgcatgagatagtgaaagatttttccagaaaatctgattcccttcttagccttcatttttggtcccaattcaactagaagaccaagaaacgaacttctaatcttctgaaataaacactcgcctaaagcttcctctactttactaactaaattccaatccgagtattgttgaacggttcccagtgcaatagattcttcaccttctatgtatatctgttcaggcaatgtaaggatttcactctctgaatccatctgcaaaacatgttatgaaacatcgtcagatctactataaaatcgactataaaatcgactataaaatcgattataaaaacggttaccgtcggatctatcgatatctctggggattgtttgcgtcgtagagaaatgatctgaatccttcagcgaatccttcggagaggaaattcgtcggcgattttggggtttctcagagagaaaattcgtcggcaattttgagtgaaatcggagaggaaattcgttggcgattttgagtgaaatcggagaggaaattcgtcggcgattttgagtcaaaacggagaggaaattcgccggcgattttgagtgaaatcggagaggaaaatcggagaggaaaacgaagaagtttgtgaaacgaatgtgaaacctaatcattcagtaagggtaagacagtcatttgccatattagaaggggtagttttaaaaatagccttcaggaaaaggcatttttacaaaaggttattagaataagggaaattttgcaaatctcccttcttatattgaagggagatttgcaaaaccaccttttttttactacccttttgcaacaatatcctttcatgttgtccatttttaaaaatactcattcccttgaacaaaatgaccaaattaccctcatctaatagaaaaaaggagttgaaaactgaacttttcccgccaattttttggcgccaaaagttttatttcccgccaaaaaaaaagtttccgccaaacttttttcccgccaaaaaaaaaaatattctcgccaaaaaaaaatttcccgccaatttttttttttcgtaacaaatttttctcaaccaaaaaaatgattttaaaaatccttgtaaatatttttttgcggcaaatagatttacaagagattttaaaagagttttaaaagatttacaagagattttaaaatcctttgaaaatctttgaaaacacttttaaaccctttaaaaatctttataaatcctttgtaaatcttttaaagccctttaaaatcccatggaaatattgtaaaactcttttaaaatcccttgtaaatattttaaaatcttttcaaaacaattttaaaccttttaaaaatctttaaaatacctttgtaaatcttttaaatccctataaaatctcttgtaaatcttttaaaacccttttaaaatcccttgtaaatctttttaaaaccttttaaaatcccttgtaaatcacccttttaaaatcccttgtaaatattataaaagccctttaaaatcccttgtaaatctatttcccgcaaaaaaaaaaaattggcgagaaaaatatttttgaaaacaaaatttggtgggaatttttttttcgaaactttttggcgggaatattcattttggaatattttaggtgaaaaaatattaatatttcattttgttaacctaaaacaatttccaaataagggtaaaatggtcattaaaaaattaaagagggtagaaataaaaatggataaaacaaaatggtaaagttgaaaaggggcatcatgaaaagggcatttgaaagaatttttctatattgaattggatattgttacttgtatttatgttttttgtttcatttttaaacgttgacaaaaccattaaattgaagttttgtagtatatttatttgtcgaaaatttattcccattaaatataatgttaaatttatttgtctttttagaaaaagttactttgtgattttgatttcctatataaagtttagatagcttcaattttcaaataacaaatacaaatcatttttcttaggatttgtttagtaaaataagaatatttcttgtacatttcaatcataagtacatatggctaaatttaactcttagatttctacgcgattcattgttgtagctttggtgtgtgcatttgttccagctttctcagtcgaagaagttgaagcaaatttattatggaatacttgtcttgttaaaatcactcctaagtgtgcgttagatataattgctgctgtcttcgaaaatggaacaatgtctgatctttgttgcaacgatctcgtcaaagaaggaaaagtgtgttacgatacgcttattaaatatattgtagataaacccatgttaattgctcacgaaacagaatacttgaagaagagtgatgacttgtcgaaacattgtgtctcaatctccaaaagtgcttgaaatgtatattgcgtgtactattttcacccaataaattgatatttttctgttatagttttcttcacacaagccttgatattttaacttaacaacatttttaaccaaagcgaatttctttctaaaaaagtaaaacttcaatttatgattatctatttgaactcgaaacaaaatttcttataaagagtcgaataataattcaaaatttaactattaagaggagctctaactaatattgtttagtgaactttaatttttgtattttatttctaattagagtaatatgttttcgtaattcaaaaaagttgacataattttttcaaagaatttatagaacttaatctgtataattcagaaaaattagtatacattctttatctttattctatctttcaatgacgttaaatcagtacctcacataaataaccaaaatgttatcaagtacaaatttttaatctttaatttcaatgcgaaaagaaaaacttgatgggtgagaaaaatttgaatatgatatctattaaatcctttatttttatgaattttcttacgaaaagtatgtattttctaatcgatctgttagttcacacatatcttaattagtgttaaaatatatctaatgattagtgataaagtatttaaatatcgatataggtgtctttaccatttaactttaatcctttgttaatgtaaaagtttaaaatattttgctttgattctacttattggtatatatttttaacatatcaatccaatgctactcttaaattatcatgtacttttcgatatatgttatgactcacttgttatgaaaagattgattttcaccaatattggttatttattaactaggagttttagctcttgtgcaattttaaatgatatgcttttaaatttggtctagttataatagttgtatctttaacataaatcttataataaaactatacttcatattcaaaaattattgattttctcttgtgaacttcatattagcctagagaaactttgaaaaccgttcaataaattttatgtcgaagaaaatttataaatatttattagccatttcgattaagactattgtgagcaaaagttgtttttatgagaaaataaataatatgtttaagataaaatgtgagttaggcttcttatattttaaaaattatataaatttatactaaaaatagttagaattttcaaattttaaatttatttggttaagaacataaatgtgccaatttgaaccttatacccactaaatattccgtgttagatatcgaaataaaagaaaattaaccattggtttcttatattgaattggatattgttacttgtattttaagtttttttgtttaattttgaaacgttgataaaaaaccattaaattgaagttttgtagtatatttatttatcgaagatttattaccattaaatataacgttaaatttatttgtctttttttaaaatgttactttgtgattttgatttcctatataaagttaagataacttcattttgcaaataacaaatacaaatcatttttcttacgatttgtttagtaaaataagaatattttttgtacatttcaatcataagtagatatggctaaatttaactctcagattactacgctattcattgttgtagctttggtgtgtgcatttgttccagctttctcagtcgaagaagctgaagcaaatttattatggaatacttgtcttgttaaaatcactcctaagtgtgcgttagatataattgttgctgtcttcgaaaatggaacaatgcctgatccttgttgcaacgatctcgttaaagaaggaaaagtgtgtcacgatacgcttattaaatatattgcagataaacccatgttaattgctcacgaaatagaatacttgaagaaaagtgatgacttgtggaaacattgtgtctcaatctccaaaagtgcttgaaatatatattgtgtgtactattttcatccaataaattgatatttttctgttatagttttcttcacactagcgtttatattttaactgaacaacaattttaaccaaagcgaatttctttcttaaaaagtataacttcaatttatgattatttatttgaactcgaaacaaaatttcttataaagagtcgaatgataattcaaaatttaactattaagaggagctctaaattgtattgtttaaagaactttaatttttgtgtctacattctaattagagtaatatatttttcaaaattcaacaaagttgattttttttttcaaagcatttatagaacttaatctaaataattcaggaaaattagtatacattctttattgttattctatatttcaatgatattaaatcagtacctcacacaaataaccaaaatgttttcaagaagatttagaaatttttaattttaatttcaattcaaaaaccaaaaagttgaagggtgagaaaaatttgaatatgatatctactaaatcctttatttttcttcggacaagtatgtattttttaatagatctgtaagttcacaaatatcttaattagtgttaaaatatatctaacgattagtgataaagtatttagatatcgatataggtgtctttaccatttaacttgaatcttttgttaatataaaattttaaaatattgtgctttgattctacttattggtatatatttttaacatatcaatccaatgccactcttaaattatcatgtacttttcgatatatgttatgactcacttgttatgaaaagatggattttcaccaattttggttatttattaactaggagttttagctcttttgctatttcaaatgatatgcttttaaaattggtctagttataatagttgtatctttaacataaagcttataacaaaactatacttgatattcaaaaattatttatttgctcttgtgaattttatataaggctagagaaactttgaaaaactttcaataaattgtatgtcgaataaacttttacaaacatttattagccatttcgattaagactattgtgagcaaattttttttttttatatataataaatactatgttttagatacaatgtgatttaggcttcttatatattaaaacttaaatacatttataatgaaaaatagttagaaatttaaatttatttggcttaagaacataaatatgccaatttgaaccttatacccactaaatattctatgttagatatcgaaataaaagaaaattaaccattggtttcttatattgaattggatattgttacttgtatttaagtttttttgtttaattttgaaacgttgataaaaacccttaaattgaagttttgtagtatatttatttatcgaaaatttattaccattaaatataacgttaaatttatttgtgttttttaaaaaaattactttgtgattttgatttcctatataaagtttagataacttcaattttcaaataacaaatacaaatcatttttcttaggatttatttagtaaaataagaatatttcttgtacatttcaatcataagtagatatggctaaatttaactctcagattactacgctattcattgttgtagctttggtgtgtgcatttgttccagctttctcagtcgaaaaagctgaagcaaatttattgtggaataattgtcttgttaaaatcactcctaagtgtgcgttagatataattgctgctgtcttcgaaaatggaacaatgtctgatccttgtttgcagagattacttagagatataagctactcatcgagtgtttgtagagattgattcagatcttaatacagtgaagagatcccttctttcccttaatctatttgcagtgtttatgttttcatactcaaatatgttgtttgcttcattcaatatgtttgagtaatctgcttgttaggaataaagtttctcattagggattcatatggtttagtagattgtcccatttgctaggttatttgtagaattcttcatctttaattctgtttaatgctagatctagagtaattaactagatcttgaatccagataatagatatgcccgttataggtatctgtagttggatctattatttgatgaacctggtttttaggtgtgtaataagaatcggcttagctactaaggtgaacaatcgaactcgttaagaatgcatatttaggttgataatttctcggtttctccggttattcttagctatagatatagggagtttcgcggaacgccaccggttattccataattagagtatgagtttaagaatgattcgataacaacctagctttcattagatctactaaccaatagtttcctgagaataccctgttcctacctcttttcctaatcgtttacaacacaatcaacctgttgttttcttactattttaatcatcacctgctagcttaatctcgatattcaactcactgtttgaacaaaaaaactccgtgaattcgatcctaaaatactgcaattgatctcttatttgagagagtatttctaggtaatttgaaccatatcattcatacagatggcaaagggaacccttttggccttggatcgcttatggagacactgaacaaaagaagaaggaaagagagttatgcgagctcttctacatcaactgttgcgcagcttcaagagcagctgcatctcaagatatttgaactagaggagcaaaatgcaaaacgtaatgaggagaaccaccaatctcaatctcggatagccagcttggagaagctcgtcctcttcatgaaagaaaaagatcctgagttggctgcttatttgtcaactgattctactgaacctgaaccagaaacacatccaaccaccacaactccatccacacttccaacccccacaaccaccgcaccagccatcatagttgcaggcaccacacccttagtctccacttcagctactatttcgaacacttcttctaaccattaaacttgatcttttgttgcttttgttgtttttgttgaaacttgtttaggagttgtatgactatgattttctgaatgtaaacataattagtgtcttattgttaacatgattagggattattggcttttgaatcgatattaatctggtttatcattccaaacataagaccaatttggtgactaaaccaaaacaatacatgtgactaatttgtgaccaaaccaattatataactatgaccactttgtgaccaaacttgttcaaaatatgtgacaataatgtaactattttgcgactacattgtaatgtatgtacctaagtgtacatcgttgcagtttagtcgcatatctgccacatcttgatatcgtcacaaatcagtcgcttatttacgactaactctttgtgtccaaaatttgtcgcttataagcgaccaatttgggactgaaatattttgcgacggttttttagcgaccgtttaatatcatcgttaagtagtcgtaaacacctagtttgcgaccattttgggaccaatatggaagttgcaaatggcaggttttcttgtagtaatatgcatatatactacaaaaaaaaatgaatattcttacgaaaaaattgcgaccattttttcgtcagaaaattgtgaccatatacatacaaaactgtgacatatttatttgctcataaaaacgttactatttcgttatagtgttataaaaacgctcctttctcaaagttaaaaatgttttggtaattatatattttctttcgtgttaatttctcgtaaaaaaatttctgctatttcacttttgtttattgtttcttttataggaagcaaacaatgaagacttctcttttattggtgtgatgaagaaaacacatcagaagcttgatggctcgtacgttgatcaacgagcacggttggttgcagacacttataaaaagcatatacaagaacgcttgggtcaacttgaatcttcttgggaagagaatctgacagctgaaactcttgacgaacactcaaggtaataattctaaacattaggctggttttacattcactttaggcttgttagtctctggttttacatttatttgttcatgtgatgtgtgtagtctaaactatcgttttagataactagtagtgttttttgtttttactaatatatatggtctttcattctaggctgctggatcatctaaacagggtcatatatttggacttggagcactaatggagactctaccatctgttggtgtttcttcaagtgcaccacaagcttatgaagaagtagagacgataacgcatcgactacaagggatggaaactgatcttaaaaagagcctttaagagaatttgcaaattcagaaaagacttgaagctattgaaaaacttgttgattctcttgcaagtcaaaatgtctagatccaaaaccaccaccaagaccgtccacttaatttagtttatgtatggtttcttttagcctaagtgttgtttagtttgtattttctttaagttgtgtttttagtttgactttatttggattttacttttttgtttggatgttatcgtttgttttatttgtattagtctaagtattgtatttagtttatttggatgttgttttatgatttctgaaaattatggtttctattagtttaagtattgtatttcgtttatttggatgttgtttaatctgataacgtcactttataaagaaaatagtgattgcaattagtaaaaacaaaaaatggtttcatacgtttgtgaccaaacgtccatgtgttttttacatttcttgtttgtaacaaactgatgtgaattcagtaagaaaaaaggtcacaaaataaaatcaatttgtgacgtttatgtgactataatcgagtcactaattgtgacggatttatgattatatattggtcgtaaaatgtaacgggacaatgacttaaatattataataatctgtgacaagtatgttacgattttattgtcactagttgtggcatagttgtgacaatatcgtctgtcacgaattgtgtccgtttttgcgattatattaacgttgtcacaatcagtgatgaattgttactattgttaatcgtcacattcgtttgtgacctttttgagaccttcattgatttgtgacgattttattgtgacatttgaaattcgtctcagtttcgtcacaaaagaattattgtgaccgaaattttttctattgtgacgataataatcgtatcaatattcagtttttattgtagtataccttccacaacatgtacaaataacaattgacatccttatagagttcttccggactagctttaaaatcacaaatagcttatttttttcctttcaacgcgatggagtattaaatcttgaggaactcgaatttctatttgtctaagaaaagtatcatggagaaaagctgataataattatggggtgtatttcctcttcatgctgcttgtactacttttacttaaccgagtgtaactatgcatatttttgtaccttcaaattgagtaaatctctgtatttcgtattcttgcagctcgcaaacgccaagaacaccattctttagaatattttaggacatactgctgcttatacgacttttttataacataaccaaaactgttaacaaatgtgcatctatccaccacttcgtgcaatgccgcccagtttggaaattctttacgcaaacttaaacctatactgtcttcccattcctttttaaactgactatgttctacaacaggttgcacctcaacatattcatcatccctatcagatatatccataccttcatccacacgttcatcacgagatacatttttagccacctaaatatcaacgacatccactatctgattttatcctcatctgaatgcagttccgcataattcttactaacaaaacttttgtcctctctagataaaggctcgggcaatttagacttagatatgacctccccaatcaaaacacttctacggttattttcaacggacgctacaataaacttgaacatccttgtcattacagatattcatctcttcctctggtcccaacaacattgcattgtaactcatttgcaatttaaccttactctcatctaatccaagcttcatgtatatcctagcttctaatatggagagagtaatcctctcctttgatgtcttcatcatcaaactatagatgcgacattcgtatttgaaatatatgatcacgttctctttcattgtatcctaccaaacaaaaaacaaaacaactatgtcagtattactagttttactaattctactacagtttatagttatactagtagatctaaaagtagtacttatatcagtaatactagtaacactagtcatactactactatcctgccaagaccaatgacttcaattgtaactagttctactttcgcgataagaacataattttgattcgggtccaaatctacaattcaagacgaatcaatatgtgaaatccatttgttactcattagcagaacaaatcgattctaaagctatgcttaaactttcaatgtgggtactaaaacaaaaaacacaaatctaattggatttaatctcaattgaatcactaaaatttgtcaatccaaaaagagcgaatttgaagctctatgcagctagagaaatatacctaaactttcaaggtcgacgcagcttggcgaagggaacgaaacgacaacaatgcagctcaacgtaggagatgtcatcaatggagctcgagttcgaacatggcgtctttttttttctgggtttgaattcttttttttttttttttttttcaataaactattttcatattttcaaataaacaaaagataaatttgtcactgcatatttcatttatagagaggagggatacatagactctaaaaagatttaaaagattttgtgttgtcaaaaagggacttaagagatcatttctccctattcaaagacttttgtcacaaaataaagtttcaggaggccgtgtcactctttgattcaatggcctacatgggattcaaacctaagattgtcatatgcaacattgtgactaatggtgtttgcaaaaacagagatctggataacactagattgctttttcatttttttataaatgattttattttgcttttcgttattaaaactatctaaatttaaagacgtttaatataaatggtttagtaactgtttaaatagtctttttattgggtttagttcaaaaaccgattaaaccaagtttatggagaaataagttccgaactatcgatttggggagatataagttgggaaatttagtttccgggaggggggggggagggataatggcctatttggtacgttgtaatactttttgtggagaaatatactatgttgtttttctatttcttcactaaagtttttacttttttattctctggattttttttctgtttttatttccttcacgttgtccccatgaaaaaaacaattattttttccacacaaattaattttgagtgaagtttctagctactctcaacagcatttctcttgatatttgatagttctactcttttttttatcttgatcaagaattggaagaaaaatgctcagtggtaatggttcgatccatatcgaacaataatatgattaataaaattacaatttctttttaaatcaaatgagctttttctaaaattctatattttattccaaaatcaaataattttttttccaggaattgattaattgcttaacccatacaagagcaaattgaggagaaagatgagaagatgatgaagagaaaagatagttgagcaatggaggaagaagaagttgttctatgaagaagaagaggaagtgttgtgaagaagaagaattatgactttagtcacaattggattaagaggctattggggtagaagataagtaaagcccaaatagaagttggtttgttttgtttaatagaaagttgaagcaccagtgatgtagattggagagaagaagcgtctaatgtattgagcttatatttttctaatttgttttttttggcccatctctaacttaacctccctttatataataaacgtaaaagttaaattaaaacctaataaaaaacgagataaaaggtattgttatcgtaattatgatttttttttccaaaataaaaaactagaagaaatagtaattaatgtgtatctacatatatatttttgcagccattttgtgaaataaatcctatagttggaacttatttacaataggtgccactggattttaatgtttgtttttgataattagaaaaaaatcttcaaattaaatatttgacatttaacaatcttccctaaatctctccacattaactacacgattagttactaaaataaaacttccaaaatatttaatatcatttaattactacaaaataaatggtttttttacgggacggattggtgggacgggtttgacaggacgttacttaataacaattgtaaactataaaataaaaatattttatagatagatacaatttgcaaactttatgtatactaactttagaaaataaattgtttccgcggtgtaccgcgggttaaaatctagttttgtaatacaaccgtagtttgttgtttccaaaatgttgttcgcattgtgtataatgatagcttattgtctaattgttgtgatctgcttcttttttcatgtttttatttttacttttgagttatacatatagattaacatatatgtcaatgttttttaacccgactcgcacgatgaaccggactactttcgtgatcaccggttcattgagtcaatccagttcgatgacgggtcaatttcttaaagttttttttaatgttacagagattatatagtttttatatataaaagatatatcatatttaacaaagtaatatatttaacaataataataaagtgattaattttttaagtccaactaaagtataaagccgtaacaaatatgaaaatagtggagatcaccgatgacataaataaactaataaaacatcgcggatttaaaacaacgaatctcgattttctctctcatcatttcattcactcttaaggcgggattgtgaagtcttcatcaatttaaaacatcaaatgagtatatgaactagaaaaagttataaaaataatataatatagtctaaaatcttttattttagactttttttccgagatatcctatgtatttttttttttcttcattaaagtttctaattttctatcctcttggtttttgttctgttttcattttcttcccgttgtctccatgaatttttttttactttttcctcataaattaattttaagctgtgttctaaaaagcggtttaggcggcactacgctcttaagtgactcgtagacaaccgctttgaccgcctaaatttgcataagttccggtttactgtattgttttttatttttaactatataaaactttcttataagtcttaactcaatatatattctttgatatgaatttaactaatttttgtttatgatttaacattttaatttttctaatagatagttatatataatttattatctataatattatattcaatatgtattatattataaacttttaaactgtataaaatcgtctaaactcctattaagcattgtaggcgttaggcgctatgttaccgcctgcctagcgttttcttcgacactgattttaagtaacatttcgagctagtctcattaacgcctctatttatatttgataattttactaattcatttttttatcttgatttgaaagaaaaatgttcagtggtaatatgattagtaaaattataaaaaaatttctttcttttattaaatacaaaagttcttaaaacgtgcagacttgaagatctccacaaacctccaaaagtctattcaaatggcagagacagttgaatccatcatcatcatcatcatcgtcttctccaaatgatctttcaatctcattctcatcatcttcttctctatcaatcctcatcttcctcctccttcttcttcctcccaaagctcatcaccaaacctcctctctccctctcatttacctctctttcctcaatgctcccttctctctctctctccaccgccaaccgccacctctccgtcaccgacaccatccctcttcccaactccaactccaacgccacccctcctctccgtatcgccatcatcggattcggaaactacggccaattccttgccgaaaccctaatttctcaaggccacattctcttcgctcactcccgatccgatcactcctccgccgctcgccgtctcggtgtctcatacttcaccgatcttcacgatctctgcgaacgtcatcctgacgtagtccttctctgtacttcaatcctctccatagagaatattctcaaaacgttgccgtttcagagactccgtcgcaacactctcttcgttgatgttctctccgttaaagagtttgctaaaactcttctccttcaatacttacctgaagatttcgatattctttgtacacatccaatgtttggtcctcagagtgtgagttcaaatcatggctggagaggattaagatttgtgtatgataaagttaggattggggaagagagattgagagtctcaaggtgtgagagttttcttgagatttttgttagagaaggatgtgagatggtggagatgagtgttactgatcatgataagtttgctgctgaatcacagtttataactcatactcttggtaggcttttggggatgttgaagttgatatcgacgccgattaatacgaaagggtacgaggcgttgcttgatttagctgagaatatttgtggggatagttttgatttgtattatgggttgtttgtgtataataacaactctttggaggtgttagagaggattgatttggctttcgaggctttgcgtaaggagctttttagtcggcttcacggtgttgtgaggaagcagtcttttgaaggtgaagcaaagaaagttcatgtttttccaaattgtggtgaaaatgatgcttctttggatatgatgaggtatgtagttagttagttagttacattgtgtggtttgatgcattttggatttggtttcttattgtaaatagttatcgatttgtgatcttgcaggtcagaagatgttgttgtgaagtatgaatataactcccaggtgtctggtagtgttaatgacggttcgaggctcaagattggtatcgtcgggtttggaaattttggacagtttctaggtaaaaccatggtcaagcagggtcacactgtgttagcttattccagaagtgactacactgatgaagcagcaaagctcggtgtttcgtatttttcagatcttgatgatctatttgaagagcatcctgaagttattattctctgtacgtcaatcctttcgactgaaaaagttctcgagtcactaccgtttcagagactgaagagaagcacactttttgtggatgtactctcagtaaaagagttcccgaggaatttatttcttcaaactctcccacaagattttgatattttgtgcacgcatcctatgtttgggccagagagtggtaaaaatggatggaacaatcttgcctttgtgtttgataaggttaggattggaatggatgatagaagaaaatcgaggtgtaacagttttcttgatatttttgcccgtgaaggatgtcgtatggtggagatgtcgtgtgctgaacatgattggcatgctgctggatcacagtttatcacacacacagtgggaaggcttctggagaagctgagcttggaatctactcctatagataccaaaggttatgagacattgctaaaactggtggagaatactgctggtgacagctttgatctgtactatggactatttttatacaatcctaatgcaatggaacagcttgagaggtttcatgtggcttttgaatcattgaagacacagctctttggacgactacattctcaacattctcatgagctagctaaatcatcttccccaaagacaactaagctattaactagctaaagttaatattctctcagtcatgctccttgactactaattatactgttctactcaatactcaatatggtggaaatcgtttggtctttgaaaggctttgatgtaagtttctttctttctttgtagctttatttgacccttttgtgggtttgttgtgtcttttgtcctcgatacgggcttcacagtcccaaccagtttgaatgttaaacagaaataaagtgcagacaagattttgagtttggaaattgtttcacttattttatttggttcaaatactttgaactcacagctttcaatgcttataggtttatgaaagaaaggtacgcttctttatttttctctaatcaaataactgaatgaaggaactgtcttaagttccatatgcagctaccttaagcacatgcaggtacaacaacattccgcatatgcacaaacacaatggaatatggagctattgttattggctctgttgaatttatatgtatcggctctataggaggtaaatcacccatcgaattaacctgaagagcatttccgttgagtagcatagtctgactgtgtaggtttccatcctttgctgtcaaatggtactcttctctttggattactccattaggacccccaaaaagttgggaacttgctcttttataagacttcatgtgctttgtatgtctcagactgaaactgttatttaactctactttcgctacaaccgttgtagtattgtcaaggttcatcagtaaaactgtgatccctttctgcatgatgaaactttaaaagttagatcggaattcatctgagtataatgctatttgagttacttgtatggaaactcgacttaccgattgtcttgcacaatgggtgtacgaacgtatctttttggttccggaaaaggttgtgaacaatgcctttcttcccataagttgtcgccagatcagagcactgcatgttaacaagtagcatgacttgtagttagggttatatactccttttattgcttgtctttttaaccatttctcctggtgacataatagattcatctgatgttacctgtaatagtctggatttggtgtgaagttagtagtatttagcagcccatagtttcctccgatcagagactgtctacagtatgtttttgtatcataaagcgatgccataccaagctggtccaggtacctaccatcacacagtttaatctcattagaaatgcttttaatgtattacttatgataaccttagtttttgctgtcatgatatctactcttaccagaaactatacacgaaagcattagagacaagattccgcccactgttgtaggcaccaccggactcaccaacccatgccacagcctttgttgaggagtttttgattatgttcttgagactgcgaaaactttttgcctcttggtccagatatgaagggtttagaatcttttctatcagatgttcatcgactcctaatcaatcaaaatattgttttctttccattcaggtaagggaaatgatgaacctgcaggatctgaaacgaaagatagttgagtattcgggttacctggaccgagatcgtagatatgtcgagtagtagcattgagagagttttctgctttgttcaggtattctgtgaaccaatcaacttcaaagaagccacccggacctatcaccaacggcatgggactcacattcttgtaaacccggttcacaatgtttcgcagatttatggtgtctatagcatattgatttgcaccaactcgtgcaccaacaccacttccacacagctcattgcctattgagaaaagaagcaaaaccagcttggagatgagtagagaattcaatcaggcttatgcattctttgttatgttgtaaagtgacttaccgagctcccacccgtcgatggtgtaattgttctctgctgtaaaccggatgaacgattcagcattggtgtaattccaggctcctatggcttcaccgttagattttatggaacgtccagaaagtgcattcagcccgaagatgactttagttctgattcaaacgacaagtaggtaaggacagagacagagagaagaaaagaaagaagataatttgaagatatctttagctctgattcaaaccacaagtaagtaagaaaagagacagagagaagaaaagtaagaagagaatttgaagatgactttagctccgactcaaaccacaagtagataaggaaagagacagatagaagagaatttgaaggtacccggttttgcgaaagaaggcattgagctcgtcccatcgacgcataggtagacatccttgtgtgtaaccaaaaagaattgaagagtttttggtaaaaggaagacatggttgcttcgaatctggtgtctcatatatcactatgtcttgtaatgttcctcctattcttattttcaacggagcaaatgctgtgtttttggaaattggaacaacaatggtcaaatcctaacattaaccaatataaatcaagaatcatgtgattacctttgattgcattttgaagaataacgttgttcaaatcctgcaagatgatcgaccaaatttttcattagatttcatatttctctaatcaactcttcgaataaattacttcatattaacatgaccaaattttgtttgtaatctattgttaaaatggcatatgatgacaaaacaaaggaatacttttacttgccgaatcttgatttttgactttcacattccataaatggtaaaaatgattttttttttttatctctacattttctacaattagtaaattctatttgcttaatgaagagtagtagtacctaagaaatctttcaatggattcctgctacctaaccaacccgaaataaatacacaaccttttttattttggttctatcaaaaatgcaagttgcattgttttcgacggaaaaacatgaaaatgaaacaaaatttgatcaaaaaaaaaaaaaaaaaaaaagaaaaaacaaaccagattgagaattgaagcatggtcccaactacaactgccgtagtcacatttctccggtggccaccagtctaaggtggcgcaaatgaagtcttcatctattgttccaacggcggctcttccgtacacaaacacagtcccattctcttctacggcggagctaacagtgcagtccaagaattgaaacacacaaagaaacaaaactatggccaaaatttgacgataagccattgtttctctcttctttcttcttatttattagaaaaatgagatctcatttggtgtttatataatatatggaaatggaagagagacacacattccaaaaaaagtgaaattgttttctttttttttcacttgtttgagttgttacttgacctttaataaaaagtgttgtacatctctttacctgcacaacttctatatattattgtttttgtttttttctttgaaagaaacttttatataatatacatttatatggttattaatttattttttggtcaacttttcttaattctcattatatatctccttataaggattttttttgaaaattcaaattttggtaatataaaataaaaaaatgtctttaaaaaataatatactataatttctatatatattaaaatatttaaatatgtagcaaatttcagtaatgatcactaaattagaataaagctatctatcaagaacgtgatctaggtaaaaagtctctcgtggatacttataattgttaggagaattgtcagttgttgagacttgagtatttcatgaaagtatttgctatccaagtgtttatattgtcatgaataattttattatgcatgtaataaactaataatataagaaataacaagacagaaaaaatcacttataaatgattaggaaaaaacccaaaaaacacggtctaatttaaatttccccgtttaatatctgaattatgaaatttgtccgaaaatatctaagttaatttttatgtcttttaaaaacttttgttttttaaattttggcaaaattagatatctgaattaacgaccgtaacggaatcactagctgtagttaaaacttaaccatatggtgtttactatatatacaatttcttttttaattgttacgaatatattgtcgtagtcaggtggttatgtgagagttcaataaattggtattaaatggacaaatttaaattagacgatggttttttttgggggtttttcccctaaattataaaaaaagtataacaaattatataatatagatgaagctattttatttttaatttcgtaagttatatacactaacgaacttaggtagcaatttgtgggggtgggccggggcaggtgcacaaccatgagcagaattaggtagtcaatgctccggttagttattcctctatagatatatatcttagcttcgaaacttaaaaacaaagttattggaatacttattcaactcgatatcatatagttagtaaacatcagtagcaacgcatatggacaaatgtcacctattttttatataacagaaagataaaaacacaactgactataacaataatataacatatatttcaaaattcttggtttttttagataatgattatcttgatttgcaattagaatctccaattgtttaacatgagcatattaggtgaacgaaaacaaagttgttgatactgacactagactggttagatttcatgtacgtggtgttctagttttttagaatacctatacattgaacaaattgtattgaaacataattaagaactcagaataatagaatatcaaaactagtgaagatacatggcttttgtattgaaacgtaattaagaactcagaagactattcaacgacatcctttcaattattagtaactaacaaacaaaaaactatgtttatcttgtgacatggtgttgacgtgaacggtatagctttgtagaaaatatgcaggtcattaatgttggtgaaataaatccttctgtttagctaatggatcagatcgatcgataccatatcaccaacagactagtatatcgtcattcactaccatatatcatcaaccatcaccgaataatggaggacactaatcaacctcataattttaaatgcaatgtgcacttatgctgacaaaaaggtccatgatcttatgcatcaattccttaaggctttggaaaggtttgaagtaaaaaaaaactatgagaatcttaacaaatttgaaagcaagttcaggttaaactttgaagcttttgaatggatttggctttgaaaacccttcttaacacccaggcccgtctctgacccatggcagagtagggcaaatgccatgggtccattacaaaattcaaaaaaattcttaaagaaaaaaggtccatttttatttcaaaaaaaaattactaagaggtcttagatttattttggattttaccaaaggcttataaatatattgagacgggcctcttaacacctaagacttaggaaaagtttgaagtaaaaaaacctatgaggatcttaacaaatctgaaagcaagttcaggagaaagtttgaagcttttgaacggatcgacttccaacaacgaaaccaaaaggaagatattcaagagaaaaatatcaaaatcatcaatgtgatgtatctctcgaagctatagaaagaattttcaaatgagatatcaagatgttacggttctgcagtatgcgatgaatatgctctctccgtacgacaggagaccacgatgaacggttctgtatacaatattttggaacctcaggtaagcttcaccggtaaactgcaagaaattacattatctaggataaaatttcgtacattatgtaaaagcctttaaacccttaattgttttgaaatatataatatgtattttacatattttggatttatttcatttgtatctgttaaattcaaaaggaaaatatttatttcagttttcttaagaatacgtttctgtttttataaataaaagatttccatttatttatttttctttattgactagttacattttttttactataaatgctcttttttatggaaaataatgaatctttctttttccaattttatatttaaagaaatatatttaaaatatataccataggtaatattaaatttttcattggacattacattcaaaaactctaaatttactgtattcaaagttaattttctttatttatatacttcttttgttgctctatatcgcatatttaaataaattaaagcctcatcatgtatttctcttatgaaaataacttccaattttatataattaagattctgtaaataactattttgatactttttatttttgaaatatgaagcaaaaaaaaaaaaaagatgataataaataaaaaatctttaggattgcttagaaatgataacttcggagctatgcttaaggactgattcttctgctttcctttttgcattcttctttatttgaatcagtttcatcctatagaaaaaagcaagaacttaattatcttagtttcatcctaattttagccttatactactaatagtctcaataaaattgactcacctcttgaaagagataattttctctatctcttgcttttgttcagccttaaaggctaaccattttcataagtacttaaatcatccaatgttcctaaatctgtgcattcataaagaccaagcttaaaatacttaacatattctcattaaaaacgtaaacaataagttagtaaatttcacaccttaaagcaaaaactttgctttttctctaaaccacatcagtttctagagaacaagaccattgtcatccaatatgattgggtcagttctaacagtttcacatgttttcatctctacaaacatatttctttaagttaatccttcatagcaacatgaaacagaaaaggataacataacaactgtaagaccattgatataaaaatttcaagggatttaaacttacttctagatgcaatcctttttgcctccagcatctcgtcatgagcttctttatctttagtttttaattgagataaaatttctttgtgctcttcaatagataatagagctccggtattttttcatatggattttggcaatatgactttgcatcgtctttctcagttgttttttcctacaaaaataaggtttaacacatagaattgatattaaaaaaaacttgcagatttttttaaaataccatttttttgcatttgcagacttttttgcttctattttcattgtcttacactctgcatgtttgttcttactgaataattacaggtctttgtctttcagtgcaagtagcaacaattggttcaataatattggagatttgctgttgaagtcaggagttttgagtgattcccacttgaaatctttgaaggaggtgttgcaaagtataaagagatagatgcatgaagaagactcaaacttctaaacttcttatgtgtgaatcacttagcacattgtatgtaaataactattttgtttaaatttataatttgctacgacttaaaacctatgtttgaaagatttcagggccatgaggatcttaacaacccttggaacaggacaagccatctctaacttcgctttcatttgaccatgagaagtgtcgttgtggttctcaactcttctttgcaatcaggaatgacatgttgcttttacgatgcaagcagaataaatgccgagatgtcctgtggtccgagaaagactatctattttgcggaatgtgtgtgtcctaagtgtaacagaccaacaaacctgctgttagtcttcagaaagaaatcctggcaaactctactataagtgtcacccatgcagtttctttaaatggtggcacagatccttgcaaatgatgggttatataacaaggattcaaaagcatgtttttgtgaatcagctcttcttgattccaaatgacaaaactcttgttgcttttgcccaatgagatgattgaatccgttgaggatcatccaccaacgcatagagacacggtcgtagaatttaaacatcttataaaaatatttttctaagttctttgggaaaccaggactttatattaaacatcttataaaatattacaaaagcttataaacttttttataaatggcttataaaagctcttatgagcttttaaacatcttataaaaatattattaaagcttagaaacatcttataaaaacattatcaaagattaaaattataaaaagcatatataaagtcaataaaaacttataaaagcttataaacatctcataaaatgtattatactagatacggacctgcggtacaccgcaggttgagcatttgcgtttgatcgtaatatgatggtttcattataatataattgacagttaaatcattatagttaatttgcattttttactatatatttatatctattgacatgggtgattatatttgtatgtttcggtctggttttgtaaagttccacaaacatgtataatattctatttatatacatcggatattattacatgtaaattcatatgattcaattggtttaaaatttaatttttggattgtaactgtaattatcattaaaattacatgggtgctctattgttatatgaagtatatgatgtatttaaatttctacaataatttaatttttatactaaatatttattatataatacttagatttttttttcttgtatacagatgaagagataaagagtggaactcatcatctccatctaaggttagatactaagaactcttataatgcataggtatattttttgaaaatatgaacttagttattgttatataaaatagccggatatttaaaattttcaactaatcattttgaaactgttaaacacttgattcttatatgcttaaagaaaatactaacttgcagattaaaataggaaaaagattaaactgaaaccatctcttccaaaatgaacacaatttatgatcattcttacaaacaatagttcaaaagataaaaccaatatcaacttaagaatgaacaatttgattgttaaaagcagtgtaaattgcttatacaaatccttcttcagacgaatctgactctaggattagtccttagcaacatactcaatcctcccttcaacagacccatctggttcacctgcaaaaaaattgttgtaacaaaaatagaaaaagatgtcaaacttcttgaaaaagttagtatctaataaacaaaaacaaattatctaatgtcttttacatacatgtaacatgttacatcaaagtctggaaacgattcctcaatgaagacccttaaacacccatactcgctgattaaggccttagatcctataatatttgttatcattctgttgattagttatatatcacaggatttaacattttaaggtaagagactaacatattaacgaatttccactaacctttaaacatagaggttctacagaaccggagcactgtagtgattggctcgtagttgtaacttttcataccaataagtcaataaaactttgacagaaaagactcacacgcactccctctagcaacacaagttatgatcctctcactacaaccaaagaaaatacaaatttatcatactacacatatatgtctgttcctaacgaatttcaataccattatacatccatgattgttaactcactgattatctctgatggtaaatattacatatctggcctcatagtctgtttccacttcacgacagcaatatggaaaactcgacatagttgagacagttgttataactccaatagcatctaacaataacagaacaataaatcagaattaatcaaaatcttagtactaaggaataacaattccaagaaaccatatactatataattaagacttatattaccgactacatgatcctcagattcagcattgacttcatcagcatggatgaatttgagagaactttcttctgctctatcacttacaggccacattttagtgtgccacataaactcgatttcataatgaaaatctgtgtactttggtattgttgttgctctcttcaatcgaaagtgttgaaggtaataccactttccttcaaataggttagtcttaaaattgttcatatactcgccccaaggtattctagcatcgattttgtttccctgactaaaaagagaaccatataaaattctttggaaaataatagaaagcaaaaaccagaataacaattcaaatatacatcatagatactcaccttcacatcacagaggatcatggtagtaggagttggtttgatcatagactgattgtcccagatgcttaatattttcacgtatataacatgattgttcctgtgtaaatttagatctgggatataatttctctcggccattggaagtttggatcttaattttaacagattttttagaaaagatagattgagggaagttaacctaatattggtcttatatatatatatatattgaagaagcacgaggaaatatgaatatagattcagtgaatataaatgaaaggtttcttgctatatatccgttcaaatcatttagtcaatctctaattatatgctaaccgattctgtagccaatcaccatatattaaagtctttttgctaatgattgctgatatgttaagtagataatgacaataaagtatttggattcaacaagaatataaataatggttgattagtaccaaaacacaggttagtaccaaaacttctaaatggagaactgaacatataagtctgctttggtgtgaacatcaaagttgaacatatgagaacatgattaaaagtgtagagaaataaaaacaatttgaaatagaggttcacttgtagtaattttaaatcagtatctaaccggaacatgttgaattgttgcttctttgtttgcttcagcagaataatgtaaataatcctgtgacattacagatcaaatactacttgtttgttactgtgtgggggggtttaacaaccataaatgaaagtatataaagtgaataaaggttgatgaagaatacctttctcaaatgcttggaacatagactggcagcaatgtaattagtctatgttttggaaaacttccttgaaaacaacgttggttgtttgcttctgaagtttaccatctttgtctagtattaggaatttcaaaccctttttagaggtaaccctagacaaagcaacataaagctgaccatgggagaacactgctttgggcaagtaaagtcctacatgttctagagattgaccttgactcgtatttatagtcatagcgaatgcaacagagagtggaaactgtcttctacgcatcttgaatggaagtttagtgtctgtaggtgtaagattcactgtaggaatcaaaactatgtgaccaattatgtctcctgtaataactttagcttcaacaatctgagtacatagctgcgtaatctgaagcctagtgccattgcatagaccacctttaggatccaaatttcgtagtaacataacaggagcactgacctttaaacgcaaagaatggttaggcaaacctgctaacttgatactgtttaaaaaatctggagtgataacaggattgttaagtgaattagaatctgtaggatctatggaatcagcagatagataaattctttcctcggctgaaaaaaaaaacaaattgaatgtatgtcagttgtatattcaataaaaaaatagattgcatataaagattataaactttaaactgaagagtaaaagtgcactgaccatgcaactgctctagcaaatactcattgattgtgtttacgtcctcattcgttggtgctaatatagctctgccttgaaagaatttgggatcagtgatttcgtgtaggattttaggatctccataaatttcattggtgatcgattctattggcttgtctgtgttggtaatcaacaaatcttctggaatatctattatagccacaccgtcattaggctcatttatcctaccatcaccaacaaccaataaccaatcagaaaactcttgaattttttagcttcagtttcactcaaattgtttgctagtagtctcatgttcttagtcaactttaacaccttgcagtgatcccaaagatacgaagcattaagcgatgacattactatttctgctctccctgcaccattaattactagaagcacctgtctgaaatcaccacaaaaaacaacaacctttccaccaaaaaccttgttgtctgtgttttttataatgtgggagaaagatttatctaaagcttcaaaacaaaacctgctcatcattggtgcttcatcccatataactaaagacgcttctttaaccaaatttgccaaatcagactttggttttatcttacatacagagaactcatcaggattcaatgaaataccaaaccttgaatgtgcagtccgaccaccttctaacaacaaagaggcaatgccactggaggcgacgttaagaacaatctgatctctacatctaatagcagcagacaaagttttccaaataaaagtcttccctatacctccaaaaccgtacacaaaaaaagactccacctaaattattaaaaactgcctctgtaatctcattgtatacgcctctctgctcaggagttagcatttgtttccattcttcatgcttctcttttaggttggattcacgattatatcttaactcctcaacaatgagtctatttgaattatcaataccatctctagtaggcttaggaaactcatcaatatcttctaaggttgctccatttgacagcataattttctcgaaagaaacatatctggcctcatagtcggtctcacccttattgcagacataaggaaacctcttgatagaagaaacgcttgcaaccacaccaatagcatctatgaaaacaaaaaatcaaaagctagttattgtctgcagcagagtactcaaatataaactcatgaaatgatctaaagaattaggatcgttataaacataccagtaacatcaacaacattgtctgtagcagagtcctcaagttcattggggaaaagatagtctgtgaaatcagatttcactaactctgacattctgaacactacagtataatgaaactttaacttattgatacaagtatacactaaagtcattcattaaaagtctgaagccagtcgaatacatatatacaacatgaaatggtaagtttctttggaccctctaactgtaacgttataactgagattgcatgttttcatatagatggctacaaaattagtaatgatcgaacatataagcttaatagaataattttaagattaactccaaaattaaagatgaaacataatccaaaacatgaaatccaataactttgaaaaaaaaacacgaacataatccaataaaaaaaaaaaaaaaattcaaaacatagcttcagtgaccaaacacaattcaagaagcatcacttattaaaagaaatagataagtagatcacttgttcttctccactttgacccttacagcagccatgttcctagccatctctttcttgacttcttgtttcaccacgacagtagctgggacaagtgcttggtcattctctgtttcaacaggaaccattgatgttttgagtttagttggaacagtaacttcttttgaatcagccacctgcagattcaaggcaactccatgttcagcattcttagataaagacttttccaagtctaatggtacaacacacaccttctttgaacttgaagaaccttccgagccactcgtttctctagcgtaaacacgctttgaagatggagtcgtagagtctggcgatccattaccattctccagcataagtagaacctacaatatatagagttagaaattgccaaaactcttatgaactttatgattgtaatgaagaatgtaacttgatatgttgtgtgaaatacctgatcactagacacaatggatgcagggttcacatgttcagcagaatcctctagtaactgtttctctagtagtccatctttcagaagcacctttgaaaccttatagatttcttttccatccgagatgttgtctttctcaacccacaccagaaacagaaatgtcttaccaatcagattctttacagaatcaggaagatcttctggatcctcaatctggaagagtgtaaatagttatttgagttctctatatatttatatgtcagtatacataaagtagacacgggacaactttaagaaacatacctcattaacagatccattaagaacagaggttgcagactcgccaatgatctcaaagcaaattgaatcaaacagaaccaatttggcttcactagtgctatccataacctttgcatagatcatgtaccttgcatataataaaattttacgaacttaatttccaagctatacacacagttccaataaaatatttcaaagtagtatgctatgtaaatataatcttcaaagaaatgtatttacctagagaccacattggttacaacagacttgcaggtgtcacaccagaatttaggcttcttacccttgttgtttactccattaacaccagcatgaatatgattcactttcttattacatgtcttgcagctgatgtaataccaagcccaatccgtatcaattgcatagattgtgcacaaaactctgactttaccaacctatataaaatatcagaacacattagatactgatgatagttagatttctaaactttgagataagttagctgaatataacctcagtcgagctaagcagatcttcaatggtattccttgtgtatacactgtagtcaatccttttgactgcaaccatctcaaaacgtgggactcttgtacggtacacacaaatagcaccatcatttggaagtctgcatttggataaaaagatgatcaatagcacataaagaagtcaactaaaagtagattgtgttgagagtagatgcatttacgtttgactgaaatggtgagcttcagggaagtctggattgacatgtacttgtgatgcatcaaatgagttggataaactcttcacaccagcagtctcataacatttaagtgaccatagatcatgcagtatggaaagaaaaggaataggtacaaagaaactgaatatacccttgtaactcttaattttggcaaaacgaatgagaaaaatcacattctttccctcagattcctgacatgctctgtaaacctgctgagcgtatgttccccacaaagtaacttgcattctctcatccctatgagaacaaatgaatcgaaacaaacactttctttgataaccaataaacaaataagatcgcaataaactaataagatatagacattacatttgatctctgatctcaaagtcaatctttgttgtaggcttattgttagcctcgagttcctccaactcaccaacagtaatgatttggccaatagcatctgcagtgaaacatgactgtgttcataatctaatgatagcaagtgaatggaataaagcaaaaatataatatagaatcggaaaactcaccaaccaacatgtgagggttaagctcaccactctggatttttgaaaatggcgccaaagtcaagaagttggagtcagagacagaagcacaacccatgacttcagttctaacctggaacgccatcttgtatagatggttggttgggcgaaactggctagacgcataggtaagacgaaaaatctcaatgaagacccattcgccaacaataagcttgtgaacaaacttagaaaccaactccttcttcacggtagcatgcatttttttcccttatgacaaagacaacagaaatctatattagcacttgtgtatatgtaaacgtaaattttgcatagataacagtagttcttacatattcatcagagatgaccaactcaatggtttcacaggtgttgcttgtgtactgcttccaagagtgaagaatcttgacctggactctccatgcgtttttgtaaggcctcacgtctttaaggtatgcgaatgtagcagccatttctcaaaatgtataattgctttgatctctcgtttgcggtgtgagtgatgatgaaatgaaatgatatgagaagcgtatttatagtagccgagtgaatctttaaacatttatttgcaaagatttagagcgtaaattctttagaaacataatgattctgaatggtttagaataggaatatgcttgagtatcataagtgcaaaataataatcgaaatgccgtatttagattttgatttgattctgaatcaaactgtcgagatatggtagatgcatttgcccttatttttacgcttgtacattcaaaacagaatgatttggatggtttagaagatggaatattgcgtgatttagattatgtcttgactggcaagcgaatgttaaaagattttgtagttaaggtgatatatgtaaatcaggaaacagaattgctatgaatgaggaatggagaaaatagatgattgaatcggatagaattttgggaaggcaataatccataacaatttggataatattatagttggcgaaatttaattttcgaggtgatatattggaatttggaattgatgatgatttttagaatgtgtaaaaatatattgactataccatatgtaagattatatgatatattgaggaattaatgcatgattaataatcgtttaacttatagaaatgtgatatcgaaatatgaatatttggtaagagtgtagtaaatatttcaagattttggaatgaagtaagtaaagatatggttagttatttggttgttcggattttttaggaaatattatttcgtgtaatattgaattagtagagtttcaagggattaatgtgtgcaatttatgagggtagtacttaacaatttatatgtttaggcaagtaattagtgcaatacgtgaatagttgagcaaaaatttggttattgtcctaaagaaatatcttgtctgattgattttgtagggactaaacatacaatatcgaaattgaaaaaggatttttcggcacaaatcgtccccaaaaaagtatatgcagataataaaagcttataaaatacaaacatcttataaaaagcttataaacatctgataaaagacatcttatagacatattataaaagcttataaacatcttataaaaaacatatatacatccgataaaatatttataacatctcataaaagcttataaccatctattaaaaatattaaggtttataaaacttattaagtaatacaaaagcacttctttacatctaataaaaaaatcttatgttattaaattttatcataaaaaggttatatgagaaaatcttataaacatcttataaaagcttataaacatttgttttgatcctgccattcttataagcttttataacgcttcttctaaaaaaaaactatgggtctatttttctactaatcaacagcgagtttgagagtattattcctctagatgcgaagctttatttttccaaataattttttttttgttccgcgttacgttcctagatggaataaacttttttacaagttaatgtaattcgattttctgagactaaagaagtttgttactttgttttccaccttagtaagcttaagttaggcttttgttctaccttagtcacatttggcacttctattaaacacaccaacaaagaactaagaccaaattacaaaataaaatcgaatttgttttgcaattggtttggtttaaaaatgttttcaagcgaactaaacaaaatcgaaccgaagtaaaattttaaagagactttagcaaaattatgggaaacttttgttcttcgaagacttcattgtgcattccactccttatacaagtaaccactcactaggacctgcacattgcaagtcgataacttgttttagagtttcatcatctccgcaataacttcagacacatcatggactctgagttgtgtaggagcattctcttctatatagatctttatatccttcaaacatgaaaaatagtataagaaatgctttatcatgtgcatctctttcattgttccttgaaattcatcaatctctaacacttttactggacaagatgtgagtgaacgacctttgtcctctcgagaaacgcagtcacaagcatccccacatttatttgtaacatggtgcaagagaccctaaaagcataaaggaaacaataatcagttgtgctataatctaagaactctatctctgttcacgtttggcaaatgagtttattacaagataaggattgagctgagctagagagaaaacttgttaagatttttgattcttatttcttaaagagtaaagtgtacaacaatttccttatatacaattgttctaacttaaccagtcaattaaagtctattctaactaaaccggatggtatatatactccaagagtccccctcaagatgaggcaaaaatattatgaagactcatcttggacataaggtaagagaactgatgcggaaataatggtttagtcaagatgtctgcaacctgatcctctgtccgaacatgcaacattctgatgagacctttatccaagcgttctcgaactaaatggcaatcgatctcgatgtgcttcgttcgctcatgaaaaacagggttggtagcgatgtaaattgcagcggtactatcagagaagactatggggactgaccctgtgatgatcttcaagtctaagagtaaagaagcaagccataccatttcacaggaagccaaggctaatgctcgatactctgcttcagcagaagatcttgaaacagtgggctgtttcttggacctccacgtgatcaaagaagaaccaaggaacatagttaaccctgtagttgaacgacgagtgtcaggacaggttccccaatcagagtctgcaaagcctttaagggtaaggtcaggatcagaagagtagaaaagtccctgtccaactgtacccttaatatattgtaaaactttgtagactgtagtcagatgtgaagtccgtggagcagctgagtattgacaaagcttgttcacagcgaaagtaatatcaggccttgttatagtgagatacatcagcttccccaccagactgcgataaaactcacgatcctccaacaattctccatcagcctttgaaagtttcagatttggaaccatgggaatagtagaaggcttgcaatccaacattccagtgaaagcaagaagttccaaagcatacttacgttgacaaatggatatgcctgcagcagtcctagcaatttccagacccaaaaagtacttcaaagggccaaggtcacgaagcttgaaactctccttcagagcattggttaactgagctgcaacaccctctattgtgctagcaataacaatgtcgtctacatagaccaagacagcaagaaactcaccaccaaagcagcgaacaaacaaagtgtgatctccatgtcctttaataaaacccaaatccaacagacaattagaaaatttcaagaaccattgacgagatgcttgtttgagaccataaatcgttttcttgagtcttaacacaacattctttggcaattggtcccccttattgtctgcataaccttcaggtaaacgcatatatatatcctcctccaaatctccattcaaaaacgcattagaaacatcaagttgagtcaaaaaccacttcttagatgcagaaatcttaagcaacattttaatagtagccatttttgcaaccggagagaaggtgtcagtataatccaaaccttctttctgagtgtaccccttagcaaccagcctagccttatgccgctcaagactcccatcagcatgaaacttcagagtaaaaatccacttacaacccactgccttctttcctttaggtaaacttgtaacctcccaagtgtctttctcttccgtcgcaccaattttcgtatcaatagcatcacaccactctttagaatcctttgcctcagaatatgattgaggaattggaattttagtgatgttattaatgtataacaagtgagagggagagatttttgagtaggagatgaaagaagaaatgggatgagtgacttcattgtttaaagaatagcaatgatagtcatttaagtgagcaggaagtttgcgtgctcgatgggaagaaatttgtgttgatggagaaatttgtgatggagagggagaaatggaattgggattacctcagggcaaagaatccattggtgtgacaagggatggagagtcagcagagtgtggtgatgccattggaaagactgtctcatgaaaggtaacatttctggaaatgaagactttattgctttccaaatccatgatcttgtaccctttgtagctagacggttaacccagaaagatgcatgcccgagctctaggctgaaacttgtgacgttgagtaggagaagtagaaccataacatagacatccaaaggtgcgaatctgctcataatcaggtttcttacctgtaagaacctcaaatggagttttattagaaagcaattgagatggtgttctattaataagaaacacagctgtcaatatgcagtctccccaataaggtaaagcaaccttggattgaaacatcaaagctctagcaacgttgagtatatgttgatgtttcctttcaaccactgagttctgttcaggtgtctcaggacatgaatgataagaaactatccctttagccttgtaaaactcagtaaatttcaattcctgtgcattatcagatcgaactgccttaactttgacgttgtactgattctctacacgggtgacaaaagccggaaacacactaagaacctcagatttagtcttgagtaagtaaacccaggtagctcgtgaatgatcatcaacaatggtcaaaaaatatttaaaaccatcaatagtctccactgaaatgggtccccaaaggtctatatgtaataactcaaaagttgaattacaaatattgtttgaagactgaaaagacaacttcttctgcttagccaaatgacaaatgtgacaataagcagatcctttattcttgtgtttagtagtcctcaaaatgtctgaaatagcatccagtcttgagtaagctggatgtcccatcctcatgtgccataaactaacatccaccaccgcattaacagagactgaatccaatggaggtgtagtatccaacacatagaggttgccaatgcgtctacctctgccaattctcaggtccttggtaagatcctgtatttcacaacatgacggatcaaagatcactcttgaaccaatatctgaagtcaaactactgatgctgatcagattcaaacgaaactcagggagaaataaaacatttcgaagaagaatgttttcatttatctgtactgaacccactccactgattttaacacgtgatcctgttgggagattcacataactcaccacagaatgatccaaagaaacaaataggctcttatcatggcaaacatgatgagttgcaccagagtctatcacccaagtttcagtggaaagagtatgttgggatacattcaatataccaacaaagtagtatgtagagttagagaatgagataccagtgtaatcaataggagaacgtgaaattccagcatctgaagaagaagcagttggttgtgacttcagttgagaactgaacaaggctatgaagttctgaagttgatcattggagagattaccaagcagaccatctagagtagcctgagttggaaccatcggaggcaataaagagacctgagcagcaaccggttgaggtttggtacccttctctggtagtttgcctttaaaaccaggagggtaaccatgctttttgtaacatttctctgcaatatgtcccaccttgttgcagaatgaacagattggacgccctttattaggtccattctgaacatagcaaatcttaggagtcaaagcagtagaagatatcttagagacctgaaaagcagcaggaggagaaacattggtagagaaacctttctgactgtaatcctggtcaagaatattgtaaacttcaaccagagaaggcaaggctttctttgcaatgatctgtctcctgactatagagtaggactcattcaaacctgccaagaatttgacagttttagctctctctgccttctgttgcagacgaagaactttaccacaagtacaaggatcatcaggttcctctgtactgtccaacaaatcccaaagaatacgcaactgagtatagtactcagatagagaaagagaaccctggcgaaaatcctggatctcctgtgtcagattgtacgtacgaggaagattagtcatatgaaaacgtccataaatgtcacgccagatatctgtagcatcattcatgcgtagaatgctacgataaatctgcggagacacagagttcaacaaccatgatttcaccatactattacatctggaccaaaggcgaaagttcccatccgattcaagtggacgaggcaaagaaccatcaacaaaaccaatcttattcttagcatctaacgagatccgcaacgctgcactccaatcatcatagttagtctcatctaagcggatagagacgagattcaaacctggatgatcaccactgtgcataaaaaacggagactgagtcggatccatggaatctgaagtcacaacagctcgcgatgcgccagcagagagcagatctacagctggaggagagatcggaggagagactgtgagaccagtggatcgcgacgatttccatggaacggagcttatcgacgcctttgaacgagtggatttccgagttactcgagcaacagccaccatctttacagaaaaacgagtagtgaacaagaaaaaaacgagatcggagaagaagaaatctgatcggaaacaacaaaaacttagctcgttggctctgataccatattacaagataaggattgagctgagctagggagaaaacttgttaagattttcgattcttatttcttaaagagtaaagtgtacaacaatttccttatatacaattggtctaacttaaccagtcaattaaaccggagaataatctattctaactaaatcggatggtatatatactccaagagagttgttattatacctcaagagcgtaaaggtttagaacgaacacaagattcttgagctgcgaaggctgaatgaagaggtggacaaagagattgctctgagtaagtcatgtgcagcgaagattgttcaacagcttgaaaatgtgaagcatcacagttgcagataagtaagttgttgtctcagagataggcaagcaaagaaaatggtgtaacttgaaggtgctgagaaagtgactgcagaaaaagagagcacaaagagttaacggcgattccattatctgcaacattaaacaaagataaaaaaaagaagaaattttcacagaagtggacgaaaaaagatttgccctcaccgtttgtcaaagtgagaactggttttcacggtttctcttttcattcaatttcggaccaaattaccctgggaaaacttaataatggcacaaaccaaaccgtgcaacagttcgtatcggttcagttgacggcgtaaaccaaaccctacagcagttggttttggtttagttgatgcggttcagttttgaaaaagacaaaaaaaaaaaaaactgaaacgaagaaacccgagaaaacgaaaaagagaagagagtaacggagagatttgagagagaatcagaaagcgaaacgaaattcagtatccattgcttcaaaattcgacataacttcgaattgttgggtagttgaattgagccactgaactcccacatccggggaagtgaaagttactgtttttcccggcgaagccaagagaaagttactttttattccggcgaaatttgaacctccggcgagatagcatctttagctatggctgggaataaagctaacgacgaagtcccgaggaagcagcatggtcaaaggaaggagaagcgggtattaagagtttccccgcggagaaaacgctctgcaacaaaggcaacggaggaactgggttagaatctctaatttaccgtttgttgtctttgggtgtatcagaattgtaaagcttgtttgattaaagggttagaacttgtcggaatttagcatatctttaggatgaaaaattgagaagtagaattggaaatctctgtttccgccaaaaatatgattttgagttataatctggaaaatgtctgtgtacgtacactacttcggtttgcttaacagtatatgacttttagttgcaggtagtccaagtgttgctccgactgaagatcttacagttgaagagttaccaccaagactctttgctctacaccggtacccttccgagacgaagatgaacgcgtactctaaaccggagtacatttctgacatagaaaatgtactaaaggggaaaccagagatgcagtttcttctcgattctccatttggggaactttttaaaataccccaaaacaaggcatctttcaatgctaagctt

SEQ ID NO: 757 - DNA, 81414 bp, Arabidopsis thaliana
gatcagcagttagcccatcattcactatgacaggataagtagagtttagtccaagaaaaacgtaccttagcccttttggtagcggtttcaaatctactttgggtgccttgagttcagaccagtcatcggatactaagttggcttcagaggggttgttgtggtcgagtagctcggtcgagtacacagaatgggctgttggtcaagtgatgaggtcgagtatatattcctcccttgctctttcacccaaatcttcatactctcctggattctcaactgctttgtgttcatctaacagcttttggtaccccaaaatctccaaatttaaatctccttccttgctatcctttgttagagcactctgtagatgatctgtttctcccagctcttctagcatttcgtcagctaacatatccatctcttcaatccagaaaatatttctttctatcgtaggcttcttcatggtgttggtgatatcgaaggtcatcttgagatctctcccgaggttaagatcaatttttcccttcttaacatcaatgatagctccaactgtaactaaaaatggtcttcccaatatcaaagggtctttgggttcttcatccatttctaaaaccacaaagtctgtcggtacttcgaccatgcctatcatgactggtaagtcctccagcagaccatggggaatcctaacagatctgtcagctaggatcaaggatatattgcagggcttgtacttgttgaagcccagtttctttgccacagagagaggcatgagactcacagatgcacctagatcacagaggcacttgttgaaggctaaagggcctagagcgcaaggtaaggtgaaggaaccaggatctcctagtttttttggaatgatcttctgctgaatgatcgcactgcattcgtgacttagcaccaccattccttggacttctttgatcctctctgtaatcatgtctttcacatatttgttagagtctggtataagtgcaagacagtcgacaagaggcatcgtgacttcaagatttttcaattgtttctccaggagagctttgtacttctgtatcatgaccttcttgaatcgaccaggaaatgggagtgggggcttgtaaggtgggggaacgaagacgttgtctttggttttggtggcagctggtttttcaacaagaggagatgctgcaggagctagtagtcgagtaggttggtcgagtataggctcttctattgctttttcagcggaatttccattttgacagaaatcctccccatcttgatccacactgtcctcagtgttctggttcgggctctcttttgtgggtaattctttaccgcttctaagtgtgatagcatgagcgtactcctctgaatttgacattgattttctggaaggtcctgtaaatttgggtgctgcggtcgacccagtttggccttctatgtatctaatcttagatgtcagtgcttcaaccttgatattgatatcattgtaactgcagtcaaccttgttgtgaatttctgccatccttttggacagatccattgctcctgttgcttgcccttgtagaatctgctgtaacatgttcttcaggtctgaatctggagttgttgaagctggttgttgttgctgctgtgtgaacccaggtggtggaagttgcggctgatagttgccctgatactgctgcttaggaacatacccttgaccttggttgtatggaacaaagggcctgggttgattctgctgctgtgaagggtaaacttggtcctgcgggtttgcaacgtttgtacttctgtaagacagattgggatggttctgcttgaagttgttgaaacctttgttgtaacctccttggttctgcacataactgacctcttctgactgcatagtctccccatcctgaacttggaacgtctcatcatcacccagaaaatgaatgtgcttctgttgcacaagcagtagcttgtccagtttgtcattcatggctttcatttccctgcggtgcttctcatcagaatcagagctggtgcggacgcttctatcataatcttcattatagttgccatccgactgagctaagttctctaccagctcccatccgtcttcaacgtctttgttgagaaagttcccgttagaagcggtatctagaagcatcctgatctttgggaggacacctctgtagagagtgctgagaagcgaagctttggagaaaccatgatgaggacattgcgtctgataacctttgaagcgctcccatgcttcacagaaagtctcattattcgtctgagtgaaaccggagatatcattccttagtctcgcagtcctggagtttgagaaaaacttagccaagaaggctttcttgcagtcattccaggaggtgatagagccttgaagaagcgacttttcccactgatgggctttgtctccaagagagaaaggaaacaatctgagcttgaagccatcctcactgactccattgatctttgttaggctgcagagcctatcaaactcgtccaggtgatcgagtggatcctccatagggaggccgtggaacttgttgctctgaaccatggcaatgagaccgctcttgatctcaaagttgttgttctgcacaggtggaggcacgatgccattacgctgattgtggttgcgtggtgcatcgcctgcacctatgttgtttggttgcacctgctcatcaacaactgcagccattgtgtctgtttctgtctgtgttctgagttggcgtgcaatacggtcgatgttatcgttgaacaggagattctgatttcctcgtgaccgtgtttgcatacaacgagtaccaactggtgaagctagtgattcgtagtacctgaatcaaaacagacaaacagaaataacacaaagttagtaactttcagaaaaaatgaaaaagaacttgatcttaaatattctgaaatctcgaatatagcaaacaaacacccaattggcaacggcgccaaattgataataagtttttagtcaattattcctaaaacaccaatcatgttgttgtactattttaggtgtcaatccaaatgggtgtgatgcaaacagatgagatgtgatcagaagtcactaagtcaagccaagcaataacagttttggggtttctaacagtcctaagcgaacatgcagaaaacagaagcaataacagaattactaaaatcactcgaccacaacaggctgatgccagaagtaggatgtggtcgagtaacaggtcaagtaatagacaggatatgaaacagctatactcgactgcacagtctgttgccagacactgggtgtggtcgagtaagttggtcgagtgattgtaaaaactaagaaacaggcaatgagaacgattaagcgataacgataaaacagagaaataagatagacgagaaattcctaaggatggggtaatcgagtagagtggtgtcctagcctattcgaatggttaacaagcgcaatcaagctatccctagacaacaggttcaacaacagaccaattcactcccgtgatagaaatcctcaagcaaagctagcccagactaattcccattaacggaatctaactatgcaggcaatacgaacagactgataaagtcaataaacgctctaaacggccaatcccttgggatagagacgcatatctcaggaactagtggatcaagcattccatcgaacaccttctgggtgcgggaatgcttgggatcgaattccagttgatcagaaagaaataagcagtaaacgcaactagtcctaaagggattcaatcaattctgaaacttaaccattctacagactacagattccacaactactctatcccatccctaagaattctaagtcactactcagacaacatgctcaaagacataaacgcagataaacgataatattgcataagtaaagagataaagagtagagaaacaagatgactaatgaaatcaaacgcggaatctcaataacttggaaaaatcgcgaactacaggttgtagaagcaaaagcggcgcagcagagtaaaactaaaaataaaactgaagcaaaaacgcaatgtcgactagatgtctcaggacagaaccctaaaacatctatttataccaaacgaaataaaatgatagtagacgggccaataacctaatcgcccggcccatagagtgataatgggccgagatgggcttcgtgatccgatggaggtccaggccgcttccaaacactttgtcttctcctcttctcttccttgtgctcagcttgtctggttgagtgcggatttgagtagactgtgaagaagtgatcgagtgtccggtcgagtgatggtgatggtggtgagtgatgatactcgaccatggggtcgagtaacgtggtagagtgaatggtcgagtgtagtcaggtggtgtggcgaagtgagactcgaccagggggtcgagtaatgtcatcgagtggcctgagctgaggttactcgacctggtggtcgagtggatgggaagaatggctccaaagtcactcgtcctgggggtcgagtatgtcttctggttctggctcgtttcttccaatttgctcgcaaacagctccaaatcacctgaaaacaactcagaaatgcaatatgcatgcaaagctatcctaatcatgcaaagtatgcaagaatgatgagaaatgatataaaacagtgatgaatgatacgaaactggactcaaaacgatgatgaatggacactgaaaacatgcaaattatagacatatcagaacctgctatggaaaaacagaaatctgaaatggattgtgataaagaagagaatgctgaggattgttttggagagcttgtgcctgagaggtttattgttgaaatgaggaggtctttcaaggagctggaagaccaaatgtatcaaatgcatgaagatatgaaagactttgtccgtgaccagatacgtgctgcccttgatccaaaaggcaaaaggccagaacaaaccataccttcccatgattcgcgggaaccacctacttctatggataaggcaccggttactgggaagaagccatcgagaaggatgtctacaaaaggaagcactgaaacgagaaagtcttcaaggctgactcgtgtttctcatgatgtggacactcctgcactttctgttggctgtaattccaaagaggaagatttggatgtccctggagtacataccactgctgtcgaaggaagaagaaaaccgtcaaagccgaagaaaaatgtttcttttgctgttgacactactgagctacctgattccaataaggaagatatgcaaggattcattgatgaacaggtaagtcatgtacgtacattgctaaatattttataatccatatgtataactatactgcctgcttcgatacagtatggcgctaataatgaaagtgattttactgcaaatgatagattagattcttcggccgctgaagaagagatattagacactggatttttaatagttccttatgctggatccacacaatcccatctggtatgtcgtctactaatactcttcacaatctgtttaaatggtgtacgtacatattcgcttaaaaagttagttaaactatgtttcaggatagaggaaatgttgttgtttgtaagactgtcttcttaggttcaatgtctgggactgtctatgttacacaggaagagagacctgtggaagaagctactgttgacaccgagatggaaaagttccatctaatgagtctgcaagagtttcagaggtagatcttctggtaatcgttatatacagatttccatgactatatgcatatatattacattaatttctccacttatctaacgcttaactctatggtagcctatctttcaggataatggaccaaaggatgttgctgaacctggcttagttggtacccatacaggggccgatgaaatagctgatgcagacatagagatggtagacaatccatcaggtttaccttcaacatctgcacaggtatgtgttagtcacttgttctttttccatatgtgtacgcccataagactttgaaaattatttttgtttcaggaagaagcaagagatgccagtgcatcgactgaagctaatggcaacgagtcagaagaaacttatgagccttctgatggagatatagctcacatacctggcacaagtgtacgtacatttttgtcactatgttctgtgtacatatatattgtttcatacattactaaaaagtttctttccgatgataaattctacaggttgaggcggcaggagaatccaaattagtgacagggatggaagttgaaatacctgagaagactcacagtgatcccccgtcaccatttcaagtagttaacaatgtaagctaactctagcaacaaataaaatgtactatttactgttcaaatgtataaaatttatattatgcaggtcatacgggagttggataccaaagccgttggtgatttggctgcagctactgatgtggaggtaacaatttgtgtgtttcaattcctattctcggaatagcatatgtgtacattatatagacttgtgtacgttaacttgcacaggtagtcatggaagagccgggtattgtcaaggggtctgtaggaactgaggatcctaacccagggtcagacacatctacttaccaagcgggtgggcgacttcaagaagtgttttaataagaacgggttcaaatggggtaaattactgtccgacattgctaatggagtacacataaaccgtgaacccaatatgaagtggctgaaggatgtcgatgttgtgtatgctccgatgaactggaagagtgaacattgggttgctttgggaatcaaccttaatgaacggctaataactgtgtatgacgctttaatatcgcacacgcgggagtcggctgtgaaggcgagaatgactacaggagattgcgggccatacacgatgaagttcttggagttgcttgcgtttggacaccctttttcgaaattgacaaccattcgagaagcagatatggtcttctaccgtcagaaatactcggttgacatctacgagcacggcaagcgggaggccggtactatgcacttgctttaatcgtccaagaacaatattctcgttctttgcaactaattattatgaacaaacctatcttagatatatgattgcaactacatttaatttggagattgtcagaagttaatttagtatattctatcatattgtcgtacacatcgttcacttttaattatataatgtaaatgtgtacgtacatatctatatgtctcgtacactgcatattaactttataacataactcaagtgataaattgatttgacagcgaacgcttaccaacacaagtatgacattcatttcaaccgtaattgccccaaccaaattcacagtagtggttattaaagtgaagaaattactgacgatctctgactatctcatttcaaacatggttaacccgactcttcccgacgatttatcctcgaagatagctaagaacctggctgaccaatgctggtccgaccttggtccactggtacgatcaggcactcgtggaagagacattgtctaccgtccggatgtcttcaaagatgccaatattctcaccttgtgtaactcgcccgatgacttccaagctggagggggccacaatccctccggatccgctgatgaaggccgacatcgaccatttttcttacggtgttttgcagctaataatcccacgaccgtgtattacgaaggtattcgtgttataacgcatgaacgaaacatcaatggagccatcaggctcttacagcgtcatgctccagtatgagcaaatgcaacacttgcatgcgccattgtattcatatgtgctgggtatgattatatgggcggcttgtttctacagctcttcacctgcaaccattatccattggactcggttgccactcgagttttgggtgatgagttcatcgaggaaataaagaagtttgaccctccatacagcaatacatatggtcctacgttctcttatcctaccagccatggaattagtatgcctccttgcgccttatattgttacatggtattaggagctttccaaaacgtttgcaaccgctgttacctttggtcgtgtgttagacgtgttagtcaaatgctatagttattccattatactttattgtttgtttatgttatccgctatgtcatgtttcaaattatgataaggcttctactatgttgtttatgtttatgttgaaattatattattgcttaagaaatttgcaaggtgtgttatgtttctcaagttgaatatttttcagccaaattcgcatatgatatttagttcccgcagtaaatgtaaatttggatattaaaatctaagcgtccacaactacgtacacgtgcatctaccaaataatacttaaaggtttttggtttgtctcgtaaaactagatatggacgtacgctagcatgagatatcaactctaacgtacactaaaaaataacacatgcaaacatatgaggtctttagtttgtctcataaatggtgatatttatgaatggacgtacactgatagtacactacagcgtacactgtttgttgggtaaatgtagaaatataaatgtggacgtacactaaaacgtacactgtttgttgggcaaatgtagaaatgtaaatgtggacgtacactaaaacgtacactaagacgtacacgtctagttttaagctgttattaaaaagaggttgctcataacaacaataacaaattatatatggaatactattacgttgatttgacaatatgaatacacatcatctcttaatacctttgcaataaatacaaccataacttacccaaccatatcttcaatgatgcttatttaagtgttggaatttcattttgttgaaatatcttactcctaaatatgccaaacccaaatattcctgatgatttgcttgcgaggatagccaagaaaatggctgacaaatgttggtggtacctcggacctatgttgaaatccggtcctcgtggaagagacattgtctaccgtccggatgtcctcaaagatgcaaacattttcagcatgtgcgacgatcccgacgacttctacgcggcaggccacgatccaaatgacatcaactccgaagatcactatagacccttcttcaaacggtgcttacaagctggtaaccgcacgactatttaccatgaaggactgcgtctcgttacacatgagtctgacattcagggagctatcctacacttagagcgaattgccccaaggaacgccgctgcaacctttacatgcgcaattctttacatatgtgctggtaatgctcacatgggtggtgtctaccttcggctctttggaagcaaccactatgctttggaatcggaggaggcacgtgacatttgtgaggaggtgctagaagatataaagaaatatggtaatactttaaaatacacatacgctaacggtttttcgtacccggaatgtggtgacgtaagcactcctaaatgcgcggagatgtgttacatgagatcaagactcttcaataatctttgcaaccaatgttacatctggttgtgtgctaaacggattagccagatcctgtagagctcacattcgccacgatcctgtcatatttataagttttccatgcaacaatatgtgagctttttacgttgattatcagtaatggaagtttgtttttaataattaccactttgtaattgattcaaacatactagctcaaactactctaatatgagacatcattaacacaaaataataataaaataataaaatatctacgtacacgatatatgataatgtacacgtggcatagtttaattccaactataaagattacatagtgagggacgatatagtttgtaaatgaagacgaaaggaaatttgatttgacgtcgtataacccatatctagaagatttcgctccatattaattacttgctgtcaaatacactctagaagtgacctctatcacactctcattaatatctctattagacgtaaacggttcccgagcaacgtactcaattgatttggcagataaaataagtaagttaatgtttatttgaaaagattgttagtaaatgcgttgacccctaatatagcactatacatgaagccatattgttccacttatatgcaatacaaacagacgtcatctcaaccttctgtcaaaaaacgtaatgagtattttatagacgtacacggcgcgattatgagaggtacacaatagtttgtttaatttaaaagttactaatatgatgcactaaatatacatccacgtcacccacccacttacattgatgcttattctcctctttaaaactcatgtcaaacacacttagttgaatacacaaatccgtctaaacctcctcgtttgaaaaacaatgcctttcctacctccgctaacccctccaaccgagttgtacgtaggaatccaattgccaaaccccataagcatacttgtcaactacctccccgtcagacagactcccatagagacgctaaggaacttagtctacagttgtgacatcaacacccttgcaatcgatgaattcatgacgtggccgtcgttactccaaccggagtctaccttccggccatactttgagctgcttgtagaacgtggatccttgaaggtgttcgccaagcgagcaacttcgtgacagtagctcagggcttttcagtcatgacaacggtcgctttttagtcttcgtgtaagtacactatatagtacattaaacttggtttatcgtacattgagaaattgcgtacacaacataagtataaatctaatagtttttgatgttgaaggcacccaaactaatatacgtacacgatagcgtacagcagaaactatacgtacattgcgagaggatttgaacaataaaacaaggcacgtacataaaacaacaaattagattaacatttaaacggaaacaggaaacaacaacgactgaaatgtagtttagttcttatggaaacaacaacaacaactgggaaagaaaacttaattgaaatgtagtcttatattatattagaacgcagaataatggttcattccctctagctaaaaaaccaccatcgcgatatccgcaacttcgggtctgtccggattggcaaccacctttgaaatagcaccatggctctcaagcttcgggttagacagttcggttaaacgcgaaaagctgagtgcaacaacaaaatttcccttacccaaactctgaaagtaaccatccaagtactccgcctgttgattgcgggcttcgcactccaagacttcattgctacgttagaaataaggacagttagcgtttagagtgatattgtaaataaaacaatgaaaagaacacttactatctatcttttatcttgaaactcagtttgagaccctaatagtctgtagtcaatccgccaacatcaaccaacgctccaacgacatctagatgatggagaaacaaagataataaaaaaaaatttcaaaaatgtaataaatgaagcatcggagttattcctcctcaccgactaaaacgttcttgtaagcagatttctccaaaatgtagtcgaagggagtgaaatcgaaatctggaactggtggtgatctcggtggggcctgaacgacgacggtccgatccataaacagtatgccgtattcatgctttgttgctctgactgagtcagttgacttacggaccaagaaagaggtgattgtcttccactcattttcaacgaatcggtcttcgtaaaacggagcaaggcgacgatcaacggtggcctcaatacggttattctttacatacagaacatgatagtagacagtttaatatacaagttaagcgaatgaatgagaaaaacacataatgattcgacggaaattaccgcgtaatctgccaggataaggccgagttcgaagacgtttggcgatataaccatcttgaagactctcacgacaaagacataaattcgccacccagtgatcagaggagacaattctgagaccatatgaaacccctccatctcacggatagcaagaacaagcgaatcgaaagacaaaaaaaatttttgtgaatgatataactgccggcagaagaaatggatttagaatgaggattgtggataaaattaaggaagggaggagacttaaatagaagaaatctggaacagctacagttattaatgcggttccaactacacttgattcaaatttttggtaatagcttggtaaccgtcatatagggtaattataacgttaatttgacaataaacagcaacagttacgtcctttccattaaataccaacataaccacaatatacccaaccatatctccaactccgttcatttaagagggggaataagttagattttcaaaaaacttatttcaaattactcaaaatattgagcaaccacctctatgtacccttattacatgaactttaacacgtacacagacaaaaacgtacatagttatacgaacgtagagtttaaacgtacgtacacaacgtacatagttaggtggattatatataaacttacgtacaccgagaaaacacagaagcgtacactatattggccggctcagaaacttgtcaccagaactagattggatttttgcacgtcttcttgttatgacctgcttgtcgacagcgtgaaacactgatttggtaaaagtcttttctgtctctttttctgaagtgacgtacataggaagttaaaaatctccgcatggtaatactcaaaatacaagtagatgaatgaacgatgttagtacatacccggttttcacctctagattggatccttttggacagtggtcttcctggtggccgtctactgtatggaggaatgagtatcaaatccactatatgttgtgggatgacaacatctttcggatccgcgataggtagaattggttcttggaaagaatcagaaaacgtttgaaggccataccaccatccgacacaagacttcggatcaattctatgctcgattgcagctgctagagcgtgttcacatgggattcttagcttggtgtacctaagacacgtacacgtacactggtccagaacgacatgaaaatgctcaccggatttacttgtcacttgatagctccacggtccagacatcttcacagcgtatttacctgacgcaggcaactcttgtagaaatctctcatcaacctcaggtgtcacagaagatttgcacctagcaactttcttcctcctcgatgcgaaccatcgcattaggacatcccgaatgaactcgatcatgtaaacaatcggataagtttttgcttttgttaacacatgattcatggactcagagttgttgctagacatgatattgtagcgttctcctctacagtgagctcttgtccaatgctcaaatcctatgtcctctaggtattttgcgcatttagcactcttttcccttaacagtccaaaatatttctcgaaatccctgaccctataagctttggcagcgctgaaaaataaagcagacacaccaaacttaccataataggtggagaggtttcgctcaaggtgaacagcacatgctccatgatgcgctctcgggtaaacaacacttaggcctttgtatatagatgaatgtctgtccgagacaatcattaaatcgtcactgtctggaacaatctctgataacttttcaaaaaaccatgcccaagaagcatcggtctcaccatcaacaacaccaaaagctattgggaatatttggaagttcccatcttgggcacatgcaataaggagacatcctttgtaaggtctgactagttgcgttccatctaccacaactaccttcctcatatatatcaaacctttgatagaagcgccaagagagacaaagacatacttgaagcgctgtttaccatcatcttctggtgtatagtgtagatgtgttattgtacccggattagctaattggagaagatacagataggtcggcaaaaacctgtaatttgctatctcatccccccttacattttccactgcaacctcttttgctctccaagcggtagaatatgaaatccgcacattcagatcatttaggagcagctgtggtaaatcgacagctcgcggcccaccctgagtagaactgtatctgctcctcacaacttctccgaggagcttataattagcatgtttattgtagttcttccgagagtcgatgttacacgtatgtgtcgtagcatacgaagtgattttgaaactttctgaatccttcacgacgcaggcagtcaaatgccatggacaagtctcatcaacgcacaccatcttcaatgttttaggacatgacttaggttgcttgaagcaaaagcattgctttatcggttgaagagacattgtttgttgcaggacttttctattcttaaaaacacttccaacaaacaaagtttcgcatgtggtgctgatttcagcctgtgtctcatcagctcgaaaattgagtaagtcatcgaacacaggagcagcatcgttaccgagattcgccaactcgccaccatgtaacttaggaaattcattatacacttggtaagcctcagctgcggtaactaccccattatcattcagtgtcccagttgaggaagctccaataccgtcgatcacttcatccgcggtgacttcgtctatacaaataagattggaatccctttgcccttcgcagcgtgtaccataaacccaatggagaaattgtttcttcgccaggtacactaagaccagtgtacgtacatgtttccaagagacgactgaattcccctgtatctccgccaggtacactaacacccgtgtacatacacgtttccaataaacgactgaattcccctggatgttgagcagtctgttgagtgagactgacgtcttcctcaagatttccttgtacatattgttctactattacatcattccacttgttgtaatcgtattcttcgctaataccttcactaccgtctgtggtaggatacaaggtacttcccccaatagatccatccacacaaagataatcatcacacccatcatcatcttcgttgccctcctccacttcatcctcttttgttgtatcgtcttcaacatcgccttgctcctctacatcctcattattttcatcaacatttgtagcactataaaacacacgaccactttcagaaacttcaccatgagacctagagacagtattcccgaacgccttcactgtattattgaaagagacgaacaagttgagagaaaaatacccaccatgaaccaaaaaaaacgtttcgagacccatctgactgtcaatgtatacaggagggcgtttagtatctatcagcactgacatttctcccggtatccagtagctaattatgagattgatctcggtggacttcaaactgaaagcctctcggagtgtacggacaaagtccgtgtacgtcatggtttcctgaactcgtacacaacgaccaaagatgccttcctcaggttcaaatttccattctccttctttgcatttccactcaccgaccatagtaaatacgggaatatccataacccacctgcatcataaattcaggagacacacattaaatgcaactgaaaaatactatacatataaaaaaacaaatggaatgtcgatactacacatttataaacctaaataccaattatcatttgactattttaaacaaacaaatatagattttgcaaattttctgataaaaaaatggagttcgaacacaatcaagatcctaatatgacataacaaaaaacttcttaaaagaacttcattacttacacgaacaatgcttgttttggctccaaacttggtacaaaaacaagatcaacacttcttcagcagcaatgtacgttctcaataattctttgttcctgggttcatcttctttatctcaacaatttttttattaattattatcaataatttttttaatattatttgatgtaatgatgattttgcattaattgtgacaatagtcacgtctaaactttttgggggcattaaatgttgatgtcacttcggaataatggaaataatctcacttgtaacggaaccgaatcgcgtcaacgtgaaacaaaaaatcttcaactgaaccggaacagtgtacgtaactaaacctgctaaactaaaccgtacatttcaacagttactaagagagaagcgcaagggcagaagcgtcattttgcaggcgaaaagataaatggtgaaaaccacatttgattttgacaatccatggaaataaaacatggtcaacaggtgtggcctgcaatttaccctaaaataaaacaacaacgggaaaatgctgaaaagtcaaataagaaccaataatatgtgacgtaatttcctttatctgtcattattttcttactactgtaggatgaacatgtatgctattaataacctataccatgcaatctatgaactcggaaacaagcattcaaaaaaactcgtaacagcactttcaaaaatattagagttatattggactcaactatccaccttattttaagcgttggcatctaagttaaccgaaaagaatagtgggggagtagagattgaccttctctcaagatgttattaatgtagatgggtttgtagggataagtgaaatagctcatgttactcgtcaccagacttcatcacatttgaagcagagtcgtcacctaactactcccccactattcatcacacttcaacagagttaaccacacttcagtagagttcaccaccgaggatgggatccccggtagatcatattattttgctagaaaacaatgacattataagatccattttttttgttctaaaatttattcagttatctgattattaagtgattttgcatcaacacttattcgaatttgtttccataatatgtagtgaaacatttatttttggatcacaattgaacatatacatattatatagaaataattcctaagatagaacacatttgtatgtttattcctagaatagaacacattttttttttattactcagatgttttcagttcttgtgtaattacaattaacaaccctaactagttttaattaattattattatttaattcgtttttaactaaaaattaaattaaaaaacagtgattatacatgtcatcattccatgtcattacgataatccacgtcattaatcatctccaaaccgcataacgtttgggttttttatttcttggctttactgttcatcatctcccaaaaaaaaaaaaactgtcgctttcttcctctttctctctcgacggaacaaaatcgatttctttcgccgttttgctcttttctcgtctgttccggccgaaattcagacgccggagtcgcatttctgtaagcgcgaagtcacatctgacatctaagttccagtgagtatgtttccattaagtaagactctgacatctaagttcaatctcaagtgattcccgtcactgaaatcgttttccgatgcgtaacgatggtttttaaagctgggttttaacgtcgtcgttgattgacatatggtggccgatttcttagatctatttgatttgacggctgagttactatttgtttgccgactgatttatgatttatcaattcatccgtgtctgagtttgttttatgctgtgactgagttatggtttaaccttacatcgatgtctgagtttctgttaaaatatggctgagttagatttatcttatggctgagttatgttatgtgtggctgagataggtttatgttatgacggagttatattatctatggctgagttagatttatgttttgcctgagttatggtatctgtggatgagtttgttttatgttatgactgagttatggaatgcttacggctgatttatggttatacagatgtctgaagaccaagcaagggagtaccctccaagactttaccaagagggggattctaatctggagggtaaaggcattaatcataatataaagctgggagagttccctgcaattagagaatcaataggaaaagaaatatgggcagaactgaaagagacagagcttagattaattgctaagcttgttgatagttattttctatggtctggtaagaccgtacattatctactatgcagacaactgagaatactgaagaaggagctttggtgtatcgtggctggtaaacccatccggtttggattgaacgaatttcatcatatcacgggtttaaatatagatgaactgcctacagaaaagtttgtgcctgcagctgactacaaagcgttcttcagtgaattgcatgtgccaaccggtgaaggtcctaatctagatgaacttaggcagggcttagtaacgtgcagagcttggcctactgaaaagcgtagatggtttgggttattgactcttctatccattagactttttggcttgcatactaactctaggataccatttgagagtgccaaaagagttttcgacgacaaagccatgaagacttatccatggggtcgggcagcatatgaagcccttgtcgtctctataaagttgctgaggcctattggcaagacgtacaccgtcagtggtctggttttcgtgttgcaggcttgggcgtatgagtcaatcatcaccatcgccgagcgttttgggaacgctgttaacgcggatgagattctgttgcttagatggggtggcaaccgtacccgtgcaactatagaatcggtcattgctgaagatatcaaagcgaatggtggtgaggtacggtttcggctctattatgttctgttttttatcaaatatttatgttacggctgagttaatgttttatttttctctgtgaaggctgagttatgttctattttttttggcaaatatgttatgtgacgaccgagttatgttctataatggctgagttatattaagtgacgactgagatatgttctgtgatgactgagttagcttaagtgacgactgagttatattaagtgatggctgagttaaacatactgatgggttttattatctctcgtgttgtagctgcgtgttcgtacaatggttgaaaaggctgagttaagcgagctgtttcatttttggccagaccaattagaagacccagcactggataacttgatccaagacttacacggggttaagcttgttaaaggttattgggatgtgaagacgagtgagaagaagaagaaactcttaaaagataaaagcagaggtgtctgaatctcccgctaagaagcaaaaggtctctcacagtgagcatgttgattctcttgagaaagatgcagaaaagaagaagaagaagaagaataagaagaaggaagtagctgtcgaatctgatgaggacgaggatgttcgttctcgtgagcaggatggtcagggagacgagcagtcgctcgtggatgtggtgtccaacttgatctctcccttaaactctcgatttgacaccgttgatactagcataaaagaaatgtcctcccgtctggatgtgattggatgtcaaatcgaatcgagtgttgaagcaaagtttgaaggaaggtttggatcgattgagaacgatgtcaaacagattaaagagcagctgaaggccatagctgactcaaaatcaagcagttatattagagatatgtttttagccaaaccacagccccaaacgcaggaagacaatcctaaggcccaaactcaaaagacaccagacgttccaaagaaaattacaaataaccaatctactgctcctagtcctcctccggtaaacttttagttggttatgaccgagttaatatctgaatattattcggctgcgttataacttttagttagttatggctgagttatctgaactatacggctgagttatctgaatattttacggctgagttatataaatattttatgactgagttataaacgctggttagttatggcttagttgttttcatattataaatttagttagttagttatggctgagttatatgaatattatacgactgagttaaaaatttaattagtcatggctgagttatatgaatatgatacggctgagttgagttagttacgactgaggtatatgaatctgatacgcctgagtttagttagttatggctgagttatatttatacataggtatgagttttcgttgtttaacgcctgagttttcgttacgtttatgcagtcgaaacatgctgatgttggggtaagtaggaagcttgaagcagaatttgataaggcctccattgtgtctgattttgatttcgttgagactgtttctcctctcaatcgccgtttacgctctaggaagccaccagccccaaatgtgccaaagcagaaaaaggagaaaacattaaatgagctaatccagaaaccgccagcgagaagaggaagaggaagaaagcctttggagcagcctaaaaaggtgcctcctactgcgccaaagattagaataaagaaaccaaaaccatctgaggaaactaaggaaaaagctgaggaagctaaggaaaaagctgaggaagattcggatgtagttgatgtcacggataaggttgtatccgagtataatgaaatgcttcctgagtctgatgaagatgaggaggaaaccgagaggctaaagagtgtaaaagaaattcggctcaaaactgttaagctggccccggatgggagctcattgattaacctcgaagatatgcccactcacacttttccagttattggagacaacgggctgagctgcatgagaaagggttgtctgccttcacgagcaatctatgatcctctggcaccggttgatccggccaaactgcagaagcttaaggcttatttgacaggtcccgaaaggtatgaccctttatacattactaagttgttaaatacgacatgcttacactatttgtttatattaactttctttattatttgttagcaaacattattacaaaacatatgggttcgacgatgtgctgttctactctgttatcatagccgaaagaaaggactggccagacaagaaacatggatggttgggtgatgatgtaagttattgttatgttccgtctgagtttggctaatgttatggctgagttatcgtgtcgttatgtctgagttatagtagataatgactgatttacgatgtaagttattgttatattctgtctgagtttgtctaaggttatggctgagttatcgtgtcgttctgtctgagttaatttagctaatggcagatttatttaggtgttaaggctgagttttacttggttacggctgagttaatgttgtgttttgtcttggttttatttttgtccagcacattgctgcgtatgtgaaagtcctcaccacgaggctcctgcgagatcccaccccatactacagcgaacgcgtcatgattctagacccgtggttcacgtcaatgtggagtagggattacgcacagtggaagatgaagccgaagagggtttctttcaaaggttctacgtatgaaacttgggtcaacggtacgggtggagaagacccgacaaacaagaagtggataccagatgtggatcacttgtatactatcctccaaaccggaggtaatcattgggcgaccatacacgtggacttgcctaggggtcacgtggactgctatgattgcatcgtcggatgtcatacaaaggaaagcgatggaaaaatcctggaacactgtaggccgttcacgaggatgattccacagatcaagagcgaaattatccctcccgaagtccgtgtcccgcaatacgaccaattttcattccagcggagggaccttaaaaaggtcccgcagaatactatcaccggggactgcggcgtttacacgttaaagattcttgaatgtttattgcttggtgtttcttttgaaggcattcctgattcaaatatccaggggctacgggttaggatggcaacagagatctacgatgaactacctaacagaatgtccattcggttttatgagacatgatttgctttttcgaacatgtctgtgtcttttgggatttttagcatgtgattgtactaaatattgacactttaggattgataaccagaattatgtctgtatgaatctattattatgttaattataacaaaaaccaatgtaatggctgacttatcatcgctcgattcgttttacggctgatatatgctaacgtgaaggctgacttatcatcgctcaactcgtgctacacggctgagttattgttgtttaattcgatgtttagctgagttattataacgcggtggctgacttgtcatcagataaatcgtttgatggctgagtttgtataacgtggtggttgactagtcaaacccaaacttccttcccatcaaataaaccagacgtgactttaggactatacatacacctgtttacgacacccgaatagtcaagaacccaaacgtcgttataggaccaaacgtcgttacattagagaaccaaacgtcgttaggttagaggaccaaacgtcgttagaggactatatatacactggtttcctcttgtcttttcacttgtctattcttagcaactacaactcttcattcttctcttgtcctttctctgagaaacaaaaccattccgagatcatggatgcatcagattcaggttcggttcaaacaagcggtggtgtgtggatgacggtcccaacaagtggtcgtctgtggatgaaagccccaccctaaagctgtatcaaatccgtcatctcttacatcaggagcaacataagggagacggcggaagcacacttgcttgatatcaaactgcatgagaaggaagcggaacttaaggtcttaagggacggatttaacgtgaaggaggagatcgagaaagtgctggcgcaggttggcaaggcctacagagcgcagcgtgaacgcccggtgagtagtattgattgggacaaactggggtatggatcgaccggtcgtccaaattcggagtccgattaagaatgaagatggcgattgatgtgattgtatcttcattttttattttcaattatattatatgtatgttgttggattccagtactccttatcctatgttatcataaactctgtcttttcaattttcaaacttcactttttattttatactcgcgtgtgtgattcaaaaactttttctttgatttatcgtagattaacttgatgtttggctgagttaaacatgtgactcaatcattgttattctaacgttaaggcggacttatcgtagattaacttgatgtatggttgagtgaatctaacgttacggctgagttattatattttaattcaactttggttgagatagtattgagttgtggatgagttagtctaacgtaacagccgagttaatataaatttaatccgattgtacgttttggctgagttataatcgcacaattcgctgactttatgataatagacagtacaaagaagttcaaagtgagaaaaacagattaagctaagatcacagatacttgttcaggctctcatacttcttctctagcgtttcaaacttcttttccataagaaagatcttttccgtctgagactcgacgcgcttattggctgcttccagatccttcttcatctcagttgtctcctcttttatcatgtcaaactcgtcacacaatgcaacagtccaccatctcttgaaaccgcatccttgaccgggacccttataaaaaaccaggaggttgattcatagggatacaaaataaaataaataaaataaagaacattaactcaagaaaagatgcttacatctgatatttcgtgcggacaactgaaaaaaagttttccggttgtaacaggatcaagagaagtggcaacgacaaccttagcattgcaatcacactcgatcggaacgcccttatcgcgcctcctgtttttgtcgtacctcgttcgcatccttatttccatacggttgagctcctacattaacacaaccatgatgtactcgacgttagatgggcaacgatttgtactattcagatgtggagataaatacctcatcaacactagattcgccatgaaaaagagacctctgagccatcatcttcactgcaattagtacggtactaaagcactggttctatatagtcatgtctgccacaaaatgtattaatcaaacgacggcgtatttgtattggctgaataaatttagaagtggctgacttgtcatagcattgcggctgggttttcactgatttgtggctgagttatgtcgtcatacagtatgtcactacttagcgtgttgctttaggttgggtttatcgagattatttattatatcattatcgagataacaaacagcaactttatggggaaccgccagtaatgatttggtccacatgtacaggtacacacgcccgtagttaatattcaaaataattcaaacgagttcgaaattattccttaactaaaccctctaataatcaaataacgtaacggctgagttattcaataagatttcgtgttttggccgagttatgagataccatatgttattatgatatatcaaactgaccaccaaattgttagttatattattagcttgaagatgtaagtatataattgatttgagggttttattggtttcgttgttaattgcggatgtgattgaatatacaggaccatttgtttaaatgggtcgaagatggtacatacgaagtggttgtagacagttggctgaaattggccggcttcgacagtgagttaagcgcggccaagtccgaggtttctgtcgagctagaagcattacaggcgatggtgaaagaactgaaagaagaagtgatgaggagcgaaagggaaaaccagaaatggaaattgatgatcaaactttgctgcttttgtcttgcctttattatcattgtcattgtttttggtatcttaatgttcccaaaaatcaacgaacagaggctttttctgggctactagtttgttttatgtttgtatgatttgtttgctactggaatccattatgtgtttgatgtttaactcagcgtatagggttaattcgtttttttggttcaagtactagcttgcaatgaaatggaactttgtcttcggccaagctaatccaatatcgttgactgagttatactggtaatgttgtggcagagttaatcatacgttatggctgagttaatatctgttgtatcttcggaaatataggttacggctgagttattataatgttttggatgagttaattatacgctatgactgagttaatcatacgctatgactgagttatgataaaatttaacaagttacctcaagcgataaccactgactttactgagaaggcgatcgtagataatatgagatataaagccatcacaaaaaaaaacagagaaacatattgagttcataggaatgagataaagggacgataagtaagagacacaaaagcattcaagacatgaaaccgacatcatccgggtcaaattcagtaaacatgtccaccaaatcattccaaactgttgtcgtcatccacctcggcttatccaaaccacgcgcccatccccgtttcagcacccgcatattgtcccggtacaacgttctagccaccaaattaaactgcgtccacaccgtcaccgtgtgccttgaatcccaggtgtgcatacgctacaaagagagcaaatagtaagaatttggtctacggtttacaggaagtgctttatataaaaactcgatgcttaccgtgaggaggaaaaaccaccttgccttgaaaacaacgggaatcatccggtacgtcggccacgcatggtgaaagttgcgttggagtatatcaccaattgcgacagctagttggtgattgaatttgaaccacgtaacagtggttttgtcgacccatgtacccaatccacgatcaggagcggtgagcacggcttcgacatctcttagaaactgtccgtcgatgtgaggcaccatgtcgttaagatgtgaggatgagacgtctaaatgatgagttgtcaagaattattaaaaaagacaagtcaaggtatacgaaaggttgcgtgttacagctgagtttggcgacaaatcgtccttgttatggctgatttaaatcacattacggctgagttgtcaataaaaacatgaagttcaattcgatttactgactaaccgaggtacggttatatccggcctaattaccagcggtttaatacgcctataaaaacggcttctcccataaacaccagaaggctaaactcgcacaaacagaagctaacgagttcaaaatatttctttaattttcaacgactcggaatttcaccatgggttacgacggcctccgcgacttgaatccttacataacttgctggacgatttgtgttatggttcttaggaagtacgtctcgtttatcacagataactcattcaaactacgggtcgtctttgtcgatgagtgggtaatgggatcttcactcgtgatacaaggcatacttaaccttctgcttgtcttattccctatataactcaccctccaatgttgttttcatagggtatccaaattgaagctataatcggaagtcggttttctcaacgttactacaacatgcttgaagagaatcagtggaaagaaatcagaacttttggtgttatcgaaaactgtggttttgtccgaacaacaacccacaaatacatgattgagttcatgaatgcaactgagctaaatcattccgacccaagggaaaatgtattatttaacagattcacaccttttgactacattattgaagacaccgctcatactgaaaatttggtcggtaagtaatacgtatctaatgcaaatttcatactttcacaaatcacatgcctgcttttaatctttatttcatactcccagatttggttggtgcactcgtcgaggtcggatgtctgagaaatattacagaagatggttgggagatggacggattcagacttaccttcgagagtatggacaaatagtataatttcttttgtttctttacttctaaatttctttcttttcatcatgtatttttcttgagttagcttaagtgtaagactgttttatatgtttcagtaaggagaggttgaaatgtgaggctcttggcgaattggcggttgacttgcataggaaatttcgatcatttcgcaatgacaatattgttattgacaatatatatgttgcactcacctggtggaagatcttcaggtatcatccttgccccaatcacgtgaagatccaaaatcatgcccggatatcagatgtgactgtcgaccccaatatcgaagaagtgcaagagttaaaaatggtcctcgagtaatgcaagatggaaggaatcgggttattaccattgtttacttttcattcctcctatgtatccttcaaacaactattctgggggaacttcattttgtctttgccttcaaaattcagtttgataactcagccgtattataattaaataactcagacactaaataacataatacgaatataactcagtcgtaagttaacatagtttatctataactcagccgtaaaaggtaaaatgaactcaactcggccgtaacatgtaaaatgaccgaacctttcgacttccctaattatataactcggccataacatgtaaaatgaccgaacctttcgacttccctaattatataactcggccataacatgtaaaatgaccgaaatacataccactgttgccaaacaagggaaagaagacacatacagagtacaaacagtactatgcacgacaagttttaacattgtgccctgtttctttacatcgagaacatgcgtgttccttcctagggcgtttagtctcaacggcgacttctagtgctgatttcatccttagtttcttgggcctgcctggctggttcgcaacaatcggaggcaaacacggttggtcaattacaatttgaggaacagggacttctgtatctgaaggcatgattgcaccagcgtacgcattgaccaaatgactgctcttatgataaggactgcacagggatatacgagacacacccatatgttctgcagctgcgattgcatggatgcatggtgatttctcttggtcgaaaagacggcatgtgcattgtttttcatccacatttacaacatgcaaagatgctcctaagctacttgaacgcgggaagcatcaatcgtttgtacatctagaagtcttgacgagttgacgcgggtctattagagagaagagacaagaaacaaaaaaaaaagttatggctgaattattccctttatagctgagttattctcgttatggctgagttattctcgttatgacggggttatcgttattcgacgactgagttatgcactagttacagctgagttacctgtaagagtttctcaacaccacgtgtgagctgagtatgttgtttgctcgcatcatctctccattcagcaaaccatttagtcatcatctgtcttatcgcttctaacagtcgaactatgggaagatttttggcttgtgacagtgctctgttcattgattccgctatattcatagtcattaaattgtatctatcaccggggaaatgagcacgcgcccacatttcaacacccgctctttggaggtatgcatgtagtagaggatcaagctcttcaatctcgttgaacgcgttagtaaaatcattcagcctataacaccttgccgcttttttgaccagagggaacaaatcttttcttttgaattttaccaaaatgttcttatagagatggtaagtacaaatcccacgagcagccaacggatacacttcaccaattgctttccctattgacttatgtctgtctgagattatcgccaggtccgttgcatcaggaataacaactttgagttgcgtaaaaaaccaacgccaagaatcatcattttcagtgtcaactacaccgaaagctaacggaaaaatctgaaaattaccatcttgagcaagggctgtcaagagcgtccctttgtaactaccatggagaaaggtaccgtcgacaacaacaactctgcgcatgtaatgaaacccagcgatactggcaccaaatgcaatgaacatatagttaaatcttccactctcatcaatttgaagacgcgcgactgtacccggatttgcccgtcttatcatgtataggtaagaaggcagttcttcaaaactactatcatgggttcccagagtgagctcccttgcaaacctgagcatcttgtatgacttcgaataactcatctgttaacacaaacatattaatcgataagtcagcctaaactataccacaactcagccaataagtgatcttaagtcagccttgaaagtcataactcaaccagaataaaattatatgtcatccatactatatcaataagtcaaccgtaaaatatctataagtcagccagcagataaatagtaagtcagccgaaacattgtaattacctttactcgaaaattcttagtgatgattattccgactgattttggtttaacatccggaccaacgtcaccaagatagtccctgtaaagaactcccagaacatcaggtgttgcttgtcgggatcgaccagaacgttccgtcacagaacatgtgtgttccgaatcgtatatataaacatgaaaattgggattatttccttgtctagatgcacgaaccctccaaagacatctatccacccagcactcgtaagatactgtagtcttattagaagttggtacatcaaaatcaaacccatcccttatcgcaagaagtttgagtcgatactccaactcgaatttgctacggtattgttggcctaccgcgagtgttagcgtagacagctccaactttaaatcagtcaggctcccaggagatccgatcatttccatggtctgagttctcttcgaaggagaaggtttcggtgaatcttcgtcattattcttaggctcgccgtatacaacaaagtcttcatcatcagatgaggcaccatcggagtcgtcgaaaaaatcaaaccggctagaaaattcatcatcttcttcttcgtcacttgcttctttgttagatgcttcatcgacacctgattcatcgtcccctgcttcatcgtcccctgcttcatcgtcccctgcttcatcgtcttgataatcgtaacaaacaccttcaaacccccaacccagaacttcgaatctagattctgctcttgagtcagatgcaatagcgcgtttcgaaccccttcctcttgatccatccttccgactaatatcacttgaatctttcgccgtaaactccacacagagacgtagctgctcgaatttcgtcaaacctagataacattgcaactgtcgatcattggagatataaactggtggagtatcgaagggcatagttttcagtgtcttgttagagaacatgtaactcagccgtaactgatgggtcgactgattcactccgtaatcatcgaccaccatctttaaaagactatcgtaaactgctctttccgcttctagctgcacaactctacaccctctttcgtcggggttaaatacgaatctctgtttctttacccataaaccggaaagaactatgaccgtagcgggaccagccatatcaagagaaagatgaaagaaattgaagatgtatgagaagatgaatgaagaaaagaaagttccggtgatgttgtaacgttcaggcggtggacacagtctgggaaaacgatttaaagaagcaagggacgtttcgtatttccgtcgaggatgctgacatggaatgatgacatggattattacagccgacgccgttttgaagtgatgacgtggcaagtcagccaccaaacaaacagttcataacacagccatgaagcaaatctttaagtcagccgtgacatgaatactattacagtaattaaaacaggaaaaaaaacaaagttaattcagccgttgtatgtcgtaactcaactaactcaaccgtaacgttcaacaactcggccataactgcatgatattatagtaattaatcttttaaaaataagtcagccataacatggctgagttatatcgtaatccagctattggcggctgatttatagcactcgaccataactcagccgtcacatctttccataactaagccaatcaaaactataactcggccgcgtcgaggaaagaagtcagcctttttctcataactcagccatattgttggctgggttatcttataacttcttataactcggccgaccatccttaactcaaccataccgttgcctgagttatacaataactcaggcaacattttacaactcagccgtaacgtctggctgagttatactcatacttcgccgtttcgttatgactcatatataacataccgtaactcagccggctgagttcatttaatccacgtcaacaaattctgatgtggcagtggcattccctgtaattacgttttttccgataacgtttagtaggggcacgctgggtaataaaaaaaattcgataatataacagtaattaaaaaaagttctgtcgtgttctggtaataacacctaatttcctacccatcacagttaatctccctattatataacaaaaaaaaaacattggaaacattactactgtttgataaatttcattctggtcaacgctctctacatctacggaagataatggctgaaaagaaaaaacgaagcaataatgatatatgagtgtttatgatgagatttctagctgtgttcaaaatcatagcaaaaggacacataacaaccaaaatcatacccactagagacaagagttttgagttctgagtttgaaaggagataaaccacctataatgttctaatgatctttccttcactgcctttgagatttcttctcatgtccattgggagagaatattttgttttgtctaagcatgcctccatatcgagatttttgagtagtgtggtaagtaatgtagtgctagcagaaggttcatatatcatattgaaaactcagttgttgaaatacttcaaccaatccttaatttttctccagcgtctgcatctcatccacgctatcctttgtctgtgtctctacatctgcgtccgttagggtctcacgagcgctattgataacactttattttacttattttaggcatgtgtttatcatcatttagcttagtgatcactcattgtttcatatcattttgcatcacatttagcttattttgcacacttcgccatttaggatcatcttgcatacatattgcatgttttggtatgttttcaggtgtagaaggagcttacaaggactctactcgaccctctactctatccaaccaggagggaagcagcagagcaatctactcaactagttcactcgatccaggtaggcacagaggagaaatcaattcactcgacccacttactcgatccagacagccatagaggaagcagcagatcggtatactcgcccctcttactcgatcttctactcgaccaagggcgaccaaatctactagactttttgatctatcaaagcgtcttcggatcctcctcattccccactcaaccagacatctgagcatacagataggagaggaagaaacatctactcgaccaattgatcactcggagcatggacacaaaggcgcagactttgcagcaccctctttactcgatctccaagatcgagcactcgcccaaaccgcctcaagtctcttgtcgtctagtgaatctagggttttcaacattttactataaatagatcactttgggatttgtccaaaggatctagcttttatcctttagtttttctttatgttcttgaatcttcaaaatttaattactcttaatctatttagtttttgtatttagttttgagtaaagttgtttagtttctttagatctacattttggtatgatttcagtaatttctgagtttgtgttcttaattatgttgcttgagtagtcattagggttcttgaggatggattagattaggataatctttaggttagtcaggtggttaagattaggttagatcccttgtggattcgttggcccctatgcggttttcggtggctaatgtggaaattcgaccatagacgtccagcgtccaaaagacgttcaaatggatgcctgatctatgaattccagaaatttgtaggctatagaccaagagattggctagtatgtttattggctttggtagtttgttgcttaaaccatgttttgctatgtttcatcaacgagagttgagattaggaagtggtagagttatgggggtctctgtcacgagagtgggagtggattgactcggttcttgaatctatcgtctagggtatctacctttgacctgttagccacctgatgaaccctaaagttgcccttatcaatgaatccatccttaggacttctattcttcttagatttatttgtattcacccattgattgcacttttatttacctgttatttgtgtcacctgttgattgcatttttaattcttaattttgttgcctgttggttctactcgacccaatgatcgagtagggcttttaagtttttatttctgttgttcgaatcttgacctacgattgttactagaaaccaaccatcattataatctggcttgacttagttgcttctatacacatcttgattgctagcaataacagtggaatggattgacaccccctatagttgcatcgacatgttagtgtttaaggggaattgaactgaacctcacttcagcaaataagtaggcctaaaaacctacttatcaatttggcgccgtagccaattcattgttgcattgttacattcaagatatcagaaaaagttaagatcaagttcttttacatttatcaagttactaactcatcttttcgtctgcttgtttttgtggtataggtactaatgtttgtgcatgaaaactcgatccaaaggttttgcacacctactacctttcaaagacagaatagacagaatagctcgtgagttacaagaagccaaagcaaaggcagcctatgatcagcaaagatcaactgctatggatcaacagaacaaactagttgatgttcaagacccacctaatgttgatcaaccaagaaacatttgtgctggtgaagccccaagaaatcatcaccaaagacaaggaatagtgcctccaccagttcagaacaacaactttgagatcaagattggtctcatctccatgatccaaggaaacaagtttcatggtctacctatggaagatcccctggaccatcttgacagctttgataggctctgtggcctaactaagatcaatggtgtcactgaagatatgtttaagctcagactattttccttctctttgggagacaaggcacaccactgggaaaagactctacccccagactccatcacctcctgggatgattgtaagaaagcttttcttgccaagttcttctctaatgctcgcacatctagattgaggaacgagatctcaggcttcacacagaaaaacaatgaaactttatgtgaagcttgggaaaagtttaaaagctacaccacttagtgcccccatcacggttttaagaaggcttcattattgagcacactctacagaggagctttaccaaagatcagaatgcttctcgacactgcctccaatggaaacttcttgaacaaggatgtagcagaaggttgggagttagtcgaaaatctggaacaatctgatgggtgctacaatgaagactatgatcgctcagtgagaggaactggaggaactgaggacaaacagagcaaagatatcaagactctgaatgaaaagctagacaagctggtgttggctcagcagaagcagatacactacttcactgatgaagagcacttccaaatgcaagaaagggggaatgatcaaactgaagagctgtgctacattcaaccaaggagggttcaacaagggctacaacaactacaagcccaaccaaaacctctcctacaaaagcactaatgtagctaacccccaagatcaagtgtatccaccacaacagaatcagtctaagccatttgttcagtacaaccaaggttatgtccctaaacaacagtttaatggaggctaccaacagcagaatccacttccagggttcactcaacaaccacaacaagcccaagcagctcaaaatcctgaaattaagaacctcattcaacaaatcattcaaggacaagctactggcgctatggcttgtgacaagaagatagctgaattacacaacaagatcgattgttcttacaacgatctaaatgtcaaatttgaagctttgaattccaaaatcaagtatgtggagagtcaatttgcatcaacctctgctctgaagcatcctcaacaacttccagggaaagtagttcagaaccctaaggactatgctactgcaaatgctatcaccatccaccaagaagatgagtctccaccaagtcatcagactcccaatactgaggacagtatgattcaagaagggggggattcaactcaaattgctgcacctgccacccaacaattcatctggactatagagcacacacctttgctgaatactcaccattctgaaaaaagttcaaaatagaaaaactcaagaaggatcagaatcaagagatgattagtagagtcagcactcaggaaacttacaagaagaaagtcatccaagaaaagcttgatgatcccggttcattcactttgtcatgctctctaggaccattgacattcaataggtgcctttgtgatttgcgagtatttgttagccttatgcctctctctacagctaaaaggctaaggatcatggaatacaagttctacaacttagctttactcttagctgatggttctgttgcacatcctcatggtctaatcgaaaatctgcctggcaagattggaaatgttgagatacctacaaattttgtggtattgggcgtagatgaagaaggcaaggatcccctgatcctaggcagaccattcttagcttcagctggagcagtcatagatgtcatatgtgaaaaaattgatctaaaccttgaaaaaggtatcaagatgagatttgacatcagaaaagcttcagggaaataaacaacaggaggttagagttttgggattcaggacatgaatgttgatgaagaagcagaagctggaaccaaaccaagatttaactatacttctcaactcagcaagctgaagagaacttttgaccacaagaagaaagcaatagaagggttagctcagactgaagatcctacagaagatgactggtatgagatgagaaaaaaatttaaatggcaaagcagagtcatagagggattatcttcaagggtgatgaagctgaaagatcaactatggatgtttgacaaaatagtcaataaattttcaatgagtattaatccagagaagatggaaactgcattagctatcaaagaggacgaagatttcacaacagaatggtttgcaccagaagatcagaaaggagttcacttagaggaaagaaacttggagagccagttgttgagtgaggagtgcctaaacaacccaccaacccctctgctgaagaagaacacttgattcatgattttgttgctgaagaactcctagagctctggattggatataaagctcaggaggatacaattggaaagttaactcacaagatgaaagagttaaacagcaccattctggaacttcaagaaatggttaaaggctaccccaatttttaaattgaggattggtcaaaggagcctggttcagaagaagaagactactctgctgatcagaaagaagcttattttgaagaaaaatcaaatgagtactcatcctaccatatgtcaagagaggatgcagaatatgattcaaaaactgaaaattcaaccagtgaagatgaggacttctctgttcctctcttcaaccttttttctgactaagctatgtaagagtcaagcttagtgacttaaaacaagctcaattgggaggaagtcccatgtctatccatgtatataactttctatttttcttgttatttttgatgtttttgtttaagtgattcaggtttatttcattgaccatgatggagtcaacggtcgagtaaattcaaaccatgtcaagaaagatctcaaccgttgatcgagtagaatgaggaggagtgttttgagtcgttgatttgaatgaccaaatgagagaagcaccaccaccgtttgatcgagtgacttcttgaggtttattttggtctgtttgaccgaatgatcaagaacaaggagctctccaccgttcgatcaagagctgcgcaattcaagaagatgcttgatcctttactcgagctctcattatttagagaccaaagcataacttgcgtgaccccacttgttcccccaacactcctttactcgatggacaaagcaattacccatgcccctcaccatttacaatcaacttttctatctcttccaaaaacaaaccaaagacctgtctcctccacccattgaattccacaaaccctccttgaaactctctctttcatcatctcgttttcgaaattctctcacaaagctttgaagtcttcattcaaaacccttccccaaacgctccctatcactctttaagaatccgttccccttcaccaatacttcaccaaaaagttactcgatcactcccaagtctatcctcaaacattcaatcggtttcaagctcaaaatttcgtcaccaaagaaaccgattcccttccgctttgatacctcttggagagttgttcttgtttgccctgttgaagctcaccaccaatctttatggattcaagaagaaaaagttcatctcgagctagaagatcctccgttgataacgaagaggttgaggcgtttgacatgagtggcatgactgaacgccaaattcgccaagcttgctgtgctcaaagatcaagcttgattcaaggtggaagctcaagccgcttagccatgcaaagagaagaagtagcttggggaaagagggtcgttgaggctgaagaagaacaccatgaagaggcaccctttgaagaagcggtttctgattgagatcatcggggatgatacaccagcccctgttgggagaagaaaccgaccaaagaggaagagagagccaaccccgagcgagtactatcaatacttgaagagttgaagtttgagggaactagataccggcataaggaaacgatgcaagagcttggtatttgtggtgatgtggaatacttgatagaattggccaatcttgtaacattcatgagctgccaatgtgggggatataaagaggagagctgccaactccttgcaaccctcaaggttcacttctgtgttgatgattcagagaaagaagagagaggaggcctttgttacaaaactccacaatgcatcgccaacaccctctttccaaagaaggccaccggatttgttggtgaagaggagctatgcatgatagaccaatctttggtcttcattctgagtgagacaaaagatgggaggaagatggcgggtgatagagcagacacttcgctgagtgttgttcttttggatcacctattgagctacaaagagtatgttgcaactatccaggtgcaaggagagctaaaagaatcgaccaaccccgaacttcatcttttaagcctcgggaagtgatctccaagttgagagagccaggaagtaggcatagacgagcttcaacacgctagaccaactactcgaccggacagaacgagcaaaaccctcccgcctcaacttcagcccctgcttatactcaagagagtatggacgattacgtttccatgtacttcacatgaccgctgaggtaacaccacctcaaccattgtatataccatagcatttctatttttctttgtgtgttgtttgtttttatcttgaattctcattcagatttttattacacaatggactgtgtaatttacgatttggggagggttcaagacatgtttaacattgtattctgttttcttatttcaaattttgcatcatctaaggcatagaaaaaaccatgaaaatttaaatcaatttcagaaaatgatttcacaaaatagagtgtcatgtagattgcatttcattttagaattgtatatagtgtgtttgcatttaggattgctcatttgcataggagataatgatgatttcaaaccgttaagcatgttttaattcaatgaagtaagttcaatgcccaggttgttagttctatgttgcataactgattgtttctctgtaataagacctgaccctgctttgaatttacaacttgactatactgctttgattcgaaactcgcttatctgatgtcattccctatctattagaacctgaactgaatttgcaattatcatgtctatgtattgtttgtgaactcatggctaccatatacatacttggattatcttattcatttcaccaccctctgttaattcaagtagttgactctcatttttagagcagtttcccatacccttagcctagccttatttcaagccaaagatcatttgtgtgtgattgtgaggtcttttcgattgagcttggtataacgtgttaggtatgagccgacaagagcagtctttcatgtagacctagcccacgctttttgggttagctaggactaggtggagacttgtatttgggattgagattttttatggattgaatgggaatgagaatgagaatgaaaaaaaaaaaaaaagagaataagagtttaaagttcttaagggggatacaaaaagtgttagtctagtaaagggtttggaatttaaagaagttaggcattatgattcaaggaataaaacgccctctatgctaagattagaagaaaagccttaagtttgtcaaagtttaaaaccaaatccgctagactcttgaatcgttttaaacaagaaccccttagaatttgaactaaaaagagaaagaatgagaaaaaggatagagttaggacatttatgggactgggatcatcttctgagctatcatactatatatcattgggtagatgggagtctgttcttgtaagtgtctgttggcttttacctttagcattctgctgaagctcaatcttttctctgagagtcccctgttactcgaccaaatcattagagggaccatttctgtctcttagcctaagcccgaaaccaagtgagttcataaccattgcttgatccactgttcacgcttaatgaatgttaaaggaaattggttgatgtgaatgcttgaatagattaaggcatgttgttaggttgcattgtgacgagtatggctaacgtttttaagtaagggtctatcatcttgcaacctagaattagcaacctggacattgagcccgttttatatgcatgcttcggtttttgaatccccaccttcaaacctctccttcaactgaagatattttgcttgcttgagggcaagcaagagataagtttgggggagttgataacactatattttactcatttaggcatgtgtttatcatcatttagcttagtgatcactcattgtttcatatcattttgcatcacatttagcttattttgcacacttaggcatttaggatcatcttgcatacatattgcatgttttggtgtgttttcaggtgcagaaggagcttacaaggactctactcgaccctctaccctatccaaccaggagggaagcagcagaacaatctactcgaccagttcactcgatccaggcagccacagaggaggcatcaattcactcgacccacttactcgatccaagtagccacagaggaagtagcagatcggtctactcgcccctcttactcgatcctctactcgacccatttactcgaccaagggcgaccaactctaccagacttgttgatctatcaaagcatcttcggatcctcctcattccccactcaaccagacatctgagcatacagataggagaggaagaagcatctactcgaccaattgatcactcggagcatggacacaaaggcgcagactttgcagcaccctttacttgatccccaagatcgagcactcgcccaaaccgcctcaagtctcttgtcttctagtgaatctagggttttcaacattttactataaatagatcactttgaaatttgtccaaagaatctagcttttaccctttagtttttttttgtgttcttgaatcttcaaaacttaattactcttaatctattttgtttttgcatttagttctttgagtaaaattgtttagtttgtttagatctacattttggtatgattttagtaatatctaggtttgtgttcttagttatgttgcttgagtagtgattagggtacttgaggatggatcagattagggtaatctttacgttagtcaggttgttaagattaggttagatcccttctggattcgttggcccctatgcgatttttgctagctaatgtgaaattcgactatagacgtccaacgtctaaaagacgttcaaatggatgcatgatctacgaattccagaaatttgtaaggtatagaccaagagattggctagtttgtttattggctttggtagattgttgcttaaaccctgctcttctatgtttcatcaatgagagttgagattaggaagtggtagagttatgggggtctctatcacgagagtggattgacccggttcttgaatctatcgtctagggtatctacctttcacctcttagccacctgatgaaccctagagttgcccttatcaatgaatccattcttaggacttctattcttcttagatttatttgtattcaccccatgattgcacttttatttacctgttatttgcaggcctgggagttcggctaaaccgggttattcgggtcggtttgaagaaaatttgttttttttaaaattccaccgaatagacccgaattgaaattcggatcgggtcggttcggaagtcggtttgttcggctcggttattggctaaaattaatgatccgaacatgaaccggaattttatttcttcggttaattcggtttctatttcggtttagatattagaaagaaaaaaaaattcttttacaaacccatatccaataaaataaatcattacaaacccaaatcaaagcccaataacaaaaacccaaatcaaacccaatacaattaactaaacccaaataaaagcccaatacagttaatagctcaacccaatacaaattttaggggtttgacaaggatatgagctgaacggcggcggctccggttgtgacgatgacggtaacagtgacagtaacgacgacagccgagacaaactccgaccgtctgatccgcgacaaactccgaccattctattccaacattaagagagataccattaaacgaggttgatggagaaagaagaactgaagaagaatggagatcgtagaggaaaacaaagaagatcaagatggattgaaggcggattgagatgagagagagaggaagatcaagatggtagagactagaaaagaaggaaggagatgaagacagaagacagatcgtagagaaaggagatgagattttttatctttaggaaatgaattagatctagggtttttaacttttatagtgtgtcctcctaaacccgaataaaccgatcggtaaccgaataccgaaccgagttaaccgaaatccgaattccaaaattaatttatacgatcggtttatatctcttctcaaaccggatgccgaaaaccgaatgttttggtttgatcggttcggtttgctcggtttttaccgaactcccagggctagttatttatgtcacctgttgattgcatttttagttcttaaatttgttgcatgttggttatatcgacctaatgatcgagtagggcttttaagttcttatttttgttgttcgaatcctgacctaggattgttactagaaaccaaccatcattataatctggcttgacttagttgcttatgtacacatcttgattgctagcaataacaatggactggattgacaccccctatagctgcatcgacatgttagtgtttaaggagaattgaactgaacctcacttcagcatataagtaggcgtaaaaacctacttatcagctatcctctgtatgcgtctctacatcggcgtctcccctacatttgcgtctacatctgacccatcaccaatctcaacttcctcatcttcttggtgctcaacaagtgcataacctctcttccaatctaactcagagaatacgtaatcactctttaacaagtgcataagaacatcatcatcttcttcttcattcgaatcaccaagaaaactgattacctcaagatcttcttccttacccatgatttgttcataagaaggctgaacagtagataaatacctcgcacaaacaggaaaccgatctgatttgtcatcgagccgagcataagcctcttttaattctgacacatatcccaacagccatagctgcaatgccatgggaaatcctttaagataaatctttgcaagatttttcttcttatcatcatcctttaccgacaacaccagcatgtcaaatgcgtattttttccctaggggtacgcatagatattctttttcgcattggccaaatactcctttagaatcgagtattttgtaatgccatttggccgcatgaagacggtcaaaataacaatcaatatagcaagtcgtgccttgctttcctcatcatccaagaccttcaattgtgctatataatcatccacctttatagggggtttgtcaggcaacaaaggccaatcacactcaaaatctactgggacttcatcttcttttatccagcatggtaatcccgtgacaagatgaaactcagtcaatgagaatctcatcggcttgttgttgatgcaaaaccaaatcccgtcttcccttgacgacacaagttgtcttactaccagaaagcgaaccaactgaccagaaaaacccaagccattaggtcctttttgattaccacctgcttttcttaaacccgctttgatgattgggccaagaaaagtagtttccagcctactgaataacgagttagagaggatttctttaataatcttcaagtaactaaattttgaatgattgttgattgatcccaatatcttgcaatcttcttccccgtatctagtagtaggcaatgtaatcttagattgagccactagattgtgtttagacattatgcacctgccaaaatcatcattacacaatatagtgtataaaaatcatataaagcacactttctatgagagatttatgaagcaacagtaaagccaacgagatttaacaacactcaagtcaaacacttcaccttcactttactatcatttctaaagtagagacactcaaagttacaacctgtaatataatctacatgatacttcatcaacgatctctgtcacatcactaccgatgttctgttctagataatgtctcaagtagttgcttattaacactagtgctagaggacagaaataacaaaaccgaaatttctcaaagtgaactttattttcattctttaatctcgttctaatcagtcttacactcttagctacacataaaaaaaacatcaaaaactacctttctcaaaaacccatagaaactgatccaaagtggcaatggcaatcttaagatgaccaaaaaaagaagagacatttatgaaacaaatcctaatacttacgcaacaaatcacaaggaacaagaagacatatttatgaaacaactgtaaagccaaggagacttaacgttcacacaacactcaaacacttcactcacttcactttcactttacaatcaaattcacacaaaagcaaactcgattcacaacaacccataaaacttagagtcaatcacgaattcaagcattccacaagtaagatgccaacacgtgcaaaagcaaaatcgattcacatcaacctagaaaacttatttacaagttacaacaattcgacagttcacgaagctaagcttattgatagaaacccagaaaagcaaaatcaatttacaaagtatacatgctataacttactccaagggacttgacagcaaagatccctcgagaacagcgcttgaggtgagggaagaacgatgagcaaacccagactaaagagaagccgaaaggactgaagctcgaaaccctaatatttgaagaagaaggagagaagagatcgactgattttcttttatatacccattgggtacccaataccaattaaacaagacccaaataaaatggttactaattatacccaacccattttaaacccaaaattttttttctgtgtatagactaaacccataaatgatggtcttggatatcccttctttttttatataacaaaaactaatttttgtgggaaaaatcacgaaaattaaatcaacttaattatatcttctgaaaaaaatacacaaacttttagcgttgccaaaacaatacacaaactagttttttttttcaaacacaaattatttcttgttgctaggataatacacgaacttttaaacgttagatgtttcatacacggacattaacagaattaataacaacattaattttggaataaaatattaatatttaaataaagttttatatttttctcaaaaaaatccgaaaaatcccaaaaatttataaaaactacaaaaatgaaaaaaataaattaaatttatgtaattatttatacttttggtaataaaagtaatgaatttagagtaataaatggtcaaattttgtaatttattaaaaataatattaaattagttttctcgtaaaatagaaaaacgaaattgaaaaaaaaattcactcacgtttgatgcaataacttgcactcataataaaaaatgagtggaactgaaattatgaattatttttaccactttttcatgagagaaaaccttataataaaacggatgagtggaagttgatgcatcatcaaacgcactagtagattaaggtaccttggacactggcagcttcccatttccgtggatattcgtggctatatagatggatcaactgtatgagcccaaaaaccgaattgaaaaacaagtacgaattttattaagataacaataacaataaaattacattaacagtaattaaggatagaaagtaaatcacggaggcaagatatgatatctttttccttaattcaataaatcggctgtaagtgctttttggacatcacgatttttgaatcccaggatacaaccgatcacgaactaatacccgagcacacaagtattagactcaagcgaactagatctatgatatactctcaaacctattaaactaagaacttacttttaagaagcaagagagagagaggagagaatttagaatttaaagtgttttgtgtttgagagcttgagaaataatgataggcttgatctctttatataataaagggggataggatttgtgagaatattttcaggatatgcatggtatattttgagactatcatgagaatattctgagactatcctatcctcagaatattttgagactatcctgagaatatttccataagattcaactcatcaagcccaataactcacaagcatgacggtccacaagcccgacagcccttgagccgatgacgggacgtcccgacaacaggcagcccgactcagcccggtttggttcggttcggtccggtttggcccaagtgtcccactttacacccttatttctcattcaatacaactccgtttttgacgtatgagtataccattttgtattactctttaccagctttccaatgcactaatgacccaacaattccgtttagccggaattcggccgaaaagtcaccggaaaacaatttatgtcaaaaaagttccaacaatcccccacatgaatagaaataagtctaaacatatgacgattttactaatcctaaggactgacccaactagctagactagacagaccttcgagagtataaacgaaaactaactgtatctgagttggtggcgtttttcagctttgaacctactcattattagtatctgtcgagtttactcggccagatggtgaacatgatgtcttgaaccatccggagtttgatgcaaacttagacagcaggtataacacaacttcattttctcatagaacgaggttctctgtttttgttcattgtggccttgaacatgcctggttaatcatgagggaacttggagagtatagcctcacatattctcctagaaacggccccatttcacactcacaaagtgatttactagctgcttgtatttaaaaaaaatatccagtaaatacttcacatatcttacaaagctaggttcaaatcattaaaagcaaatgcttaacctttacacatacaggaagcattgtacatcattttaggaactaggaagagataacagtctctcagtgcttttaacagttttagtttgatttagttttccctttgaacctatgtcatgggatctccaatctttgtaggtggggttatcatcaaactttctcttaggtggtaggctttaaacccattcctcttgatgatcttgcaactttatttcgattcaaaccttttgtaaatggatccgctaggttgtcagctgccttgatgtaatcgatcgtgactactccagttgagataagttgtcgaatggttttatgtcgtcgtctgatgtgacgagattggctatcacaatgtacacatattgcaggcacaggtttcccccacatgggaatgtcttccaagaaattacgaagccacaatgtacacgtattgcaggcacaggtttcccccacatgggaatgtcttccaagaaattacgaagccattcagcttccgctgcagttgtatccaatgctatgaattccgattccatagttgatttggctgccacagtttggttgctagatttccaggatactcctgcacctccaagtgtaaagatgtatccacttgtggacttagagttgttggaatctgcgatccagttggcatcactgtaaccttccaaaaatgcgggttctttaccatagtgcaagccatggtctttggtataacataggtagttcaaagctctagttatagccttccaatgcttatgtcctggattgcttgtgtagcgactaagtacatttatagagtgcgctaaatctggtcttgtactgtttgtcaagtacattaaactgtcaattactcttgcatattccacctgttgcacaggttcaccagagtttttggtcaagtgaagttgaggatctactggagtttttgcagtcccattagaataatgcttgaaacgatcaagtatcttctcagcataatgggtttgagacaaggtaatgccttcatcagttctaatgatttttatacccaaaataacatctgctatacccatgtctttcatttcaaaatatcttttgagcatgtttttagtttgatttatgatatctgtgttgctcccgaagatgagcatatcgtctacatataaacataacaaaatgtaccccgttggagtaatttggaaatatatgcatttgtcacattcattaatggtaaaaccattagacattataacactgtcaaacttctcatgccactacttaggagcctgtttgagtctgtatagtgacttcacaagtttacacactttgtgttcttgtcctggaataacaaactcttcaggttgtttcatgtagatttcctcttccgaatctccatgcaagaaagctatttttacatcctacatccatttgatgtatttcaagatctcgtaaggctgcaatacctatgagcatcctgattgaagttattctcgttaccggagaataggtatcaaagaaatctaaaccttctttttgtcgaaatccttgtaccacaagccagccttgtacctatcaatatcaccatttgttttccttttaatagtgaaaatccatttactccccaatggtttagaaccttgggtagatctgctatctcataagtatgatgtttcaagatagagtctatttcattattgactgcttccttccaaaaaggtgcatcacgggtagacatggcttctgaataagttcttggtacgttttcagctaaaaacgccatcaagaaatcatcaccgaaagatttctctttgcgagctcttttgctccgcctaggttgttcttcaggttcatgttttgtttcttcaacagtaatagtggctttcaaggttgctgcatctcgttgatcacgagttcgtttttgagttttcctacaaggaaaaatatcttcaaaaaaacgatgcattctttgattctataactgtattttcatggatatctggaatatccgatttataaacaagaaatcgataagcactgctgttgtgcgcatatccgatgaagatatagtctatagtcttaggcccaattgtgacctttttgggaggtggtacagccacttttgttagacacccccacacttttaggtatttgtacgagggtactgtacctttccaaagttaatgtggtgactttgcagtcaccttatgtggtatcctattaaggatgtagttagtggtaagcaaagttttcccccacatgttctgggttgataataggtttttagtcaattatcctaaaacaccaatcatgtcgttgtagtattttaggtatcaatccaaatgggtgtgatgctaacaatcaagatgtgatcagaagtcactaagtcaagccaagcaataacagattttggtgtgtcctagcagtcctaagtgaacatgcagaaaacagaaaatcaagtagaaacaataaaacactcgaccaacacagctcgatgcagctcaacacagggtgtggtcgagtgacaggtcgagtaacggacagaaaatgtaacagggatacttgactgcagagtctgttgccagataactgggtggtcgagtatcaggtcgagtaacagcaaagaattgcagggactaagcaacagatgacaagatgcagtaaacaacggtagagtaaaaaataaaattaatcagataaagaattctcgaggatggggtaattgagtagttttgtttcctcagtttacaggtgattgacatggctcaataaattatccctacacaacaagttcattaaccaaatctaagtaccaccgcaacagagaccctcaagttaacctagtcccagactcaatcaccattgacgagagctaacctaacaggcattacgaatcaacaagttaaaggcaaaacgctccctgcaaccaatactttggtacagggacacgaatctctggaattagttgtttaaacatttcatcgaacaccttttgggcgcggaaatgtctgggctcaaattctggttgatcagaaagcaataggcattaagaacaactaatccagaagggatctatcaatcaaactcaaccacctagcatactgagaattctaaactactctaatccatcctcagaaacctattcactactgagacatcattgaagaaaacataaacgttgaatggagtgaaaacatgataacaacaatgtaatagcaaggtgataacaggatgaacaacagtaaacgaaatcaagaacaaataccgaatatttaatactgaatagataaagagaaatccggattacaaaaggtcaagaacacagtgtctgcgaaataaaacttagaaaaaacttgttctcgaaaatgtaaagtacgtgctacttatagcaaaaatattccgaaaccctaatactcaaaacgacgcagtattgagacggattaagaactgtactcgacccaggtggtcgagtgagaggtcgagtgataagctagaatcttctttttttccttgtgctcgagtgtctggttgagtgcggaatggagaagactctgaagctcgacatcgagtatgtagtcgagtggtggtgatggtgatactcgacttccaggtagagtcgtgtgatcaagtgatggtcaggtggtggaggtgaagacactcgacctgggggtcgagtgaagtgatcgagtgactctcgtggggtactcggccagggggtcgagtgatgaggtgaagtggtgaaatcctatactcgaccaggtggtcgagtggtgtgttgaggtcgtgaagcgtctactcgacctgaggtcgagtggtttggcatgatcaggtccgcttcttccaattagttcttcaacagctccgaatcacttgaaaacaacacaaatatgccacatgcatgcaaaactatcctaaacatgcaaagtgatgacaaatgatgagaaatggtataaaatagtgatgatatggtgctaaagtgatgacaaatggatgcttaaaacatgcaaaatacacacttatcaactcccccaaacttagtctttgcttgccctcaagcaaacaattaagaacaagctagaggtgaggtttgaaatcggggactcagagccaaagcactagataaaccaaatgaaatcaatgtccaagttgatagttctaagctgcgatatgatcgaattctactgaaaaactttagccatgccttactatcaatcaatccgactcatatgctcgacctacacatgttttcaaatctaccaatccctttaacattcattagttctggaacgtgaatcaagcaatgcatcatcaatgaactcatttggctaaggtaaaaggtcaagagacaaagatggtcccttacagaataggcttcagtaacaggggatctctcaaaaaatgattaagctttagtagaatgctaaaggtaagtcccaagctatgcatgcagagataaaatcccatctacctagagtatatcagatgaagctttaatggtaatcccatctccaatcccagtataagaacttacctctaccctttgcattcatgaatcctttaagccctttttctaatcattcttttcttttctcttaactctaggaaaagctttctcaacactttgatacatctagcggatttggatttctttaacaactaaggttcctgtttttaacattttaaaaccgagggcttttgcccatcttcaatagctaacaagaactctttcttttttttacaaatcccaaaacctttactagactttttctgcttctttagcttacttcacctagagtcttttaccttttctcatcaatgaatcaaccccttttttttcttttaaacacatcccaacctaaagtataagcgcccacccagtcctatctagtccaaaaaatgcgaactagaactacatgagacactatctctgtcgttacgaacctaacactttttaccaagctgaatcggaataagacctcacaaaccctcacgagtgatataaggcttgaaaaaaagtctaggtttgggttcgggttaactgctctaataaggagagtcagctacttggattaacaagagtgatcaaaatgaataagaaaatccaagtattttagggtatccatgagttcaaatttgatgcagacatgataattaaagatcaaattcaggttcaaattgatagggaatggtatcagatcatgacagtgtggtcgagtagagcaatctaggcatggttcagttttctttcaaattcattcactacgcaacacacaactaacaacgagggcactgagttaatccggtgaaccaaaatgcttacaaggctatctcatcattatcccctatgcatatgcaacaatcctaaatgaaacactctagacttgatcctaaatgtaatgcaactacatgaacactctttttttgtgaaatcattttctgaaatttttaatttttttttggtttttctatgccttagatgaatgcagacttaaaaatatatacaatgcaacatacttcctgagccctcccccaaacttaaatcacacagtccactgtgtgaataaacttggaagagagtactcaggacaaatccaatcactgaaacaaaataaagaacaaatcacaagagatgatataatataatggtgaagtgaggcgcttacctcagtcgaataatgaacgaagttggtagtcaatggctgcctgtgattgctcccaagccatagacgaaccgccatgttccgtatcagctccagcatgtgggtactcgatctcatcagctctgtggcggccagcaccgctctgaggatactcgacctctcttcttctattgcggccagcaccgcggtcgcgtaaactacgagactgcagaagtcgtctgctcctgctgctagatcgagtgagtgtcgttctcctattcttcctagattcacgaggctcgaatgatgaatgcctcgcagggacatgcagaatcttctgctctctaggctcgggcgcgtcatatctcctcgaaggcatgtcctgagggagctgtcattgcggaatagttgtagtggaagaggagcagctgatcttgtccttcagaaacttgatagccctgaggcacttggcgagtaacttatcctgtttcttgcaccacttctgcagcttgctgttgttcctgtgagcttcgctcaaactcttgcttttcctcgctggaggtatatgctcactgaaatgatacatgctcgtgtcaaactccgcctcatctatatcatatgtctcatcaacatcttctattgtagctccttcggtgtgactaatctcctcagttggcggactgccctcgaaataaagatcttcaagcgcaggcttgaagtcaatgttcctgccctcgagaatcctagtagcgtaaatgcaggggaaaagaatgttggcgattctaatcgatgaatgctcgaacctgtagcggtgaaagtcgccaaccatgtcaaactcagagaactcacatcggcgcaagtgatccaagtccatcattctcggtgctaaccctacttccttgagcggaactccacaaactttcagaattggcgtcacaacgccacccacgcatagtgctcctcttaccttcttcttgccgtttgtcagcgcccacttcatgtacccacacagatggatcaacagaggcattactggtggtgagtcgttaagatctcctctcaggacattctttccttttgtaaggcggagaatccctataagcgctgaatctatcatcttcatgtctgtgttagacacggtgcctgtagactccctggagtaaaaaacattggcaaccgagcgctgaaagtagcgaatcacaggactccggatttggttgctcttggaccgcgtcgagtttagcggtagattgttcccaatagtagcccacaaatccttaagctcttccctgtcaaacctggggttggttccctttccactagggaaaccaaacagttcttccaatttcttgatctaaatctggtaccgctgttcatccactaagaacgtcaagaagcctaaccccatggtatccagctcaaagtctgtgagtccctcatacatttccacttgcagtgtggaaagaaactcgattgtctcctccttatcagatgacacttctcgaacagatgctgcacgtcctccagtaaccccaactgggctaaagtctcatatcagggatacctcgttccccagaagtcattcatctcaaagaatctgatatactcctccactgtaacctcgtcggatttgttcagtagcttcgtctccttgcgccatgactctggctcatactcagttttgatatcctcatcaatcagctcatatctactcgacatcgccctctttcctctagcgatttcagctcttctttgattacgtcgagctgcagagcgttcaaattcatccctatagctctcgtaaacatgttgctctcactccggtctagtggaccaggacttagcttcatccacattataatcagggtccatagaggattttccactgtagttactcatgatgaaacctaaaaacagacgaaactcaaagataaacgttaatatgttagtaatagcaaaaccaaaaacacaatctaaaccagcgtaccggtcgagtaaaccggttgagtgaaactgtcggttttgactttttttttctttttttttttactttgagagttgttggtcgagtgtatggtgaacaagagcgggtgtggagatggtagcaccgtggtcgagtgttgaatgtgtagagggaaacgcggtcgagtggcggtggttgagcttcactcttcttctctttgacaatcgagtgagcttttaaatggcaatggtggagcgagacgcacggtggtcgagtaagggagatgatgaagatggtgaggagagatcgagtgactatgagtggcaagagagacgaggtcgagtttggttgctgaatcgagtgaactggtgatgagtgagaggtgatgacaagctttcgtgggggatgagagcagcggtgttggaaacgatgaagagatgaggagcttgaaggtgataagtgttcagcggtcgagtatgtcaagctttaatggaggagaaaacgatttgattggttgatggtgaaggtggtcgagtggttaagagctagaagtggtgaagccggcttggtggtagaggtcgagtgagtgaaatggagagctcgagttgtttccttggagagagggagcaggcggtgacgatggagaggcggtgagaagcggcgagctcgagtgatatcgcgaggtcgagtatgttgagagatggcgatgagagcgatgaagccgagtaagtgagagagcgggcggtggtcgagtgagagttgtgagggaaagcgatggcggcttgttgtgtcttttggatgcaagaatgagaagaagaggtcgaatatatgaagagagaaagtgatggggtcgagtggtgatggatggatgatgatggcgttgaagacaagtgatggagagaagaaggggatagatttcgttatcaccttgtagggagcgtgggagacatggcagcagcagtgggtccctcatctgtctctttgttttgaatcattactctatcttcactaggaaaatctcaggaaatcctacaatcatctctaaacttaatgaactctctgtaagactctgtagcttctgttggtcgagtaaaatgatgatttaaatttttttgagtttttaaacatcactcatactcgaccaatgtactcgatctctaggccataagtagagtaaaagttttgaatttttactctaccttcacgttattcttttttttttttcctgagaaccacaaacacaactaaaacaaatcaaaaataacaagaaagtaaaaattatttacaaggataatcatgggacttcctcccaagggagcttgtttaaagtctctagcttgactcctcacacttatcaagaagaaagtgaatgatagagagggtctgcataatcctctctgatatcatcatcatactcaacgtcttccctagagaggtctccagcagaatacttaattctcatttcttcaaaataagcttctttctcttctggagggtaatctgtctcttcagaccatcttgaagtgaacttttttctcgggatagtgttaatcccgcctttaggttgagtttccttctgcatctgattcagcttactcctaagttcctcaacagagtgagctagcctctctatagtttctttttgcttatcagacctctttttaagctttttttattttctcagtctcatacccttctcctgggatcactctatagtctttagaggttttttcatcttctgttgactcttgtggaattttgttgatgtcaaactgcaacttgttgtgctttccaaggttgagacttattttcccttccctgacatctaccacgtctcccactgaagctaagaagggtcttcccaggattaagggatccttatgctcaacttccatatccagcaccacgaagtttgtagggacttctactccattaatcatgactggtagatctttcagcatgccgaagggttttctgtaagacctatctgcaaggatcaaagtcaggtcacaaggtttatactgaataaactctaaccttcttgcaacagagagtggcattaagctgacaaaggctccgagatcgcaaagacaatcgctaaaagctaattccccaatggaacatggtagagtgaaagatccaggatcttctaagtttttttgaacaatcctcttatcagcagctcgagatggagtggcatcactttcatcatctaaatcttgatacatattgatcctttccagtatcaaatttctcacatctttgtgaggatcatgaatcaggtagagaacttccatcagtggcatcactgcttcaatctcgtccagctgctttgttgcagcagacttgtatctctccatccacgctttcctgaatgtccacggaagagcacgtgagggtaatggagtaggtttgaatcgtttcactattctcttgatagtggcggccttctcttccgaggtggattgaatgagatggcgaaaaccatcagaatggttgaattcaacaacagagacttcaatctgagtagaagcctccccttcttgaacatcattgtccccaatgattaaatcagggacatgtcgagttggtagctctcgatcatggcagatggtgatggcgtgagcagttgcatactcctttggattctgtattgacttcccaggaagtcctgtaactttaggtgcagaggtagatgctgattggccttctaagtatctgactttggtattcaatgcctccattttggcattcaggtcagcttatggtgcaattcagataatttcttagcaatttccatcgagttagatgcttgtccctgtagcagatgttgtaccatgtgtttcatttcagcatcaggagcagcaggaccttggttttgctgaggtgcaaacccaggtggtggtggttgctggtagttcccctgaaattgttgcttgggaacgaaaccttggttgtagggaacaaaaggtttgttctgaccttgttgttgctgtggaggatatacttggtcttgtggattagcaacgttggtgctgcggtaggagaggttggggttgttggttttgaagttgttataccctttgtagccactctggttgttgttgatgtagctgacctcttctaactggttatcctccccatcttagacttgatattgctcgtcatcaacaaggaagtgcacatgcttctgctggctaagaagaatcatgtctagcttgtcattcagcgctttgatctccttcctgtgtttgtcatcagagtcagttgtgcttctgacggtcctatcgcagtcgtcgttgtaattaccatctgattgagcaaggttctcaaccaattcccagccttcttcaacatctttgttctggaaattcccattgctggcggtatccagaagcattctgatgcgttgtaaaactcctctataatgagtgctgagcagagaggcattagtgaagccatgatgagggcattggttggtataacccttaaaacactctcatgcttcacagaagctttcaccagctttctgtaaaaagccggagatctcatttctgagtcttgcagttctggcgttggagaagaactttgatagaaaagccttcttgcaatcatcccaggtggtgattgagtcatggagcagattcttctcccagatgtgtgctttgtcgcccaaggagaatggaaacaaacggagcttgaatccgttttcactgacaccattgatttttgttaggttgtagagcctatcgaattcatcaaggtggtcgagtggatcctccattggcaaaccagagaatttgtttccctgaatcatcgagatgagaccactcttaatcttgaagttgttgttctggatagcaggaggtgcaattcctttcttctaacgatggtcccttggtgcatctccagcaccaatgttgacatggccattttgttgattcttttcgtcagtcatcgagtggttgttggggcaaaaggttgactatgtttctcctttctctgagttcgcgagctatgcggtcgatgttatcgttgaaaaggaggttctgattgcctgttgatcgagtttgcatacagcagaggtgtacctagatcaaaaagacaacaagaaaaacacacagttagcaaccgatttgaaaattgaaaaagaacttgatctaagcaagtttgaaatctcaaatgtaacacacaaacacccaattggcaacggcgccaaattgataataggtttttagtcaattatcctaaaccaccaatcatgtcgttgtagtattttaggtgtcaatccaaatgggtgtgatgctaacaatcaagttgtgatcagaagtcactaaatcaagccaagcaataacagattttggtgtgttctagcagtcctaagtgagcatgcagaaaacagaaaatcaagtagaaacaagaaaacactcgaccaacacagctcgatgcagctcaacacagggtgtggtcgagtgacaggtcgagtaacagacataaaatgtaacagggatactcgactccagagtctgttgccagacaactgggtggtcgagtatcaggtcgagtaacagcaaagaattgcagggactaagcaacagatgacaagatgcagtaaacaacggtaaagtaaataataaaatcaatcagataaagaatttccgaggatggagtaattgagtagtttcgtttcctcagtttacaggtgattgacatgctcaataaactatccctacacaacaagttcattaaccaaatctaagtgccaccgcaatagagaccctcaagttaacctagtctcagactcaatcaccattgacgagagctaacctaacaggcattacgaatcaacaagttaaagccaaaacgctccctgcaaccaataccttggtacagggtcacgaatctctggaattagtggttcagacatttcagcgaacaccttttgggcgtggaaatgtctgggctcaaattccagttgatcagaaatctataggcattaagaacaactaacccagaagagatctatcaatcaaactcaaccacctagcatactgagattctaaactactctaacccatcctcagaaacctattcactactcagacatcattgtagaaaacataaacgttgaatgaaatgaaaacatgataacaacagtgtaatagcaaggtgaaaacaggatgaacaacaataaacaaaatcaagaacaaatactgaatactgaatagataaagagaaattcggattacaaaaggtcaagaacacagtgtctacggaataaaacttagaaaaaacttgttctcgaaaatgtaaagtacatgctacttatagcaaaatattctgaaaccctaatacacaaaatgacgcagtattgggacggattaaaaactgtactcgacccaggtggtcgagtgagaggtcgagtgataagctggaatcttcttttcttccttgtgctcgagtgtctggttgagagcggaatggagaagactctaaagctcgacatcgagtatgtagttgagtggtggtgatggtgatactcgacttccaggtagagtggtgtgatcaagtgatggtcaggtggtggaggtgaacacagtcgacctggcggtcgagtgaattgatcgagtgactcttgtgggggtactcggccagggggtcgagtgatgaggtgaagtggtgaagtcctatactcgaccaggtggtcgagtggtgtgttgaggtcgtgaagcgtctactcgacctggaggtcgagtggtttggcatgatcaggtccgcttcttccaattagctcgtcaacagctccgaatcacttgaaaacaacacaaatatgccacatgcatgcaaaactatcctaaacatacaaagtgatgacaaatgatgagaaatggtataaaacaatgatgatatggtgctaaagtgatgacaaatggatgctcaaaatatgcaaaatacacagttatcattggctaacccagattcctgcaacagtgcattcatcatttcttttagagttcgattctttcgttccgcaaaatgcattgaatggctcattatattctcatcctctatcacttcgaactatttttatagttctctgaagttgattttctacttcgagtgtaaattctttgaattttaccagagcttcatccttgctatgtaatagatatacataataatatcttgtgcaatcatctatgaaggtaacaaaaaatttcttaccacctctagtttgcacatatttcaaatcacataagtctgtgtaaattaaacctagaggttcagttgttctttcaactcgtggtgagggagttttagtgagttttgcctgtacacatagttcacatttttcttggttagttttgaatttcggaattaaattcataggttcagttgttctttcaactcgtggtgagggagttttagtgagttttgcatgtacacatacttcacatttttcttggttagttttgaatttcggaattaaattcatgttttgcatttttcgcattattttataattcacatgtcctaaacgttcatgccaagtagtaaacgattcaaccaagtaagtaataggattttcattcatttccacaacagaagcagaagctacattttttggaaagactgtcattacagacattttgactagtccacctttaacaaaaccctttccagagatgagattcttccgcatgtcaggtacatgcttcacgttttgcagagtaagctcacgtcccaagttagcttcagaaccactttgcccttaccttcaatcatagacatcgctgtgttgcccatgaagagttgttcgtttgacttgttcttcacataggtggagaacatggtcctatctgtgcagatgtgtgtggtgcaaccagtgtcgtagtaccactccacttggttgtcgtccaccatgttacattcagtgaccactgcaaccatatcctcttcagttaggtttgcctggctcttgacatccttggctttgctcttgcaaacatcacccttgtgtccaatctttccacaatgatgacactttcctttgaacttccgctcaggattgctcttcttgaagtttgttgtcgatgaaaccttcaagttcttctgaggaatagagaacccttttcccttgcctttcagcttggccttatgctcagctacattaacatcatgcccttgattctgagcacccgcgtgagccccataattgttgccttcaatcatcaaccttcggacgagatcatcaaaagtcattgccttacgtttgaagttaaggtaattcttgaaatctaaccagcccggtggtagcttctcgatcaagcaattcgtcttgaagacgttgcagatcgacatcccttccaactctatctcttgagagatacgttgaagagcctccacctgttccatgattggtttggagtccaccatcttgaaattcagaaactttgcagttgagaatctttgcattccagactcatcagtcttatacttgttctctaaagttagccacagtgttttggaagacttggccttgttgtagaggtcaaacagatcgttcaccaaacggttcaggatcagacctttgcaacaatagtcaccttgagcccaggtatccatacctccaaccgtatacacatatgtggtaccttgcggaactattggtggatcctctgtgaggtacctttccatgtttatgctgaccaaatagtagcgcatcttttcttgccacgtttgaacccagatttaccatcaaacaagtctggcatcatcccttgggaagcagaggatggtatggtagtgttggttgaatcattagcgaacagatttcgacgcacattatccataccagaatcggtgatctgtgtcttttcaagctctttcgcaaggtgcaaagctacctcatccggggtctcaacaactgtggtgttgccaacgatcttgctgttggtgttgatatcagtcattcggttcacaaaaaaaaagatctgattagtatattaaccaaaaaattcgcttaagaagcgttcgcagaaacttgttttgcaaatttcaccgatatcagtcattctgttcaccgaattagttttgcaaactcgcttaagaagcattcgcagaaacttgtttcgcgtttcccaaactcctcaagtatgagtgttcgtggaaactagagaagtttatataagaaactgttcacaacaatcgctacgtagcgtttgcgaagcagtttagaaagaggagaaagaaagaagtaataacgttcttctataaaccttctacgtaagcacccaaagatgatagcggaaacaatttttagaagattttgaaatcgttttaaaaaattcgaaaatttctcaatccgtctagagcgataagctaaaagcggatttattgaattaagattgtaggagcccaaaaaccgaattgagaaacaagtacgaattttattaagataacaataacaataaaattacagtaacagtaattaaggacagaaagtaaatcacggaggcaagatatgatatctttttccttaattcaataaatcggccgtacgtgctttttggacatcacgatttttgaatcccaggatacaaccgatcacgaactaatacccgagcacacaagtattagactcaagcgaactagatctacgatatactctcgaaactactaaactaagaacttacttttaagaagcaagagagagagaggagagactttagaatttagagtgttttgtgtttgagagcttgagaaataatgagacgctggatctctttatatagtagagggggataagatttgtgagaatattttcaggatatgcatgatatattttgagattatcctgagaatattctgagactatcctattctgagaatattttgagactatcctgaaaatatttccataagattcaactcagcaagcccaataactcacaagcatgacggtccgcaagcccgacagcccttgagccgatgacgggacgtcccgacaacccgcagcccggctcagcttggttttgtttggttcggtccggtttggcccaagtgtcccactttacacccttatttctcattcaatacaactccgtttttgacgtatgagtataccattttgtaaaactctttaccagctttccaatgcactaatcacccgacaaatccgttcagccgtttggccggaatttggccggaaactcaccggaaaaaatttgtcaaaaaagttcgaacatcaacttcaactcatcatccattttattatcaggtttctttgtttaagagattttttcaatcacttacaaactgaaccaattacctggacgcttgaatagacccatgaaccaatgatcccatggtcgagttttgatcaacagaaaaagccagagagcatcttacttaagttcagagttttacattttttcttatgttttcagatgtcttccgtaatgtaatctcggtgtttaaaaatctgtttcgtctatctgttggctttccaaacaacttcagggttttactgccaattctgctaaagaagtcagcaaatctaaagactcatcatcaaggtaatgcattagaaagttggagcatatgaagcgattataataaaaacgataatcaatgataaggtgaaattaaatctaaattgtctttcctcttgtttgtaccgaggttgtaacaataaataactaaggggtttggggagaacggagtaacttctttattaatgacgaacggaaagacagtaattaacagaacggaaaaccgtaagtacagaacggagaaccgaaagtacaagtcggaaaactaatattaatggtcggaaaacctgaaaatacagaacggaaaaccaaaaagtaagagataaagagctaggcaacaattctctcttaaattctctaagtggtgacttaggttctccaatcccttcttagtagtggatctcctcttatttataggcaagaagctgatctagggttctcttagtctctcttgcgatatctccgttttgcccttctgaatttatcaggctgggccgagccgtgatgggccgagcagtcattctgatgggccgttgttctgatgggccgttcttccttgttaggagccttattgacttgttctatttgtgtttgggccgaattgggcatagagggcaaagcccgtatcccataattagtcccccccgagttcgtcgagagaaggtttcttgcgattggcgaatatttttctgaaaccggaaacatgccaatttggcccgaaccaaagaaaaattctttgtttgagcaagtgtggatttttgcaagagtcggagaatcgcaataggtggaaagatatatgctcgtttgagagctcgacgatcttcgaagatagatgattgtaggagagcttgactatcttcggagataggcgctcgtgggagagctggaagatctttgaagataggcgcatgcgagagagcttgaagatcctgaagaaaggtgctcatgggagagcttgatgagtttggagatagtcgctcgtgggagatctataagatcttctgagataggcgctagcaagagtgtctgacgatcttggagataggcgctcgtggaagagctttaagatctttggatgtatgtgctcgcaggagacggaagagctcgacgattttggagataggcgctcgtgggagagcttgacgattttggagataggcgctagtgtgagagcttgatgattttggagataggcgcttgtgtgagagcttgacaatttcggagataggcgctcgtgtgggaggttgatgatttcggatataggcgctcgtggaagagctttaagatctttggatgtatgtgctcgcaagagacggaagagctcaacgattttggagataggcgctcgtgggagagcttgacgattttggagatgtgcgctcgtgggagagcaaaaagatcttttgagataggagctcgcgggagagcttgatgatttttggagataggtgctcgtggtagagctttaagatctttggatgtatgtgctcgcatgagacggaagagctcgacgattttggagattgtgggagagcttgacgattttggagatgtgcgcttttgcgagagttagtgattttgaagagttaggcgtttgtgcaagagcaaagttgttttaacgaggaaagtctcggtgaagatactaaaatcgatgcaaggcgtgctggtcttgtataaaagagctcgatgaggtcaaatttttaggtgtacttggtgagattagtgtgaggagcatgagagataaaggaggtcggtcgtagagatgtgttaggcgagatcgatgtgaagtgcgtaaatgtgagcacgaggtatttgagctcgaccacaattgttcgttgaggtcggtacaagttgcgttgaggttgcacgatatgcgttaaggtcaatgcatgttggatcgtgcacaaggtgagtcgaggtcgacacaaagcgtgtaagctcggcaagaatctttcgtcgacgtaggaaggtgaactcgttcttgcttgagctatgagttcgaataggtgagtgagttcggtgggactgagttagcgaatgaggtcggtaatgagttcagggagaatcgttgtgagatttgctggcgattttggtaactgctttagagctaggcgaactaggattttcgcaatgtcttatgatatattgcgaaattgcatggcttcctagctctaatctgctgcgaatttgcaaagctgcctacctccgatatgttgcaagtttgcgagacagcctaggtttgttcttctacaggtttgcgggaatccttaactctaatctggtgggagtttgccgagctgtcaacctttgttcttctaggagtttgactagctatgtagctctgatattctataaatttgttgagatgcctagctccatgcttctaggagtttgtcgagctgtgtagctctgattcactacgagtttgctaagatgcctagcaccgatatgctaagaatttgccgagctatgtagctctgatccactgcaagtttgctacgatgcatagcaacgatatgctgggagtttgccgagctgtgtagctctgatccactatgagtttgctaagatgcctaacaacgatatgttgggagtttgcgaagttccctagtttgatcttttgcacatttatgggaatgcctagcgctgggtgaagaacgatcggcgataagtcttgtttggtgcgatggatcttgtcaacaagatggttctgttccatgtgatggctttgtatagtgagaaggttcggtggaggttgaacgttttgtaagtgataaatgtagtgtggcatcgacaaaggtgtagctcgttatgattattgatgcttagcaagactggagattagtttggcgatttgatgaagattgctttgtagcttggtgaagaacgctcaatcgtttggttcggcgatgagaatgctttgtagttcggtgaggactgaacgctctgtgttttagagctagaaacgcttgttggttctgcgatgaacgcttggtaagtaacgctcgcttgttaggcaaggattgaacgttcgaggtttttgagctaggaacgtttgacagttttgttaagaacgcttggtgagtaatgctctacaaggaacgcttgacagggaacgcttgcttagtggatatagatttacggggattggcattaggttttgtggatccgtgtcgagtagcaaggaagtaggtccgcttagcacaatcgtcgaaaacgattagtgtgaatgttggttgattttgcgtggtaccaaacttggttggcattacgatggattgttatggccgtgagtgcggcaaacttgttttggcgagcgaggagatgacgtaagactgagtgatgatgttgattttacggatcttcttttaggcatggggagatcggcacgactttaagttatgtcgtggatcatgtcttcgtcatgcattttagtaaaggaaatgatctttgtatgtgcgagatcgagctcggcttaaccgtaactggtagtttgattcagcatgatattgtttgttatttgggagcgagactaagcttgacttcagattagaatgcaaggctgggcttggcttatgttgcgaaatttagattcggtgcgatctgcagctcggcttatcctatctaaatacgcaattaggagtttgtcttagagacgaagtgacaatgatgagacagacggagaatttagtgatgacttgaagcttgttcttgagttttttgtgcaaggttatcctaagcttatattttgcgaggttttccttggcgtttaagcttgatttcgaaacgtattatagggcaaggcgtcccttgacttatcctgtatacgttgaactcgaatcacaaggcttacgtatgaagtatgcgagactgactcgtcgtactttgtaggtgcgacgctggtgtccggcttaccctgtggatgcctctaggtaagcgagaacgtgcgagcggactcggcttatattgttctgccttactatcagcttatttagttcgaatctgggtcggctttaaatctttaagtgtaagttttagcttacttaagtaaagatgtggattatttcttcgaaaacaggttttttagacctatctaacgagcaccactgcatccatgtgggaacgcgttttagaatcgaactcctggccagggagacgatgtggggatgacaagtgttactcgtaaaagttagacttgtagtagtaacttgtgtgcgcgttagaaaaataacgtttagaagaagttgcatatgtatcacccagaagggattaaaccaattgttgtctatatagcaaatgagctcggaagcgagcgtttttttttttttttttttaattttgatgtatgcgcttagagctgagcgtatccgtcgtcgcggaaattcaggttcaggaaaccaacacaaggcttgtcacgcttagccatgttgatctgccaaagaggattagggacgttggtaagttgggtttagggactgggtgggttgtcttcatgctaggcgatgagttcagcgtgagatctaaatgaggtgaacacaccgaggatagtggagagatcgacacagggagaagcaagctcgtcatagaagaagtttgttttgcggattactttgatcaccgtgagctatcctttgcgacaattctgttaagtgtggagctcggcttagaggatgctcgacgagttggcgagattcgttggagaggcgagcttgaggagccagaagcggagctcggcgaagatgatgtgcggtctagcgaggttgagagattcgttccacctccagttatcgcggatttaatgcggagctcaatggattggatcttagcgaccatgagggagagttcagcgagtatggtggactggatcgtctcatggtggggaacgggtttgacaatttggttgcgaataatctttccctctttcttttgagatgtttggccatgtgatattgccgattgtcgttgctccaatgagtttgtacttcaaagatttttgtgtttggcgccttgtcgacaagacttcttctctggtcggtgagaccttttgactggttttacgctattacttcccaaggttggagcaacttcaagtcgtcgggtcgactagttggtcgagtcggcaaggcctcttgcacctgattggtgtggtctttaagttactcgatcgcaagttctccgagtaaaaggtcgatgaggttacttgacttggtcggtaagacttcttctaaggttggcattgcttcttaactgggtcggcgagctagacgagctggacgagctttgcaattaagtaacgaaccgatatgtatacgaggagatagttgctgaggagatgtgaaaagcttgaagacgagcccgatgtggtagttggacgagctggcatttgacgagcaagaactggtagattgagtagttgactgttgacgagaagaaacttttggattgacgagctgacagtcgatgagctggaactatcggattaacgagctgacagttgatgagcacgaactgtcggggttgacgatttaacattcgacgagcaggaacttttggatagacgagctgacagttgacgaataggaattctcgggttgacgacctgatagttggtgagcacgaactgtcaaattgacgagatcagcgttgacgggcatgtatatcggattgacgagctaattagcaagcataagactatgtgtgctatgagatggacgagattctcatgacgttgaagctcagcagttacgccgttttgagatgagctggcggttaggcaaactaggcagctagacgacgagctatcagttaggcgacgagctggctggtaagtgacgagttggctgctaggcgacgaacgatcagttggacgacgagctggctactaggcgacgatctatcagctaagcgacgagctagcttctaggcgatgagctggctacttggcgacgagcttgctgcaattcgacgaactggcggctaggcaacgagctggacgaaggagatggtggctatcgagtcggattgaggtcgtttaagacgagtttgtccaggtaagtcctcttggttgcagttttatcgagattggaatagtctgtcttggcagcctttgaaggaagatagcaggtgcaggtgagtaaccgggtcggcttgaggggtatgcttgattccctactctttcaacggttatgttgaggtgctcggccgtccttgcatcatgttagttgatccagttgaagaaaggtctaactctggtgcagagcagagttatatccttcatagtaatttgtaatttttagagctctcgatcgcgcgcaccgatatcgtcatcttctattcggcgtgtccgagtgtcgatgtttggctggttgtcacggttcggcgcattttcacgggtgtgctcgtcgatagacccaacgacgatggaagcatgcctgttgcgtcggttcgccggtctttctttgattggagttcgctggggcggtactgtttcggcatcgctaagttgtcgaccggcgcgagctgcagaggactggagttgctagatctgattctgcgaggccttttgggcagcgacaatcgcgttgatgcgttcggcagttcttgcgtcctgtaagtcgagtcggtcgaggtaagatcggatgacttcgtcgagattggtttttcgtggagttgtttctccgggttcagcaggagctgtgacaagagttacgtcgggagctgcgataggagctgcggctggaactgcgacaggagctgcggctggaggtggtgtcgttggccgagctggtggtggcatcgttggtcgagctggtggtgcggcacgaggcgctctggttctgactccttaatattagaagaaaactctgcctagccccacagtgggcgccaattgtttgtaccgaggttgtaacaataaataactaaggggtttggggagaacggagtaacttctttattaatgacgaacggaaagacagtaattaacagaacggaaaaccgtaagtacagaacggagaaccgaaagtacaggtcagaaaactaatattaatggtcggaaaacctgaaaatacagaacgaaaaaccagaaagtaagagataaagagctaggcagcaattctctcttaaattctcagagtggtgacttaggttctccaatcccttcttagtagtggatctcctcttatttataggcaaggagctgatctagggttctcttagtctctcttgcgatatctccgttttgcccttctgaatttatcgggctgggccgagccgtgatgggccgagccgtgatggccgagctgtgatgggccgagcagtcattttgatgggccgttgttctgatgggccgttcttccttgttaggagctttattgacttgttctatttgtgtttgggccgaattgggcatggagggcaaagcccgtatcccacacctctataaactcaaacattttacccaaaataccttaaaaagaccttaaaattagcaaaaattgggtctatgatggtttcacctgtttgattgtcgatccatgattctagtgtattttgcatgacttctgcttagactctgttgaaaggtttctcttagattttgtcatgatggtgtgacttgactgttttactttctcaggagaatggggtcagagggaaacatgaagaacttggttgtttcacaagtaaccattagtgggtttggggaatcaactactacaaaagaacttacagattaccttgaaaacgaagtaggacaactcatttgctcggtatgagaataaattgacaatagtcttagattatctaaagacacaaaggatgaatacagagcacgtgaggccgcagacttacgttcaaagtaggggtgcaattgaccccgattaaatttaaaaacctttatttacccattgtacgaaatgagtcacgcttcctctgaaaggttcaaaatcatttgggaagtcaaattgaatggccggataaaaaaatattgtttataagcatttataagaaaatttaagtaatattttaaaaataaaaaagcttttttaacaagatatttataagctttcataagcttttataggattcttttataaaaaaaaaattataagcttcaataatttaagtttttaaattttcttataaaaacttatctaagaagtcaacatctgataaaagcttataaacatcttataaaccttataaatattttcttaattataaacatcttataaaagcttataaaaattttattagcttataggagaagtcaacatctgatgaaacgttttataatggaagcttataaagcttatagagcttataatttagtttattaaatttttttcataaaagcttgtctgagaagtcaacatctgatataagcttataaatattttataaaatactgatacttttagtactgataaatatataaagataaatctgatgaatacggcgtaacaataacataatttaaccgtagtccaatgataaatcagctatagaatgttttgtaaactgcaaaaaagtcatttgacatcgattcaatgttatggacactttgttcaacatccctgttgtatgcttgattacaaacctaattttttgcaaataagcaaaccatgaagcatgtcgaaaaaactattttgagaccccgtgtgtttaacgcgtcatgattggtaaagagaacaacagtagatgaaataaataatgtctccaatctttgatgacttgcaccacgagatagagttctacgtcatatgtgttatgatgcctcatgatcctaaaaatcttttctctaaaaaaactatagactgaccagtttgacttaagacagctccaattccgcatttagaggcatcgcagtgaagttcaaaaggtaaagcaaaatttggcaaaataagcacaagcgctgaagttagcttttcctttaagacccgaaaagcttcacatgttgcaccagtccacatgaaagtagaggctttaatataatatgttaaaagagatataatgctactgaagagaggcacaaatcatcaataaaatgaggcgagaccatgaaaactcctcaagttcgtgacagatttaggtgtcgtccaagagttagttgttgatatcttagtttgatccacttcaagacaacaagtcaggataatatacataagaaaatgaatatgtaaaataccaaaaacacattttttagttgctgcaatttttcaacgaaagactgataacacgtcctgcaaggagacacttaaaatcaagatgtcatcgaactaaaccacgacacaatgatcgatgcagtggcagagagtttggttcatgacaagcttaaaagtacatggtgcattcgataaacaaaaggcatcaccatccatttaaaaacaccctctcttgttttgaagtttgaacacaattgctcggtctaatatgaatttgaggataaccactcttcaagtccaatttagtgaaatagaagaatacccaatctagtcaagaaaattgtaaaaaacatggaatcgaaaatcgataacaaacagtactctaatttattgtcgggctataaacacacatgcgtaaagtcccatccattttgggaatgagcaacgccaacaccgtacaaggactcaagctttcaattagataaactttagcaagcaattcctctacttggcgtcgaagctcatcgtgttcttgatgacttattcgatagtgcagacaattaggcaaaaccttataaggaggtaatatcaatacaatgttatatatcacataatggtggtaatctctcggcaaacacatcatgaaattctgagaaacacattactctgagatgcgtaatcagttttggtgtttagccaagctagtcaataaaactttgggtgtgtttcaataaacaatgccaattttgttgctatgttttgagaagtcacatttagtacagctgctcgaagcaatgataatttgccaaaacttaccttgtatggtacaaaaaatgttaattcataaccaagcattgttaacaccttgtggactgatgcagttaagacgtaacatcattattgaacctgtatcaccctccactagctcatcttaaattgagggactattaacatcaagtgcgacatcaagatgattgtccatggcgtacaccaccacatccaaaacatttgaaagacctaaagcaaggctttttaatcatagtgttgttatatccaccatctggaactcgtgtttgatccatcaccattgtgctggtgttagtcacatgtctgatatgcgtccgtgaattactttaagttactgtcagattttgagtttattgtttaattaaaagagcatgctggttgttatggacaatatcgtcttcctcattgtccttcttgttgttaagagcttcacaacaagctaaggcaatattggagcaggatctcgtgcttgtacaattgcatgaacatacgtttctatcgaggtttacttcgtatcacttataatttgttgaaatgctgctaacatctcacgaaccgcatattgctagtctttgacttaggagacatgattgggattagtatgtctcaggtaccaactgttgaagcggataataacaagagcttctcgtatatcaatggatcacgacaagagcatgttgcttagaactcaagccttctttgagaagaaaagaggagagagttcaaaaactttattgatcaaattaattattttggactttttttttataataccaaaattaaccttattataaattattgtaatttactattattataaaaattataagaagttaaaactagatttacgtattattaaatctcttatataaaaaaaatttgtcctaaaaaaatcttgtttcgtattgaaaatcctcatatttaagagggttctcaatcgacgaatctagcgtattttggatgttccgttggtggtaataaatgtaatctcagcactataaactctcaagcagatttatgttgaacactcgtatcaggcccggctcactaggatggggcagaggtgcgacggcctaaggtttatccctacttaaaaactttacataagaaaaagccttattcttggaaaaaaataattgtccaatataattgataaaaattccaaattttgttataagatatattaaaaagtctcatttttatatctaaacgatttcttttatatacaaaagagcccatatttttgaaaaatgttaaaacactcaaaatttacttcaaagaatgcccaaaaaaaaaaatcataacaaaaggtccaaaaaagaaaagtttgccctaagcctcaaatttatgagtggattttcatggatgtgcatgataacctctttagtgacaaggttttgatatttctagctagtactattggtactttcaagaaattgcacccgaacagagaaataggtactcgtttagatatggtgcaaacatgttggtggtgaatggtgatgaacctacagaaatcactacatgaccgaatttgtattacatatatattttaaaatttgtgttccatcatcgtttagctaagttatgtttttattataacatgtataatttaaaccaaataaaaaattgagttatgcattttaatagacaagaaaatactacataatttagagtcgagagaaaaaaatataggttacacatataaataacattgaaatattttataaactaaagaatctaaataagcatgataaatttatcaaaataagtaacacaacaaaagttttttgttggtcttatgcttaacaatgatcttatagaaaaaaattatatgatatattaaatcttttttttatataagataaatcagttatagtaaaatgtaactagttttttttttttttacgtcaaataaagagaaggaaataatttatcatatatatagaaaaataatctcaaataaataaaacgatattttagtttgacttaaataaatagaaattaaatatctaacacatataaattaattttatctacagctgccttttctgttttttttttggaacaaatccaaaactatgtctataatcaaaataatataattgttataaatcataacgcaaatgaaataatattatagaattagaaatatgagggggagagagtagacgagagaaataataattgtttgctcttcatcttatgtcttatgattaacaacgaacaaccatatatatacaaacaaaagacttggtaaagaagttttgtagtttggggagaaagactcttaatggctaagtcttatataaataaaatcaaaaactagatggataatcactaatgattatttgtttataacactcacccttgattatccatcactttttatgaattacgtactgtctcgttaaaaaccttatcatggaaaaacccactaggataaaaaccatgacaaggaaaaaagagtacagtgacgtgaactccccctcgaagagacttcacaggtctcgtaggtgatacatcttgatcattcttttcgttccttttgatctcgtcaatatatgacaaagattttgtaagagagatagacctttacttttatgtctatcttttgcgtgttctttgctgcctcgttaaaaaccttttcatggaaaaatcaagtgggataaaaaccatgataaggaaaaaagagtacagccacgctcatcatcatatgtctcctcctggaagcatcttcttcaaaagatgaattttgatatgtgaagaagatttctgaatgttgtagctcgaagcgcttttctgctacattgtgttttgggcgaacgtactggaaatcaatttcttgatttttcttgaggtcttgaatgtaacagaagaatcttggagaaatatttcttgtcatgtcgctcttgacatagcttcctttgaactgggaaacatatgcaacattgtcttgttgttgactcttcattggtgactatattgcttgcttcttatatatgttgatgacgttaatctaagccatacatctttttgacatgcttcatgaagtgcaataattttggcatgacttgagcaagctacgaccaaagtctgctactagaaacaccgcgagcttgttgttttgcgatatatttttatatggtttgatataaatccttcatctataaaacttattaaaccaaaattcgagatttctagaataaaataagtccaactcaatctaaccttgcagattataaaggacatgttcttacttatctcgatgtctagccgagggagatgagttaatcctgcaagtagatcaatagcaaatgctagatacaattcacaaaatatataaatactcgtcagcatttatatatagtgtttcatgaccaaatatatagagtcgacttcctttagaagtgactaatataacatcaattactttagatgtttagttggaatatctggagacacttttgtctttccaagatcttttattccaattaactctttaagagttttgatgatcaaaatcattatgtttataaattccagggaatataattataatatatatctttcaaggattagttctttagacatcccatgaggcgtagttaagttatttatatagcatcaattcaatatcgagtgattttgacaaatcccggcgcgacacaccgttttgtcttaagtatcataacactctttttgatgtttggaccatatgtccagaaattactcgtttcttatacgagattaatatagacttgactctctttatttattggccaatatatctctttacgctcacagagcggagattcatgatcctcattaattacattacacgctagatcattataaatgattttatttaggtacctgattttgttattaaccatgtcaatcggtctctttactcttcttcaggagtctctttactcttctttaagagtctatatgctcctcttttaagagtttaatcctctatataacaatttgctcttttttcttttcgagggttttctttatatttgaaaccaaaaatgtttatcacgttctttaacgtgttatagacaataatatgtcatctgccagagacatattttttttttggagcatttttagctgggatatgagtttttctatgaactctctaagttcatatttatttgtatgaggatcaataattttataaaatctcattcatcagctgtttgcatttgatttgcaatatactctgaatagtgatcattttgaatttttgaactcttaagttcatatttatttgttcaaagatccaaactattcaataaatcttccatagtgatggagaatttttatcatcaacattatgatttgcaaatcttgcaattggcacatctctaaaagatggctcaatattaatagagtgaagatttatctccaacatctctaaatttcatcctctttggatgatatttttatgtggtgcagaagagcatttataatatatatctcacacccataaaatttaaaatgataaatatttgatctctaatcatgtataaataacatgagagaaatatttcttatgaatcgttggccttatatagaatcatcatgttccatataaaaacatggagattaaatcatcataaattgttttgcaatcacttggatttgcattatgaacgatttattaaagctcaatttgagagtaaacatcatttttagatgttccactttatgttaaagtgataacttttaggatatgacttcaccagagttatctcgctctagggcgtcaaattcaccaaagtttatcgacttattatcgatgtgggattcctttaattctccccctcgagataataactcttaaagtttattcatctcgaaatgaatctcactttaggatcaataacatgtatgaacgggatcatatatttaaatttggatcctcttaaaaatgtgggacttgtaattattcctcccaagattatggcttttcaagcctatttctcttgtaccggatctaattttagatcggttatattttagatttaatttggagaatatttaggaaatcgaccatcatatactatgagcttattaaaaaaatggtgatttggccaaaaatcatatgattctggaggcatagcctaccacaaaatgaaggagaaggtatacaaccatcgaatccataatatataaataaatttaccatatattaaattttaccatctttatttttgtatgatataatcatacatgtgtgtgtctccattgtggtcaaacatttgacaccatattaatttatagtctcaatataataataataaatatctttaaaactgtacgagtttccttggagactttggaaaacacaaaacatcgattattatgaatctgatgtatttggaagtcgagagactagctcatctagatcttctcattatttgtgcactttctaaacatacatcgacaagtgcttcatatattctcataagaaaactatatttttaattttaaaaatactttaatgtttttaaatattatgtaacacatattaattttttacgaataaaaccaatataaataattaagcatatatgttcaataacaatttgtagaatagatgaatgaatggcaatgctctctgagggcgattttctgggcgacttcgtacccgttcttcatcaattgatttctccacgatggagtgcttttccgacgatcggaatccgtttttttctatggaatttcgatggtggttactctctgcctaacagttataatgtcagttttcattctccttccaattcggaaagtaactaccctcataaaccgccatggttccaactctataaatcctccaattcgatttccctcctttcactttctaatttcaattccccccgttctttaccaccacaaaacatgactatagactgcgtaaatccgttcaagacctgaatttgggaattgatgacgaaccggtggctcttactccgaagttctgttcccaggcagcgtatgtgaatcgtttctcggtggtggtcacaaccgtgaatcctcgtaagcagaaccttcgtgccttaattggacagatgtcaagagtttggggtttccccgactcgtgtgttggcagaatccttgaaagaggtagagtccaatttaaattccaaaccgaagaagcaatgaatttggtacttcgtcgtggaccgtggtcgtttaatgattggatgctctcaatccatcgctggtatccaaacatcagtgaaaccgagttgaagatcataccgttttgggtgcaaattacgggtatcccacttctcttccttactaatgcgatggcacgatgtgttggaaataggctaggaattgtgtctactgttgactttgatgagaattcgaatcatgttggatttgtaagggtaaaaattgattggaatctagatgatccgcttcgatttcaaaggaattttcaatttgctgttgatgaaaacactgtgattaagtaccggtttgagagacttaggaacttctgttccaaatgcggttctctgaaacatgatgtgaaggaatgtgttcttgcctttgatgatgaagacccagcggaaattagcgatgatgacaatgatgatgatgataatcaaggggataacaaggataaggacatgagtgacaccgatacccttcaaacagttgaccctgcaactctcatccctggtcttactcaaccgttctcaactggaaataagggtccgaacacacaaaacactacggtcttctctgttccaagtgtctttgaagacacagacctcactgtggaaaggcttcgatacctgcacgccaaactagcgagagtaaggactcagacaccaatttccaatgatctccttgaggattcttctgacaatgcacaaaaccagtttgtcctactgaagcgaaagcgagttcaatttgaggacatgtatcgaaaggtggaggcagcagatgagatggcggtcctgagccaactctgtaagaaggaaagaaaggctgaatctgcgggttcctgttccattcacaatggtttagacggaggcgcggggggccctgtacccccaagggatc

SEQ ID NO: 758 - DNA, 110157 bp, Arabidopsis thaliana
gaattcatttgttggtaagtggaaacaattatgtttccagcaatttcctccaatcatggagatctttcattcatggtttttctttcgatgcattggcttcacttaagatgaatctgttataaagtttgtttccggtggtctaattcaccgacgttatctgggaaagtcatttgggtacttgattaagtaatcaataaacatatcgtttcgattgaaggaattggtcagatggtgatgcactcgctgtcctccgatcagactattcatgttatgtgtgaaaaaaaaccatgatcactaacccgccacgatggcaaggatgctacaagaaaacatgattcaaaaccatttcaagcaacatttgagtgtgtttgtttgattagagttatacaaaaaaatatttgagagtttcatctataaaatgttagcattttacgagtatatcacgagatgacttaacatattttatatgttgcatgtaaggcttccgtttggaaatcagggttacttctacctattcatcgaaattatgacctatttcctttatttggttcaattgttgtatttgaatggtgtcatttatctagtaacatttctataatatgatataattgatttgctgttaggaaaaaaaaaactaaaaccaaattaatcaggcttctatgccaatttatcaaatatctaaaccaaaaaaatcgttgaaccaaaacaaagagtctcgatgattacgtcgtgttgaattttataacatatattatatctttacattatctaaattttgtcttttgtccaactttttgttttaaaatccttctttctttcctactacctaactttttcttgttattcatttaattaaggatatctattttactgttttttcttaattatattaatataaaaataataacaataaatatatgcactctataaatataataaattaactttaatgtgttttttacttcttaaggtaacctcctaattaaaaatataactcatattttgtcttatttgcctcaagtcttcatgtgcttttattacctcgattttcggtctttgtatcctctaaaggtataatatatagattagattacaagtatctttaaaatcaaaaggatatcgttttatactcaatcaaatgcgtacacgtcggagtggaattgatactctatccgaaattcaacataatctaaagaaatgagtccaacaaagaaattagaaccctaatgggttatagcacctttctttactatataaataatttatatgccaataaaacaaacatccatcacaaagaccagacccacaaaaagatggatcaagaggcttttttgcgtgagaagattgaaaaagcacaagcgcaattgcaaaagttgcgtgatgaaaatcgagttatgaaggctcgaaaaattatgtggggttgtatcgaaggaaatattaatgtgtgtcaactcggtgaaaaggatctcaaagatttgagttctgttattgatgactatctcaatagccttaaaagcagggttgagtaccttaagaagaatggtgagtcttcttcttctttacctcctcgtgttgtcccatatcttaacgttgaagaggatgcggacgttccttcaatggatggtagccaccactagtctgaaactaatcgtttcgctaccaccgctgatgcttgtgcgcctaacatcaccaataatccttagtcctatggggattttttatccgattgaagaatttaataatttgtatttctgtttattatcattttaaaagttcaaattttgaagtgatgttttatttttatttttttttattttggtaataattaaagggttttcctttaaatcgtgttatgttatttctgattacaaggtaatgaatatgcgtgacaaaaaattagttactcagagaaaatataatcatatcaaaaataatcaatagtttgtaatagtttttgtcttttaaaatacgaaaaataaatcaatagtaccagacaatttatgccatgtaagaaaacttagatttaagaaaactcaaaatgttattcttttgattattgattatctcttaacgattacatgagactgaaaaacattaatacaaaacaaaattctagttttttataatataccataacatatagtctattagtttgtattagtgttatcaatgtatcaccatacgagttcattcccacctttttacattaaaaatactctttaataaatggtttacctatctggcaattgactcggtgttccgatgtttaaaacttttaatcactatgaactgcagtttgaagaaatttcaccgtaagagttgaaagaagttgtaataggaaacgatgtgttaacataatctttttatcaaacgaaaattattagtttaattaaaagaaataaatataaggggctttacaaaaatatctttttttattacccttttacaataatacacttttctattggctatttttaaaaatacttttttttgaaaaaaaacgacaaaattacccgcatctaatgaaaacatgtaataagaaactgaagttttcccgccaaaaattttttttcgtcaaaacgtttttcccgccaaaaacaaatatcccgccaaaattttttccttgtaacaaacttttttcccgcaaaaaaaatgcatttaaaaaatcttataacttttttaaggaccttttaaaaacacttaaaatccttgtaaagctttttaaaagctttgtaaagttgttaaaacgcttgaaactcattttaaaacctcttaaaatagttataaagtcttttaatacatatataaatactttaaaacccgttttaaaacttttgtaagtattttaaaatccttgtaaatcattttaaaaccttttacaatggtttaaaaatatttcaaatggtttttaaaatccttttaaaactcttataaaatcttagaaaactttagtaaatcattttttaactcttaaaaccaaatttgtaaatattttaaaatacgtgtaagtctttttgaaccattttaaaaatcttggaatacggaggtgtctactccagttgccttacaaagactgaaggaaacaattaagaagtggaatagagaggtgtttggagatgtccaattgcggaaagctaaggtagccaatgatataaaaagggtacaagatttgcttgctttgaaccaaacggatgccctgcttgaagaagaagagaggctgggaaaagaatttgatgttatcttggagcaagaggaagtcctttggtaccaaaaatcaagagaaaaatggatagctttgggggagaggaacacgaagtattttttatacaagtacggttattcgaaggaaaaataaacttattgaaagtttaaagaatgacgatgatacatgggttacgtatcctaacgagttggagagcttggcggttgtttattacacaaatctctactctttggataatgtttaccagtcctccgacaggttgcctcatgctgggtttgagaaagtgacacgggaggaggtgttgaatctcaaggaacctttctcagcaagtgaggtggaaatttcgattagaagcatgggacaatacaaagccccagggcccgatggatatcagccggttttctatcaaaattgttgggatacggtggggagttcggttatccgttttgtgctaaacttcttcgagtcgagtattctacctcctgaaacgaatgatgctttgcttgttctaattggaaaaattgccaaactttctctaggttatgaacccacgatacgcgtggatatttttaaaactcttagtattttttttgtatgactaaaactttttattgaaaattttgaaagatatgttttcacctgtctacttgttgttaatattataaactccttaatttttaaaattactatgacaaattgttacaatttaagtatataactaaaactaactttaatacaacttttaggttttacaacatttatcaaaagaacattattttggttcataaatcactctttggctttcgatatttaggataacgacgttttttacatatgaaataaattgttgtatggggaaaaacttcgacgactttctcattttggtacccgcaaatttactattaattttcgtttatcttcgctgcattacttagtatagctcttctaaaaataagatactatacagaagtatattcataagcttatctacactttcttttaacaactcatatttttctcacattcttttcaatatgaatttctgtcttcacaattttttacgaagagctatcactctccctatctttttgcaagcactcgttttctttgatccatcctttcttacggtgtctccatcctcttatgattttgtttaagcaatatatgccataccttctaaacttttcaaatgttccatatttcttcttcaaaaattccttccttttcttgtaaatataagcatttttcaaggtcgtcaagatgtactctgttttgtttttctgttattctaagaaaatgttttagcttctatcacttctctcttttgatgcagtttagatcctctacaccttcacgcttcccaaactgaaagacctcaacttatatcttcgagaacttgattcaaatagataggattaaaaacaccaccatcaaaccacgtccttgttacgtttctttaacgcttaaagaccaaatacaccttaatccctcttcacttcaccttcttgtgaacaaatcttttacatacttctttcctacaatgtgtctttccatcttcttatgattttgtctaagctatagatttcctaccttccaaaattttcacatgttttagacctattctttgaaaatccctttctttccttgttagtaacaacatttttcaaactcgtcgataggtagctgagtcaagtctataaactcttcgtttaaatttttaataataatttttttgttttgctctgttttgttttctattattctaagaaaatgttatagcttctacattggttcttaactctatcacttttcttctttgatgttgtaatttagattctcttcaccttcatgctttccagactgaaaaatctcaacttatatattctggaacttgattcaaattgatacgattaggaacaccaccatcagaaccatgtccttccaaactttaacacttcacggacaaaaaatactttaatccctcttcacttaaccttcttctgaaaaaatctttcacatacttctttcctacttggtctctttccttctcttataattttgtctaaacagtacaagtcctaccttccaaacttttcacatgctgcatatatcttttttgaaaatctctttctttccttattagtaaaagggaaaaatgtcaaaaaaatcacgaactttcaaatttgggacgatttaatcttgaacttcacagaagacaaataagtcgtaaagtatttgttgactttctaaataaatgacaaaggttttgttgacttgccatttgagtcatattgttaaatagggtaacataattttttttacggatataatgtgacgtttatctattctgttagaactaacaacgtcgtttattgtagagacaaaacaacgtcgttttgtctgttgaaacaaatttaaaccttaatccccaaatcgatttcattacctcaaaatcgatttcagaagtcattcaaattgagctggttgagatggtgcagatggagctccctgcgaaatttgagatggttcaccttgtgatccgtgccatggttgtccattcccaaacaagatagtcctcgaatcctgttttgagataatgaaatcgatttggaaatttagggtttaaatttgtttcgacagacaaaataacgtcgttttgtctctgtaataagtgatgtcgtttagttcaaacataatttgcgagggaaaaattcctagggactccctcgcaaaacaccaattgcaaggaatttgcgacacagaagaattcctcgcaaatcacgtctcgcaaaaaggaaaacattgcaattccctcgcaaaacttgcgaagaataattcgcctcgcaaattacacacatattgcgaggcaacaattttgtcctaaattacttggaaaatgaaagcctcgcaattctctagcatactttgtgatggatttactacgttgttttcatcgcaatcggtaaacagtaccagttttcacaaagtcaacatttttttgtcctcgcagagccttagcacttctacgagggaattgcgattctgtgttctttttcttgtaaatccatcacagagtttgctaggactttgctcttcgtttgcatgtttgtttatcgttgtttaactgtgtaattagggcttaattaatctcgagttagctaattaatctgatatttaaactctcattatgttttctaaaacaatcttaaaacccaaatttgaaaccaaattttacatagcaataccgttacaaatcacaatcattgaaattgtttttattcgtgatggatagtcataaaacataatccaaaaaacatggaaaacattaacttagaagttagaatgttgctgatggagaggatcaagtaccggcttctgttctagcgccagcgcccacagcagcaattggtgtctcgttgcccacctcaggttagctacctcaggtctcagattagccacctcaggtcttggattggcgctagtaggtttagtccttgtagaggatgcgcctcgaaagattgcagcaaacactggatccttgtcggcaaggtagtcaaagtagacaccgaagctattgatcttctcagcctgatttgcaatacaagcttcagcgacagccaacttctcagagagtaaaactggatcatcacgaggaaggggtagacaagtatgggctgaggatgcttcaagatgcagagaaccaaccacataaatccttcccttcttcctcggagcaacctgcaaatcagaaaaaccaattcagacaaaatgacacaactcaaaagacaaagcaattcaaacctatcagaccaaaaacagagtcatatgtaagtggtagaacatataaagacttaggaattcagacaaaatgacacaactcaaaagacaaagcaattcagacaaaaacagaatcatatgtaagtggtagaacatataaagacaaaggaattcagacaaaatgacacaactcaaaagacaaagcaatatcgcctaatatcacgagaatctcataccaaaaacacaacagccaaatacaaagcaattcaaacaccatacacaaaacgcaaatacaaagcagttaagacaataaattcaattaatccaacaaaaactataatgaattaaaagacaaagcttacatgggtataaatcatgttcatggcttgaacagacaatccacctgaagcaatgctctctgaactctccccagaacacagctgagtctcttcctctgctatcctggatgacacttccttgtagatctcttgggactttccatcaatgaaagtcctatcagcttttctgtgtgtctcatctaagagcacaaggaaatcaggagtcgtttcttcggtcttctcacactaaaccacatgaaaatataaggtcagttgtcattataacattgcagattaagaaatggtatgagacttgagacttaacttacatttttttgcgcccgagctttgtaagaggtatggccagaacggtgtttagatataccgaggccctgtggatcatgatatcatgcttgcctacttttgatactctttaactctgacttcggatctttccaatacctaacaagaccagcccactcctcaggatcaagccaccgcgccattgcctcatctcctttcagcttccactttccctaccagcgagagatttgatcgcacatcctatccttcagctttgcttcaaactctatcctaactctcttgtttattgcacggtcccagttgtatacttgctacaaaatagagagatgatatatcaaaaagtgcaatcaagtcaataaattaacacaagaaaacatagtcacataatcttgacacaacagccaaatacaaagcagataagtttctaaattaacacaagaaaacaagacaccaattccacttaccgcaaaagtttcaaaccaacaagtgatcactggttgcggtgtcattgtccaataagcatgtggatctttaaaatctctctcaaatatgctgcagacagtgccaacaacagaagagtcttcgttaaacctaaaaaaaaaaaatcaattggtctaattagtataatcatctaaaaccaaaacattttaccagatcgttatgctaaaccaaacaaaacatctacacaactaaccctaaaaccagaatagaaaccaaaacattttacctgattgttatgctaaaccaaacaaaacatctacacaactaaccctaaaaccataatagaaacctaattagtgttagaatgaaagacatcaacttaccagagagttcccggaggacgattagggtctagtctcgttagagatgcatgaccgggactatcaagaaactcatcaagtgtcaggttgttgaaacgcctagatataggattagcatgattatcagaagctttgaggcggttgattttgctgtgtagaagaagtcccatgtgcttcagagttttgattggttggagtcagaggagaggagggaaggcttctaccatgaaccgccgagttgttcccttcactgagaggcgaaggaacacgttgttgctgctgctgcagccggaatcttaagtaatcgttcccagaaaatgacatcctccaaaaaaaaaatcgatcagagaaattgtaacgcccgtgaaccggaaaatcggttagggattatatttaaatcgtctggtttaatcggttgggttaattggaaaccctagagtgttcctttaaaagaaggaaactcaaaattagggctttatttagccacttttcgttttgtaaaggagaaaaagagagagaaggagaagaaccagaatcgttagggtttgggaggaaacggtttcgacatatcaaatcgttgtcgaaagtaacgaaatttggtagtttatctccaagtcttttatcgtcattctccaatttacagaattggatttaaattaaaattggttgagttattcgcagtttcgtgagacacgttttctcagacgcgaattaggaccagcggggattgtaactgagatcgtggtttcgtctagtttccgatcggcacgcgattttgtgggacgctttgtgatgtctaaagctagtgtttcaccggacagatttgataattaacggttggtttgtatattagggtttcgtctttgagactgtttgtttctgtttttcatgtcctgttttcttcaaggttgcttttggttgtgacttattgtaggacgtttctggactgtttcagatgcaaggagagtctcttctgggtttaattgttgttagaaccaatttgttaaggtgagtgcgtgaccatgagcttatctgagcgattgggttgtatgatttgttttgtgtgatgatatgtcggtgtggtgaatgtgtttttgggtgacttattcaatgactggtttgtttatgttgtatttgtgattatacccttttaattgcttgtgtgtatacctcgtagatgggaggatcgcctcactaagtatttgtgataatacttacgcatctctttctttttgctgcaggtaaagataaagtgtgatcgtggaatcatatcaaggaagagaagatgatctaggaactcgtttaatttctttttgtgttttggttattggaacccggttagggttgtgttaggattgttagtcatacttggtttttgttggttgaattatttatttgttcattaaatagtaattttaacttgcagtttaattgttgctttattggttggttaagtatttatgagaatatttaattatatttttttatataaaaaaacgtgtcgggttatttcaatttggtatcaaagcgatcacgtttctaagatgtatagaaaaaattaattgatgaattattttcctgatgattgatgtgggatagctagggtgttagcatactgaggattgattatggagtgtttagtcaattgtgtgttgttgcagtcctagcatcatcttctccaagccttaaatgagattccacggtaagttgtttgtgatatatttgtttgttctagtttcttagccttttgttcttgagtagcgcaaatggttagagaagctggagttcgtggtcgtggtcgtggtcgcggtaaaggacgagtcttcgagggtaccggcgagagtgatgaccacagttgagcagagtgtgggttcgcagcctgagtttgtggagtctggggctggagacggtcttggtgccgatatagctggtacagccggagtgggggctagtggagctggtgtcggtgctggtgtgcatgccgttggtgctgaggacccaggagtgatgggtgccgcagtcggaggagtccaagttccagaagttggtttggcgagcctgtttagacagttgttggagcggttaccaggtgtggtaccaatgcaggctccagttgcgccacgagtggcggaggtgcagaagagggctgtggttgctgaggaggttccatcttatttgaggatgatggagcagttgcagtggattagcactgggtattttactggtggtactagttctgaggacgccgacagttggcgatcgcgggttgagcggaacttcagttcgagccgatgcccggtggagtatcgggtggatctgacagtgcattttgtagagggggtgcacatttgtggtggtggatgtgactgccatgagaaggccagcagatatatcttaggcagattttgtggctgagtttaatgccaagtactttccgcaggaagcgctcgaccgtatagaggctcgttttcttgagctgacacagggtgagcggtcggtttgggagtatgaccgagagattaactgattcttgatgtatacggatcggggcatggaagatgaccagccccagttgaggaagttcttgaggggacttcgaccggatctgaggttgcggtgtagagtgtcgcagtacgccaagaaggcggcactagtggagacggctgctgaggtaaagacagtgagtctagcggtacagccgaagaagactcagcagcacgtggcacctagcaagggcggcaagcctgcgcaggggcataagaggaagtgggaccatccttccagaactggacagggtagtcgtggaggatgtttttcttgtgaaggccttgtccacaaggtagcggattgcacgcagcgagctgagacgagggagtgctaccactgtagagagaggggacatctcaggccgaattgtcctaagctgcagcggatggtagtggcagtagtacagccggcggtgcagaagggagcgtaggtgcagcagggagtgcaggtgcagcagggagtgcagcaaaatatgcagcagttagcacatattgcagcagcactacgcgtgagatacgtggtaccagcaacagagcgatcactggtatgatttctgagactcagactttgtgaattatttctgttttttttagatatcattgttttgtgatgaatgttagggttcttagcacatgaggtttgtgtagggaccttattagtgggcgatgtagaggcccatgttttgtttgactctggagcatcgcattgcttcattactccggagagtgcctcgcgcggcaacatccgtggggatcttggtgagcagtttggagccgtcaaggttgctagagggcagtttctaacggttctagggagagctaagggtgtggatattcaaattgcaagagagtcgatgccagcagatatgattatcagccatgtagagttctatgatgttattttgggaatggattggttggatcattacagagtacatcttgattgccaccgtgggagagtttcttttgagcggccagaagggaggttggtttatcagggagtgagacctaccttagggagtctcgtcatctcagcagtgcaggtagagaaaatgatcgagaagggctgcgaggcttacctggtgacgatatctatgtcggagtctgtggggcaggctgcactgagcgacatttgggttgttcaggagttcgaggatgtgtttcaatcattgcagggattaccaccatcactgtttgatcctttcacgattgagttggaacaagggacagcgccgttgtctaaggcaccctagaggatgactccagcagagatggcagagctgaagaagcagctagaggatttgttgggtaagggattcattcgtcttagtacttcaccttggggagcgccagtgttatttgtgaagaagaaggacaagagtttccgcttatatattgactaccaggagttgaaccgggtcaccgtgaagaacaagtaccctttgccaaggatcgatgagttgttggatcagttgaggggtgctacttgtttctcaaaaatcgatttgacgtcgggttatcaccatatcccgatagcggaggcagatgttcgcaagactgctttcatgatgggatatggatattttgagtttgtggtgatgcctttcggtttgactaatgcacctacaacgttcataaggttgatggagaagttgcgggagcagaagctgttcgctaagttgagcaagtgcagtttttggcagagagagatgagttttctgggtcacattatttctgtagaaggagtttcagtggatccggagaagattgaggttatcagagactggcctagaccgacgaatgccactgagatcaggagttttcttgggttggcagggtattacaagaggttcgtcaaggggtttgcgagtatgacacaacagatgactacgctgacagggaaggatgttccttttgtgtggtaaccggagtgcgaagagggtttcgtgagcctgaaggagatgttgatcggtacaccagtgttagcattgtcagagcatggagagccttacatggtgtatactgatacctcaagagttggtttgggttgtgttttgatgcagggtggaaaggttattgcctatgcatcgcggcagttgaggaagcatgaggacaactatcctactcatgatttggagatggttgcggtgatctttgccttaaagatttggaggtcttatctttatggcgggaaagtgcaggtgttcacggatcataagagtttgaagtatatcttcacttagccagctgaacctgaggcagaggcgatggatggaattggtggttgattatgatctggagatagcctaccatccttgtaaggctaatgtggttgtagaggcgttgagccgtaagcatgtgggtgcggctccagggcagagtgttgaggccttggtgagtgagattggtgctttgcggttgtgtgttgtggcacgggagccattgggattggaagttgtggatcgagcagattttttgagtagagttcggttggctcaggagaaggatgaggggttgattgcggcttctaaggcagagggctctgagtattagttcgcagctaatgggactatccttgtgcatgggcgagtttgtgtgcctaaggatgaggagttgcgatgggaaatcttgagtgaggctcatgcgagcatgttttccattctccaggagcgactaagatgtaccgggacctcaagcggtactatcagtgggtcgcgatgaagagggatgtagctaattgggtcgtagagtgcgatgtttgccagttagttaaggctgagcatcaggtgccaggtggcctgttgcagaatttacccattcctgagtggaagtgggattttatcatgatggatttcgtggctgggttgcctgtgtcgcgaaccaaacatgttatttgggtgatcgtggaccgtctgactaagtcagcacattttctggccatcagaaaaactaatggagcggcggtgttggctaaaaaatatgtgagcgagatcgtgaagttgcattgagtatctgtgagtattgtatcagacagggattccaagtttacttctgcgttttggagagccttttaggcagagatgggcactaaggtggagatgagcacggcttatcatcctcagacagatgggcaatctgagaggactatccagacgcttgaggatatgttgtggatgtgtgtcttggattggggaggtcattgggcggatcacttgagtctggtagagtttgcttataacaacagctatcaggcgagtattgggatggctccttttgaggcgttgtacgggaggccatgcaggacaccgttatgctggacccacgtggggaagaggagcatatatggtacagattatgttcaggagatcacggagaggatccgggttcttaagctgaacatgaaggaagctcaagatcgacagcagagttatgttgacaagaggaggagagagcttgactttgaggttggggacagagtgtatctcaagatagtcatgttgtgaggtccaaacaggtctatctcagagactaagttgagtccgaggtacatgggtccgttcaggattgttgacagggtaggaccagtggcatacaagttagagttgccagatgttatgcgtgcgtttcacaaggtctttcatgtgtcgatgctgaggaaatttcttcacaaggatgatgaggtgttggctaagattccagaggattttcatccaaacatgactttggaggcgagaccagtgagggttctcgagaggaggatcaaggaactttgacggaaaaagattcctttgatcaaagtcctatgggactgcgatggtgtgacagaggagacttgggagccagaggcgaggatgaaggcaaggttcaagaagtggtttgagaagcaggttgctgcatgagtttgcctatccttggtttccagttttagtgttgttgagtttttgagcttttgagttgttgttcttatttctctttagtttggcgttgtaacgatcatgacatttgatgatttataagataagtatttttttattatatttgacttgagttgtgttgttaaagaatgtgttgtgcggtttccaagaatggaaagtttcccaaaaaggacttgtctatttttggaaagtttgagtaaacaaccttagagagaggtgtgtttacgagatggccgagagttggtcataaggatgttcccaaggggatatgatggatggtgaggcataaaggtgtcttacgcgaatccatgagagagtctggagatatgctcggaagcgtttagtattgttgctcgagggacatgagggtcccaacaacttgtgaggagcggggtatgctcctgaggtaccggtaactcgagagacttggtgtctttagagtgtgaggggtacggtggcttcggatgacgatccgagagcacgctttatcgtaactcgatgactttgtggttgagagtgagccgacacaactcagggtttgactttgagtggggaagataatacgtgtgatacccgagatgccgtaggccgaggcctgagagtgacagtttatgctcgaagattgcggtttgagagtggagagtgagttgtgagcaataatgactagtaaatctgagtatactgactggatagagagacctagagggggtcttgttggagggtgtgcagaccgtagtgatggttgcacggagtttattggagtggaagggtgaagctagattcgaggacgaatctatgttagtgggggagaattgtaacgcccgtgaaccggaatatcggttaggatttgtatttaaatcgtccggtttaatcggttggattaattggaaactctagagtgtgcctataaaaaaagaaaactcaaaattagggctttagttagccacttttcgttttataaaggagaaaaagagagagaaggagaagaaccagaatcgttagggtttgggagaaaacgatttcgacatatcaaatcgttgtcaaaggtaacgaaatttggtagagttattcccaagtcttgtatcgttattctccagtttacagaagtggatttggattaaaaatggttgagttattcgcggttttgtgagacacgttttctcatacgcaaattaggaccagcggggattgtaactgagatcgtggtttcgtctagtttcagatcggcacgagattgtgtaggacgctgacgtctaaggctagcgtttcaccggacggatttgataattaatggttggtttgtatgttagggtttcgtctttgagactgtttatttctgattttcatgtacaatatgcttcaaggttgctttttggttgtaacttattgtagaatgtttctggactgtttcagacgcaaggagagtctctcatgggtttaattgttgttagaatcaatttgttaaggtgaatgcgtgaccatgagcttatctgagcgattgggttgtatgatttgttttgtgtgatgatatgtaggtgtggtgaatgtgtttttgggtgaattgttcaatgactggtttgtttatgttgtatttatgattatacccttttaattgcttgtgtgtatagctcgtagatgggaggatcgcctcactaagtatttgtgataatacttacgcatctctttcttttggttgtgacttattgtacgacgtttctggactgtttcagacgcaaggagagtctctcctgggtttaattgttgttagaatcaatttgataaggtgagggcgtgaccatgagcttatctgagcgattgggttgtatgatttgttttgtgtgatgatatgtaggtgtggtgaatgtgtttttgggtgaattgttcagtgactggtttgtttatgttgtatttgtgattatacccttttaattgcttatgtgtatagctcgtagataggaggattgcctcgctaagtatttgtgataatacttacgcatctatttcttttttggtgcaggtaaagataaagtgtgatcgtggaatcatggcaaggaagagaggatgatttcggaactcgtttgatttatttttgtgttttggttattggaacccggttagagttgtgttaggattgttaatcatacttggtttttgttggttgaattgtttatttattcattcaatagtattttttacttgcggtttaaatgttgctttattagttggtttaattaagtatttatgggaatatttaattatatttttttaaaaaaaacaaatgggtcgggttgtttcaaaatgaatagaacaaaatctaagaaacaaaaccctaattaagaatcaaataataaagaaatactagctagaactagatagataatcgagagaacggagagattagggtccaaacaaaaccttttgtctgaagattttaccttggagatggaagagactgtagaggcggtgagaatcagagaagggagagttagggttcgagggcggagagaatcggagattagggattgagagctgagaagacaaaaacaaagaaacaaaaaccctaattaagaatcgaaaaataaagaaaccatatatataattagagagataatcgagagaattgagagattagggtccaaacaacacccttatttgtctgaagattaccttggagatggaagagacggtagaggcggttaagtttgcatatatagaaaaaatcttcttcgcaaatcccttgcaaatttgttaggagtttgcaaggagcggaagaaaaaccaattaaaacgcgtcacctactccgacggaatggcgaggaaacctagcaaatccctcgcacattactaataacaaaacgataaaaattcgaaattagatggtaaaactcgaaattagaggattacactaatattgtttacctaaataaatgaaatagaaattataatcaaaatcaatttataattaaaatttaattaatttgaactttgcactttttttgttacttcgtaggaattgaataatcgatttgttagattttgttttaaaaaaaagaaaatacaataataaacatttatctagattcattttcggaatcattataaggtttgttatcatcattagagtctacttggtcatcagacttttcgacttcgtccaattattcttttagaatcgtcattgatgtcttctagttctttgttttctagatcaatgtgtataacttggcttaagcatgtttgagctcagtgaaaaggtttagggtttatgttttgatttaagaagtttaagaagtactattttaagtagttttttaaaataagcttttaagacaatattaaaataaattttaaaataagcctgtagattcttctgtttgatcaatcaaaaccccttcctaaactgtacaagctttttcaagtaggggaaaacaattcttaattgttgggacaaaaatactttggagttgattggatttgcaccaatgtaatccataagtttcagacacaatagagtatatgaacgataaggggagttgatgtattgaatccgccgggactgacagggctcgaacccacagcttccacccgcgggaagaggattgtaccatagaagcaaggaggtaaacctctttccaatatataacatgaattctagcaatgtagttgggttttcatgatgatccgatgatccttctagaagatagatcaggtgaactcaaacaatctttctagttacttctttaagaagtttttttatataatgtatttgattttgatttatgatttttgcatttcttacgttttctatctatagacacaccaattttcttaaaacgtgttcaccgaactagagactggctcgcaaatccgtcgcaaaaagtgcgaccgattatggtactcgtaagttcctcacaaattatgaggaatatattactcgccaattttgcgagggttttgcgatatgtgagtccgccctcgcatgtatctcgcaaaaccatagtaaatttgcgaggcacgttatccctcgctaagttccctcgcaaatcttttgtttttttgtagtgctggtggctataatttgaaaccctaaagtatatgtcacatatcaggaaagctgagtcttcttgacggagaagtttacggcggagaaataccatgcatcaatgtcttgagtataatatttggtggaaaaaaataaatagattattgttagtggttatgaatgttgtgagttgtgactttctccacatcgaacctaaaattgaatgtaaaaaccattaattgtttttatgaagctgctatgctattttgcaacataatccgtttgatcattgttataaaataacttttatgttggatatgatgacataatttatattaaaaaaaaattaacatcaagaaaatttcttaattctaaaatagtgatctcattcccaacctaagataatcatcaatgactaaaattatatgctaaattccaattacaaaaaagtgttaaattgcccatatatatgttaaaattttcaaatactccctttgttccttttttatttgattgtttagaaaaaacacacatattaaagttgattttaaatatattattttgttgtgttttacaatttcctataactttaaacctatgatattcgatcttttttattaacgtttacaattcatcaataataactaataaatattgcatagaaaacctaaaaaattcaatctttttgaaacaaattgttttcctagaaactcaaataaaaaagaacagagagagtatatactaattcaaagttaaggatgtaagcttctagaggcgtacacataagaatttaaacgaccaattgcggttggatatgtcatttgatgacattttagctattacgttagtttacatttttaaattctaataattttaatttaaaaatacttttgaaaagaaaataaaacaatatatagaacaaaaagaaatgtaaacttttttaaaaaacaaacatatggaaaaacaaagaatgtaaaattttgttagtagaaaccaatcacggttaggtatattgctaattaatttttatgaatttcattagtttaatttttgaagttctaataatttttaatattaagatatttatgaaaaggaaaaagcaatatttaaagaagaaaaaatgaaaacttaaaaaaaataacacgtggaaaaacaaaaactttaaaattttgttagtagaaaatataaataatatcattaagaaattaagatatttataaaatagaaataaatatggaaaatataacattagaaagaacatatgaaaaaaaaaaaaaaggaaaattttggtattagaacatataaaaaataattattagtttcactaaatttgccaattttctctcttaatcataattaggggttggaattttggtttaatttcgagtcaaatttgatttggttagatgaggaaaaatacaattaaataacaaaatgaaaaatattcattaaccagttcttcatgattctcactaaaatacgtcatatccatgtaactcgttcttatatccatattcagtttttctccatgtttatgccaaacaaatccttaattaaacaaatgactactaactcttctacccgagatgatgtatttttcattcttacacactgtactataggctggctattagcgaatgtcatgaattcctcaacttctacgacgtattcagttgacaaattccccgtcactatatcaaatctcttgtacatccaatcccgatagaaaccgccactaccgccatgattgtagtttcccgccattatacaataaactaaacttttatttttttctttcaaatcgttttttctcttttttttcttttgatgttgttttgttttattgatgaataaagagtgtggtgaattttcattatatagacgattctttatgactattaaacgactacaggttgtagtcgtaacataattaggtgtacctacccgggaatgcaaaaaacgtatttttcaaatgtattatacgacaattaggcgactacatgacgacaaaagagagtagtcgtattatagtcgccaaataagcgacaaaagaattaagtcggaaatgtagtcgtcaattggcgactataatctctattcaatatcataggcatcaaatactcgttaattaacgattatgttctgacacaatttgttagtcgctattgaacgactactcaacgactagttacgtcgttgtcgtaaaatagttgtaaaatagtcgcacaagaagacgactacgatgattgtcgcttttggtagtcgttttgtagtatataaacttcagaagatgtaattcggtaactctagaaaaaactcatgtgactttgacttcaaagtgacttccttttggatctctcaaacttaaaaaaaaggaccaaaatgacttatatatcaaactctgcaaaaaaattaaccttgtcagcataacatttttttctttcacctcttttgttttccttgcatttcaagaaacttagtataatggttattttgcttctttacttctaaacgttttcatacttacatatagggatgtgacgattcgattctgctagacgatacgtcaagcttcagaggagaacaaaacgcggccccaaaccgcaattcagctcgtggatttaatgtgatcactgatcaataacatcaaatcagcgttgagaaagcatatttcccggattgtatcttgcgttaacatctaagccattgcagctagagactccgtcgtcttctcttagtcttgttttgaaacttaagaaaattaaaccggtctaacatatgaattcgtctttatttatgttgaagcttggagggctgaattggatgtgaaagtaggaagaagagatgcaagaacgggggagtcaaacggcggcgaataggtttagtcatttttgattcctgttttaggtttgtaaataaattaggaagctttatttttttcaattacttttgagagaaaatagggtagatttgggtttaaatttttataaaaacccatcttaccaatttacaaaaaaggtatatatggataaaaattgttctggatttcctttatatccaatttccatttaaattattaacaaaaatgatctttttccaaatgcaaaaattattaaccagccaaaaaataaacaagagttggtaatgtttttgaaaagataagcacaaaaacggctctattttatatatatatatatatatatatatatatatatatatatatatatcaaattttaaattgcgattagtgattttaattcattaaaataaacaccgcaatatttaaagtctaaagaaacaatatctgtcatttcctatcaaataaaaacaaaaatatcaattaagctagatatgtcaggtagttttaaacgaaggaattttctcattataatttcatattcgaggtttttttcattaataattttaatagttcagaaaaaaaattatatacgtcttcggagatcctttgatatcattttcgggttttccgaaaataataacacttcgatttgaattttttaaatctttgcctcggacaagatttggacttgatggcgctccgaagaactttttgggtcgtaaaatattgtggctcggggcgtgatggaagatgaattagttatccccgaggtgatatcttaacctcgagattctcccaagtttggctcgggggaaaccaaagagatcccctttcgaacccgaaacactctttctggctcggagtgtgtttacaggaaaaacacccgaaccgtttgctgtcttccgcagcatcctggtggtggtgttctgtcgaagtatttctttttccggttcggggcgtgcttaaggaaatagcaccggagcctttgatcagctctcgagggttctcccttcatcgggggccaagcctgtcgaggtgctcgttgcttctattcagctcggtctctgggggaatccaaccccaacaatgacatcgccgcatttggaagaaagtatgaggaattatgagtggttctgttttgctagctaggctatgaagattagcatacaagttccgttacgtttacgcagcttggcatctttagaggagaatttgattatcgatggttgtatgtggacatcttcgatatgtactatcaaaagatctcttggagatgggtttccttgcttggcttgttatgtcacgagtttttcagtttttgattcttgtattgttcatttgtggtttccctcttctatcattgtatttctttggcctttttagtattaatcttctgcttctcttttatagggttttagttcctagagatatttttgttttctgctagtttattatttcaaccctccaagtattccgctttcataattttaatagaaaaacgaggcgactaaaaaatgacttcggacaagtgctaaaaaaacttgtaaaagaaatcttttgattcattccatcaaatcaaacatttaaatgctacacatcaccatcaaatcaaacatgtaaatgtatatattttgttaaaattaatttgtgttggcataaagccactccgaatgtttgaaatagtaaaattgtcaccttgataatttgttgtatgagttcaaaattttaaaaatttaaagtataagtaagtgccaccataaagctttttttttatgctattattttatataaaagtagactatacatatctataaataaaagttaagaagggggtctaaattaaactattagggaaattcttcatatgaaaggaacgtacagaaccaaacaaatatattttcatcgcttaactagtcattcccaaattaaattagaaaatggattgttagatatcgatctagctaattaaattccacctaaattttggttatctactacaatttctcatatgaaaatatatattcttttttaaagtaaaaagaagaaaagaagaaatataataataagaagaagaagaggtggtttggtcaaaagatcccgaaaagaaagcattaacacataattcacacgcttctcatgtacaatcgccacctcctttaactactatttctgcatggctataaaaaaagaatctctagtaaccctaaaaatcagaattcattttttgacaacaacaaaagaaaactctcttcgtcaaccacaaacgcgtttcactcttcgttcacgtcggggaatttaaaaaaatctccttcgtaacaaaaaagagaaagatcaagaagattgtcgtgatggctgccggatccatggacggaatattccgcaacatctttgaaggttgcatctctagctgtgactcttccatccaacgacgtccataccacaagaactgcggttgtgcccttcacgagagatctcgcggtggaggttcagcgactccttgtcgtcatggaaggtctgaggtcgttatgttccctatccaacgatcttggagtgaaggaaacagtttggctctgcatcttgcctcatcttcttcttcctctaacctccagtcactttcgtcgtcttcgtctatttctacccttgcatcgttatcttcgaccgtgtctgatattgattctcccatttaaggcatgaactattattagttcccattcattaattttttgtcttttatttgtttgtttcgaagagagtcaaattatgtttggtgtgtgattggaaaggtttcatgagtttccttggatatcaaaggaaactaattcaaatgttgtaatataatggtcaattgtagggaggcttttctataaaatttgtacagaatcatgtatttgagcgtaattatagttttttttgtatgatgtaaatttatacataaaccgtttgtaacatcgagagatgaaatttggattggaatgcgagaaaaataattttattttaatttttgtaatatgatcttcaagctatttcttcttattttatgttcttcggttaccactgtcttcatattgttttgattatactacgctatcatttgcccaaatctcttgacattctaatgtagagttgttgagcgacttgctaagattgttttccaagaaaaaaaaaattgtgtattccatacgtctaagagaaaatatttgtttactatgtgacttaaaaaatatataaatttaattattttatagttatatttggtaatgactaatgacattcaatccgaatatctgatcattgacattcaatttgaattttggctcaaatagaggttagcagagataatccgtctactggattagctatactggaggagaatgtttttttttggttattgttctttcattgatcggtatttggagaaaaaatataatttttcaggatattgttcgaaagattaatataacgaaacatcaaatatgagtttgtcttcaacggagcctacttccctgcatacaaatatagaagcattaatttgggcgaagtaatgtctaacggccaagcagaagaatatagtttctttcgtcacgaacttttatgaactcataaaaatggtgacatggtgtacatgtcttcaccaaaagagtggcccatattttcgtcatatctcgaggaaatcgtaaagtgtaagtaaaaattttctcttgtttttctgtttcatttgtttcttatcgagttaatgctagaataggcacatgtacactagcataaaatgtccgcactaatccacaatttgatcatgcacgtaaatattgttttctcaggttgcctacctacttttgtttgttatatccttgataacattatcatgttctaacattttcaaccttgctactattgtaatatggtacaaaagaaattgaaatattttatgcatgagatgagacaaccaaaagaaaataaaaatggttaataaaatatgaaaagaattgttaacaaaaaaaaagtaaaccgcaataccttttttcgtctagtaaaatagtaaaactggagaattctctttctttttctctagtaaaccgtaatagtaaaatccgtcccaccatctaatccagtttggtaaaattaaacattttttttttgttctaataatatttttattaaaagaattataattcaaatcaatttaaaaagttttcttttgaaatggttatttaattttatagatttcatatattatatatattctaaacgtttttcgttaaatattctaaacattttagaaactttaaataactataatatttatctttaataaaatcctaagattttttctttttaaaagtaattaaaattgatggagatatattaaataaggaaatgctaataattaggaatattatttaaatgataataattaatgttaatgacattccttgtaaataagttccaacttgaggatttatttacaaaaatggttgcaaaaatatatatgtagataacatgtagataacatgtatttttatttcagttgtctttgatgtcagattgaataaccagtttgagtttttgtctcaagaacagtggttttgtaagatatttctttcataataaagaaacagtaaaaaagaaaaaccgcaatacttttcaaaaaacaaatatgaaaagaattaaataaagatagtaaactgaaagccttgtccctattgcattttgccatctccgtccgattggtgaggtgtgatggtgtttgtacttgtgtctctggttttagcatcctcttgattttctctctgtcggtttgctactggtttgacttcgatgtaaggtctatccaattttattggtgcttccgacgttcacattaggaaagtttggtgagagtttctgatccttttgctcatttttagtgcttaaatcttgtttttctcatagtttttgaccttcattagaattttgtctcttggtttgatttctttgatttaaattagttttcccatatctgttgggttttttcttccctcttttggattgagtttctggagacaatccattgatccaccgatttatatattttaacttgtatcctactttggtttttaataaaatttagaggacaacaaaaaaatagtaaactgcaagcccgacccagtaacctattaaggtccaaaacgacatcgtagaacatagcaagtaaaagaagaaaagatatagagatagagacaatgatatcatcatcatcatcatccaacatggcatcatcatcaatcctcatccctccgattctcacccgtcgtaatctcctcctctccaccacaatcgccaccgtaactccaccaccaccagctaaaccaccttcccccgacatcacaataaccgatcgagtcttcctcgacttctccctctgccccacctacttccgctcagatccctccgcgacactctcctccaccacaccttgctccgattcaactcctctcggccgcgtcgttctcggattatacggccgtcacgttcccataaccgtctcaactttcaaacgtatgtgtacttcatcttccacatcttacaaaaacacacctgtccacaaaatcttccctggtcagtattttctcgccggaagacaaggaggaggacggcgagatacggcggaggttggttattcactcagagacttacctcgtaacaccgacgttgttaattccaaagcttttttacttcctcatgctcgtgctggtgttgtttctctttgtttatctgagaatgatgatgatgatgatattagactcgatcctgattatagaaatgttgaattcttaatcactactggtcctggaccgtctccgcagctcgatggcggtaacattgtattcggaactgttcttgaaggtaaaagattaagctttttcttaagaactctttaggaatcttggaattgaatttggtgagtttctacttgcaggattagatgtagtgacgagtatttcttcgattccgacgtataagccgtcggagaatattaaacagtttaacgattttgcggagtttcttggagacgagagagctcaaaacgcgagatctttgtggaatagacctttgaagacggttttcattagtggctgtggagagcttaaggtcactaatccttcactctctccaactttgccttaattatcgtatcttcgtatatatatatatgtgtgtgtgtcaaatcttgtttataatcatgcttctgcttcttctactatatgaaaatgaaattgtaatttaatcctactctggtggttgctaaagattagtatagagaagagcttatataatcataacattgaggttgttgttgtttgacttgccctccggaactaaccttctagtgggttgtaatcatctgcagagaaagtaatttaggatagagcgttgtttacggtttgagtaaccctgtttgtggtctggattttcaaaggtgaatcccaatgagggtagagaaacgatttcaggtgttttttagtgagtgaaggattagtgtgtgaaatgtttcagtttgttgcggtcatgccgtttatgattgagaaaattgtgtatgaaaaaaatgaagtagaattgtgagagctccctaatcaaaccagatgaattagaatccgtaaaagttttgagacagctttaaccgaactttgttcgctatgagggcaacaatgttcctttattagtgagtggagccgaggaggttgcagagcagacatggtctactagaacaaggtctcttcctggtgtgtatatcctatgttcttagataataagctgcggtgagtgtagatttgcagtacaagattgcagggaagacaaagaaagtggatgaattaaagcatgataagaaaagccagagttccctgaggtcaatcaaaagtttcgagatcctctaaaactgacaaaaatgagtttttattgtaaccctctgcctattccatattgctttgtggaaatgcttcattggatttgattctctcgaataccaacatttaagtgcaattttagtggcagtggacatatatgcgcaagtgtgcacatcttctcggcagtggatgttacagtcacttttcgagagattttcagttacatggccttcctcgatcgatgttttctaatcgttattgtgtcttctcataacaattatttcgtctagtattgctttccacctacaagctggtggtttttactcatctatgatcgatttgcttcttttcaacttaacaagtggtctttttggcatgcatgtacagagttttggaataattcatccatccattcttctttacaatatacacatgaccatgaaaaactacattttctatatcgtctattctggttctggtacaagagttcattatgaaacttctacaattctttcatatttctctatgttatgatcaacaaaaaaatttgaaacgacgacattagcattggcatgcacatgtcaaatagtaaacactgtccgatcccaactattattatatcaacaacaagttttttttttttttttttctcaaaacaacttttgtatttacatttgctaaaaacatcagattatttggtagatagaaatgtgtgattcattctttaccgcaaaaggttttgaaccgtatacgaagaatccgcggccttggccgaagaaggcggtgaatgaggcagcctagcggagaagttacgtagcggaaaacggtcgatattgtcatcctcatctcctttatcaaagttaagcgcatagctcgacggatcgtaatgaaagtcagcagtatggcggcgaatatgcttcccgtgaccgccaacgccacctactccaccgcccattcgatggatcagactcttacatttttcatgtgacttggacaacgtcctagtgagtcttggagatttggtcttcattccaccaccatgtgggctttgtgtagatttctcggtggtgaccggggatgatggtaggtcgtcgggaatgttgtcgtggtggtgatgattggtcgtacgaaaacatccggcgatgcaaaaccttgatttgagtttcttttgtagagacaagttggtcattgtttcgcttcccattttttttttacaaaaccaatgtttgttggttagatcaacaaaggaatgcaaaagagaaggaagacattgaaagaaagatcaaatctgtattagaggaaagaaaaacaaaacagaaaacaagtgatcgacgagatatttggttgattttcatttattattttttcttgaaatgaactgtttaaccaaaacttcggaggagaagttgaaattctttactattttaggaatatttgaatttccaattaaaatgaggttcaattttgtttcacgttaaatattaatgagtcttttgactttgtgagcaaggggggacatatttagggtaggaaaaataatatttatagtaatttattaaattagttaagattataaagttaaaaggataatatgaaaattttggaccaattttgatttgtgaatatagtaacggcatagctaaagcctaaaaacatttaatattaaaagacctcattggattttattttctcgactgtcacatttttgttttggcagaggtcttttatccatgtaactctattcagtatccacaaacagttttggaggatcaatatgggccttagaaatgaattaagatcatacttcactagagaatgtgcactcaaagaatgtgttgcgaggtttcatcgttaaatttgcattaaaggtaaggaacttgaagatcccatagcaaaattccatctctttggtgaagtcgttgtctagttgtcaccgaagctataaaggcatacttggaaatccttcatttgaaccaaattatttgctgccaggctgccagcagtgcctgtcttgtgaaaaatgaggctcaaaataactttttttttatgggtttatagaagaattttttttttttgagaccaaatcttaaaatgttatgaaaatgaaacctatgtattcaatagaaaatagataaaaattaaaaattgagactaaatctaaaaaatttagaaaatgaggcaacaaatatttttgaggtataattttgatactaaaaaccttaaaacttttggtggctcaatacccatgtttcttagaaatatgtcatgggccgggcctgactgccagtcaatggaaggaccatgagggtgtagataatgctatatatttgagattgtaaatatagctgataaactatatttacaacgaaaaatatttaaattctgacttagttaatgtaagtttaggcataatggaaacttttgtttataaatacgataaaataagccgtgggaaaatcgttttcgcactttcgctttaaacttttactcataattggtttgaaatttaaatcaatgaaaaaactaagttaaaactttaaattgcttcaaccttagttggttttttgtaagttcttcttatttttttcttgtttatgttagatatgatttttcatcaataaaagtagacgttaaaaaaaaaaaattacaaatcatttatataaaattgttgcattttcgaaagaatttttttatagtttccatttgatttttgtttctagaagtgtaataagaaaataaatccacttttaagttttgatgaattggataaccggtttgaacgaaacctggttttgatgaaatttttcccgacactgtaacacgataattagatttgttgagttataacattacgtgtcgaattttaattggatgtcctgcgtggccgtcttattagtcacatcaccgcagctaataacactcgacgagcgacctcatcgtctacatcgccgtcgcctgttaccgtccggtgctattctccttcacaatctcacatttttcgtaccggttagaagatgagaatcacgcagatcttgttatgtctggtaatagtggcattgtcttcaagctcccatgtctggtccgatcagatcttcccagctcatctaggtctatatcatttcctctcttctcataattttccgatcaatttcgagttttgtcttgattcaatgttttatgtatagttggaacattcagcagaaacaatcgtgaaccaaagtacaagattgagttccttcctgaagattcaccttttcacccggtaataacgcaatcttaagatagatttcaaaaagcttaatttttgcactaattgaatattaatagtagagattctctgtgattttggtgtttgatctctaatattgttattagtcacactttagatagatttgaagcttacgttttctctatgacatgatttactatgagtagagatagttgtaacatagagattgtcactaacagggttagaatctggaatctatggttatggtggattagattagcttttttaaatcacaatttagattgatttgaagcttatttttgccatgtgacctgagttacaatgattagtgatagttgtaacatagagatcctccgttgttttggtgttttttattctctaatattgttgtttatatggtggtaatctggaatctgtggttacgatggataagagtatagtagttttgaaacttattttgcactttgatcttaagttacaatgagtagagatagttttaagttagagatcctctgtggttttggtgtttagattctctagtattgttttgtatagggtgagaatctggaatctattgttatggtcgataagtgttggcttttttttttatcacaagctattgatttaaagcttatttttcactttgacatgagttacattgagtagagatagttgtaacatagagatccctctatgattttggcgttttggttcgctaatattggcttttatagggtgataatctggaatcaatggttatgttggataagcatggaaatcggtttttatgttacttaccgaaagaggaaaaagcgacgagtggatggacttctagtcagcaaaatattagtactgtgatgatggaaacacagcaactggtgaagctaaagactcctgatgaattgcttcaaccacttagtgaaaaatgtctttttagggtaagcatttcaaaaatggtttcttttgaccctatttaacaaattcttgaaactaatccctccctggatttgagcagcaagagggttggtggtcttatgagttttgtcatcagaagtatgtgcggcagctacacgttgaggatgaaaacaaggttggcttttattggttctcttttcttactcttctttaatccttcattgaatcacaatctaatggtatggcccttgtatcctgccactgcagattgttcaagagttttttttgggtacttttgacccagaggcaactgcggcgtttaatcaaactgtttctgatgcttcaactgatgcatctcagaggtataagctgaggttttacataacctttatagcagcagaaagatatatctcagctaatctgttatggtggtgtggttgcaggtatcactctcatgtatacaccaatgggaccacctgtgatcttacaggatcacctcgcgaagtcgaggtatgtaatctagtttactacattgcatttgggctcattgaattatgattcattatgcttgaaattgctctatgcaggtgaggtttgtatgcgcagaaacaagggcaatggtcacttcaatcactgaattatcaacttgcaagtacgcactgactgttcagtgcccaaccttgtgcaagcatccgtaagcaaaatctcatttacttgaaaaccagttttcaaagtgaatttactcctgctccattgaaagaccatgtcgtaacggaaacactagtgtaactatatgtttcatcttgaatgctaattaccaaacacgagtcactgctttataagtaagcttatgatccgttagtttgttaaccttgttcttgtggaaattgaaggctgttccagctagagaaaccagtgtcacacacgatccactgcaatgcgatcccagtggaagaagacgcaacaagaaacaaggaagaacaagcagtagacgaatcacctaagatgatagctgattcttgaaaaccgcctaagtgaatcacctaagagtaagagttaacagcgactgtatatacaagaactagcatatctccattttcagtgttacccgctgtagtgatcatggtttcaattgggatcgcttgctggtaggatgatgatactctctctgtaattttttgcatacttaaaatagcatttcaatagaaggtactgataaaccacttgtgaagcaaagactgcaagcttcatgtaacacatatgtttccgtttcactaatgaatttgttccaagtgtaggctgattttgtgtgtgtttcttctattttggtaaagttatatatttgtaatcgaagaatatgtttacaaattgatatttaaagtaaatttgacaactaaaaacctttggtttttaacaagttgagaagataagaaataagagagaacgcctttttttctgtgtccagaaccacttgactccctagagctgcctagttcaaacaaatgacaaatgtgaaacgcaaatttcaatttttgagcttcattaatgtcatattggtataaacaataatcattagtgattatccatctagtttttgattttatttatataagacttagccattaaaagtctttctctccaagctacaaaacttcatcaccaaatcttttgtttgtatatatatggttgttcgttgttaatcataagacataagatgaaaagcaaacaattattttttttctcgtctactctctcactctcatatttctatttttataatattttttttttgcttatgatttataacacgttatcagcatgatgtctttaccgcttgagcgtttatgagataagtaaaatttatggtatttaattcgtttatgtttatagaatagaaatattttagacatcgtgattcgtaagactatgcctttttccggattgatcgttacaagtggtaggctctgcctccttcacgatcaaataaaataaaaaagctatgtcttttccggaattgatcgttatatatatggtagactatgcttccttaatgatcaaataaaaggttatgcttttatcggaattgatcgttatatatggtaggctctgcctccttctatacgatcaaacaaaagctatacctattgaattctaatatggaatgctatgcctcctgaattcttgcataaaaaggctatagtccatctgttattatttttgtgaatttatatgcttaattattttttattttttttttcgacaaaacacttttattgattaaacagagttattacagagccaatttggcagagaaccaaagtcagaataaaaatcagatgaattacaaccaaactttgctaaattatgcgctatattattgcccactctcctaatgaatttaaactgacagctagtgaattttgcttcccaaaaatggatatcgattaataaatttgctaaagagccatgggatgtagacctcgcaaccagatttatcaaagtctgacaatctccttcaaagatgacatgagtataacctcggatccatgtttgttgtagtgctgccaagagcgcctttgtttcagcctctaaaggtgtgcttgtgtgttctaaagtcatcgaaccccaatgttttggtgtcccgttatggtctcgaattagccatccaccccttgccgttagattctgcacatcaaaactagcatcaaaattgcacttgaaatacggtattggtggtgttgtccatgaattcttcggtgtggcgttcgatcggttcagtggtcgtcgtggaccttgaatttgtgtagcattaagccaatcctttgtttcagcctgtgctcttaaaaccgttattgaaggactctctcggaagttattgaataccacgttatttcttgctttccatattcgccacatcaagcagaatggactaagtttctgagaatcgtgtatcgtggcggtctggaggaataggaaaatattggagatgttatcttcaatgttgttggatatcggaaagttcctatagagcgttggatccaatagtcgcctagccatatctgcaaatggacatgtgaatagagcatgattgatggattcgttttcctttcggcaacgtggacagccaggatctatccgcattccccttgtagttaatcgttctgtagttggtaatgcccgagaaagaattcgccacagaaaatgttttaatttcggcataataggcaagtgccatatcttattttttaattcgatcgaaccatgtggctgaatgattgctcgagaggtgtcaaacgggtcatgagtgagaaaccaatagccagagcggacagtataatctccggtgaagttgtaattctaaataagtttgtccggaatagggtttttggatagatagtttcgtttaaggtatgcatgatccctttgatccacatattttgtaattttggagtcatcccaagaacggcttaaacctctatgcgagaacaagttatccattgatagctccttatatttttcttctgtgatcaaaggacggggtggatgagaatcaacgacattatcaaaccctattcgagcctgttttccatcaccaatcacatatcttgtacccttttttaataatgttataccggatagtaaggaagcccaaccataggactgttgatttctttttttggcatcaagtattgagtcatctttaaaatatcgagctttcatgactcgtgcaaatagagaactcggatgtttgattatccgccaagcttgttttgcaagaagagcatcattaaattttgcaaggtctcggaaaccaaggccgccttctttcttagacaattgaagtctcttccatgcaatccaaggtatacccctttggtttgtagatttttcccaccagaaattcattagatgagattcaatctctgaaacaatactttgaggaagtttgaaacatgacatcgcgtacacaggcattgctaaagcaaccgattttagcattatctcctttccggttggcgagaggaactttgcactccaagaggctgttcgttttttgacgcgttcgatgatgtaactgaacatttctttcttttttcgaccaaactgttcgggaaggcccaaatacttacccccacctccttgatttggtatattcaaaagagtttttagacgtaattgagtagagccataaacccgggagccaaaagtgattaatgatttctgaacatttattttatgtcccgagtaatattcataaacgtcaaaaacatcttttagagcttggcagttttttacattagcttgacagaagaagagtgaatcatccgcaaattgtaaatgcgttatcgccgttgcgccgttgccaatacgcactccacgaatatcaccactcaatgctttagttttaatgagatggctaaagatgtctccgcataagatgaataaatatggtgataatggatcgccttgtcgaattccacgggttggagatatatatccatgtggtgatccattaatcaagacagagtagtgtacagatttaacggcagccataatccaccctatccatttgtcacaaaaaccaaagagttgcattgtcgtttccaagaaatcccattcaactctatcatatgctttgctaacatctgttttcacagccatatatgtttttgagactcgctttcgtaccttcagagaatgcatgatctcatgtgccatcacaacattatcattaatgattctacccgggataaaagcagcttgagaattcgagacgattgaatctaagtgagctttaagacgtgtcaccaagcattttgaaatgattttgtataatacattacacaatgcgatgggtctgtaatctgatagtgttgtaggattttggatctttggaatcatgcatatattagtatgattgatgctcgtcttcatagttgatgactcaaagaaatgcttcacctcctgaatgacatcttgacctactatgtcccagcatcgtttataaaatctcgcagtcaaaccgtctggacccggtgccttatcatctccaatctgacttattgtatcatatatttcactatcactaaaaggtttcgtaagatccaagttgattgtattagtaacagttgaaggaaaatctgcaaaatcaattggggaaacttgtactccatttgtgttgtagatagttgtgaagaaatcttgggcgtgacgaccaatctctttgtctcccgtgtatatgtgtccttgatcatcactaattgagtttatcctgttctgtgaaattcgaacctttgcacaagcatgaaagtaacctgtgttacgatcaccctccttcatccattggttacggctcttttgtttccaatatttttcctcatcactataagcctttgtcaacgactcttgtatttggggtatatgttgcctttcaactctaaccgtactctccatcgctctgtttaaacgttcatgaagtgtctttatgtgcagatccgaatttaaatttgatcgatgtttcagttttgccatagcttgacgacagcatcagattcgttctgtaatggcaattgattgagaattgtgagaagttttccaaccttcgtgaacgacacgtttgaacgtggggatatcaaccagtcagttatcaaacctaaagggcttttgtcgttgtgcaaatgagtcattggtatggaccaaaaccggtttatgatctgaaccggagaagtccaaaaattcagtttcagcattaggataagttgcagaccaaactgaattagtgaaggctctgtccaaacaacacttcacagtgaacgtgtgtctttcaccaacccatgtaaacctatcccctcttgatctcatatcttcaagatcacaatatgaaatcatgtttctgaaatttctggaagtccactcttctctcaaaggaccaccaatcttctcatcattggataatatctcattaaaatctccaattaacaaccattcagcattgcgattgtctgaaatttgttcaagttgttgccaaagatgatgacgttcagattgaataggatggccatacacacaagacaagtagaagctcttattattatatgttacaaaggtatcaatgatcctttcatcctgagaaatcaaggacaaagatacattgtttttccacataagagctaagccaccactccttccattggggggctgagttattacattagaaaatcccaaatcacaagctaatttatgtagaacatcacactgattaagtgtttcaataagaaatagaatatcatacttatatatgcgatttaaacggaaaagccgggactgagtcagcggaacacctatgccctgacaattccatgagatgatcctcatattggatcccttgggggtacagggccccccgcgcctccgtctaaaccattgtgaatggaacaggaacccgcagattcagcctttctttccttcttacagagttggctcaggaccgccatctcatctgctgcctccacctttcgatacatgtcctcaaattgaactcgctttcgcttcagtaggacaaactggttttgtgcattgtcagaagaatcctcaaggagatcattggaaattggtgtctgagtccttactctcgctagtttggcgtgcaggtatcgaagcctttccacagtgaggtctgtgtcttcaaagacacttggaacagagaagaccgtagtgttttgtgtgttcggacccttatttccagttgagaacggttgagtaagaccagggatgagagttgcagggtcaactgtttgaagggtatcggtgtcactcatgtccttatccttgttatccccttgattatcatcatcatcattgtcatcatcgctaatttccgctgggtcttcatcatcaaaggcaagaacacattccttcacatcatgtttcagagaaccgcatttggaacagaagttcctaagtctctcaaaccggtacttaatcacagtgttttcatcaacagcaaattgaaaattcctttgaaatcgaagcggatcatctagattccaatcaatttttacccttacaaatccaacatgattcgaattctcatcaaagtcaacagtagacacaattcctagcctatttccaacacatcgtgccatcgcattagtaaggaagagaagtgggatacccgtaatttgcacccaaaacggtatgatcttcaactcggtttcactgatgtttggataccagcgatggattgagagcatccaatcattaaacgaccacggtccacgacgaagtaccaaattcattgcttcttcggtttggaatttaaattggactctacctctttcaaggattctgccaacacacgagtcggggaaaccccaaactcttgacatctgtccaattaaggcacgaaggttctgcttacgaggattcacggttgtgaccaccaccgagaaacgattcacatacgctgcctgggaacagaacttcggagtaagagccaccggttcgtcatcaattcccaaattcaggtcttgaacggatttacgcagtctatagtcatgttttgtggtggtaaagaacggggggaattgaaattagaaagtgaaaggagggaaatcgaattggaggatttatagagttggaaccatggcggtttatgagggtagttactttccgaattggaaggagaatgaaaactgacattataactgttaggcagagagtaaccaccatcgaaattccatagaaaaaaacggattccgatcgtcggaaaagcactccatcgtggagaaatcaattgatgaagaacgggtacgaagtcgcccagaaaatcgccctcagagagcattgccattcattcatctattctacaaattgttattgaacatatatgcttaattatttatattggttttattcgtaaaaaattaatatgtgttacataatatttaaaaacattaaagtatttttaaaattaaaaatatagttttcttatgagaatatatgaagcacttgtcgatgtatgtttagaaagtgcacaaataatgagaagatctagatgagctagtctctcgacttccaaatacatcagattcataataatcgatgttttgtgttttccaaagtctccaaggaaactcgtacagttttaaagatatttattattattatattgagactataaattaatatggtgtcaaatgtttgaccacaatggagacacacacatgtatgattatatcatacaaaaataaagatggtaaaatttaatatatggtaaatttatttatatattatggattcgatggttgtataccttctccttcattttgtggtaggctatgcctccagaatcatatgatttttggccaaatcaccatttttttaataagctcatagtatatgatggtcgatttcctaaatattctccaaattaaatctaaaatataaccgatctaaaattagatccggtacaagagaaataggcttgaaaagccataatcttgggaggaataattacaagtcccacatttttaagaggatccaaatttaaatatatgatcccgttcatacatgttattgatcctaaagtgagattcatttcgagatgaataaactttaagagttattatctcgagggggagaattaaaggaatcccacatcgataataagtcgataaactttggtgaatttgacgccctagagcgagataactctggtgaagtcatatcctaaaagttatcactttaacataaagtggaacatctaaaaatgatgtttactctcaaattgagctttaataaatcgttcataatgcaaatccaagtgattgcaaaacaatttatgatgatttaatctccatgtttttatatggaacatgatgattctatataaggccaacgattcataagaaatatttctctcatgttatttatacatgattagagatcaaatatttatcattttaaattttatgggtgtgagatatatattataaatgctcttctgcaccacataaaaatatcatccaaagaggatgaaatttagagatgttggagataaatcttcactctattaatattgagccatcttttagagatgtgccaattgcaagatttgcaaatcataatgttgatgataaaaattctccatcactatggaagatttattgaatagtttggatctttgaacaaataaatatgaacttaagagttcaaaaattcaaaatgatcactattcagagtatattgcaaatcaaatgcaaacagctgatgaatgagattttataaaattattgatcctcatacaaataaatatgaacttagagagttcatagaaaaactcatatcccagctaaaaatgctccaaaaaaaaaatatgtctctggcagatgacatattattgtctataacacgttaaagaacgtgataaacatttttggtttcaaatataaagaaaaccctcgaaaagaaaaaagagcaaattgttatatagaggattaaactcttaaaagaggagcatatagactcttaaagaagagtaaagagactcctgaagaagagtaaagagaccgattgacatggttaataacaaaatcaggtacctaaataaaatcatttataatgatctagcgtgtaatgtaattaatgaggatcatgaatctccgctctgtgagcgtaaagagatatattggccaataaataaagagagtcaagtctatattaatctcgtataagaaacgagtaatttctggacatatggtccaaacatcaaaaagagtgttatgatacttaagacaaaacggtgtgtcgcgccgggatttgtcaaaatcactcgatattgaattgatgctatataaataacttaactacgcctcatgggatgtctaaagaactaatccttgaaagatatatattataattatattccctggaatttataaacataatgattttgatcatcaaaactcttaaagagttaattggaataaaagatcttggaaagacaaaagtgtctccagatattccaactaaacatctaaagtaattgatgttatattagtcacttctaaaggaagtcgactctatatatttggtcatgaaacactatatataaatgctgacgagtatttatatattttgtgaattgtatctagcatttgctattgatctacttgcaggattaactcatctccctcggctagacatcgagataagtaagaacatgtcctttataatctgcaaggttagattgagttggacttattttattctagaaatctcgaattttggtttaataagttttatagatgaaggatttatatcaaaccatataaaaatatatcgcaaaacaacaagctcgcggtgtttctagtagcagactttggtcgtagcttgctcaagtcatgccaaaattattgcacttcatgaagcatgtcaaaaagatgtatggcttagattaacgtcatcaacatatataagaagcaagcaatatagtcaccaatgaagagtcaacaacaagacaatgttgcatatgtttcccagttcaaaggaagctatgtcaagagcgacatgacaagaaatatttctccaagattcttctgttacattcaagacctcaagaaaaatcaagaaattgatttccagtacgttcgcccaaaacacaatgtagcagaaaagcgcttcgagctacaacattcagaaatcttcttcacatatcaaaattcatcttttgaagaagatgcttccaggaggagacatatgatgatgagcgtggctgtactcttttttccttatcatggtttttatcccacttgatttttccatgaaaaggtttttaacgaggcagcaaagaacacgcaaaagatagacataaaagtaaaggtctatctctcttacaaaatctttgtcatatattgacgagatcaaaaggaacgaaaagaatgatcaagatgtatcacctacgagacctgtgaagtctcttcgagggggagttcacgtcactgtactcttttttccttgtcatggtttttatcctagtgggtttttccatgataaggtttttaacgagacagtacgtaattcataaaaagtgatggataatcaagggtgagtgttataaacaaataatcattagtgattatccatctagtttttgattttatttatataagacttagccattaagagtctttctccccaaactacaaaacttctttaccaagtcttttgtttgtatatatatggttgttcgttgttaatcataagacataagatgaagagcaaacaattattatttctctcgtctactctctccccctcatatttctaattctataatattatttcatttgcgttatgatttataacaattatattattttgattatagacatagttttggatttgttccaaaaaaaaaacagaaaaggcagctgtagataaaattaatttatatgtgttagatatttaatttctatttatttaagtcaaactaaaatatcgttttatttatttgagattatttttctatatatatgataaattatttccttctctttatttgacgtaaaaaaaaaaaaaactagttacattttactataactgatttatcttatataaaaaaaagatttaatatatcatataatttttttctataagatcattgttaagcataagaccaacaaaaaacttttgttgtgttacttattttgataaatttatcatgcttatttagattctttagtttataaaatatttcaatgttatttatatgtgtaacctatatttttttctctcgactctaaattatgtagtattttcttgtctattaaaatgcataactcaattttttatttggtttaaattatacatgttataataaaaacataacttagctaaacgatgatggaacacaaattttaaaatatatatgtaatacaaattcggtcatgtagtgatttctgtaggttcatcaccattcaccaccaacatgtttgcaccatatctaaacgagtacctatttctctgttcgggtgcaatttcttgaaagtaccaatagtactagctagaaatatcaaaaccttgtcactaaagaggttatcatgcacatccatgaaaatccactcataaatttgaggcttagggcaaacttttcttttttggaccttttgttatgatttttttttttgggcattctttgaagtaaattttgagtgttttaacatttttcaaaaatatgggctcttttgtatataaaagaaatcgtttagatataaaaatgagactttttaatatatcttataacaaaatttggaatttttatcaattatattggacaattatttttttccaagaataaggctttttcttatgtaaagtttttaagtagggataaaccttaggccgtcgcacctctgccccatcctagtgagccgggcctgatacgagtgttcaacataaatctgcttgagagtttatagtgctgagattacatttattaccaccaacggaacatccaaaatacgctagattcgtcgattgagaaccctcttaaatatgaggattttcaatacgaaacaagatttttttaggacaaattttttttatataagagatttaataatacgtaaatctagttttaacttcttataatttttataataatagtaaattacaataatttataataaggttaattttggtattataaaaaaaaagtccaaaataattaatttgatcaataaagtttttgaactctctcctcttttcttctcaaagaaggcttgagttctaagcaacatgctcttgtcgtgatccattgatatacgagaagctcttgttattatccgcttcaacagttggtacctgagacatactaatcccaatcatgtctcctaagtcaaagactagcaatatgcggttcgtgagatgttagcagcatttcaacaaattataagtgatacgaagtaaacctcgatagaaacgtatgttcatgcaattgtacaagcacgagatcctgctccaatattgccttagcttgttgtgaagctcttaacaacaagaaggacaatgaggaagacgatattgtccataacaaccagcatgctcttttaattaaacaataaactcaaaatctgacagtaacttaaagtaattcacggacgcatatcagacatgtgactaacaccagcacaatggtgatggatcaaacacgagttccagatggtggatataacaacactatgattaaaaagccttgctttaggtctttcaaatgttttggatgtggtggtgtacgccatggacaatcatcttgatgtcgcacttgatgttaatagtccctcaatttaagatgagctagtggagggtgatacaggttcaataatgatgttacgtcttaactgcatcagtccacaaggtgttaacaatgcttggttatgaattaacattttttgtaccatacaaggtaagttttggcaaattatcattgcttcgagcagctgtactaaatgtgacttctcaaaacatagcaacaaaattggcattgtttattgaaacacacccaaagttttattgactagcttggctaaacaccaaaactgattacgcatctcagagtaatgtgtttctcagaatttcatgatgtgtttgccgagagattaccaccattatgtgatatataacattgtattgatattacctccttataaggttttgcctaattgtctgcactatcgaataagtcatcaagaacacgatgagcttcgacgccaagtagaggaattgcttgctaaagtttatctaattgaaagcttgagtccttgtacggtgttggcgttgctcattcccaaaatggatgggactttacgcatgtgtgtttatagcccgacaataaattagagtactgtttgttatcgattttcgattccatgttttttacaattttcttgactagattgggtattcttctatttcactaaattggacttgaagagtggttatcctcaaattcatattagaccgagcaattgtgttcaaacttcaaaacaagagagggtgtttttaaatggatggtgatgccttttgtttatcgaatgcaccatgtacttttaagcttgtcatgaaccaaactctctgccactgcatcgatcattgtgtcgtggtttagttcgatgacatcttgattttaagtgtctccttgcaggacgtgttatcagtctttcgttgaaaaattgcagcaactaaaaaatgtgtttttggtattttacatattcattttcttatgtatattatcctgacttgttgtcttgaagtggatcaaactaagatatcaacaactaactcttggacgacacctaaatctgtcacgaacttgaggagttttcatggtctcgcctcattttattgatgatttgtgcctctcttcagtagcattatatctcttttaacatattatattaaagcctctactttcatgtggactggtgcaacatgtgaagcttttcgggtcttaaaggaaaagctaacttcagcgcttgtgcttattttgccaaattttgctttaccttttgaacttcactgcgatgcctctaaatgcggaattggagctgtcttaagtcaaactggtcagtctatagtttttttagagaaaagatttttaggatcatgaggcatcataacacatatgacgtagaactctatctcgtggtgcaagtcatcaaagattggagacattatttatttcatctactgttgttctctttaccaatcatgacgcgttaaacacacggggtctcaaaatagttttttcgacatgcttcatggtttgcttatttgcaaaaaattaggtttgtaatcaagcatacaacagggatgttgaacaaagtgtccataacattgaatcgatgtcaaatgacttttttgcagtttacaaaacattctatagctgatttatcattggactacggttaaattatgttattgttacgccgtattcatcagatttatctttatatatttatcagtactaaaagtatcagtattttataaaatatttataagcttatatcagatgttgacttctcagacaagcttttatgaaaaaaatttaataaactaaattataagctctataagctttataagcttccattataaaacgtttcatcagatgttgacttctcctataagctaataaaatttttataagcttttataagatgtttataattaagaaaatatttataaggtttataagatgtttataagcttttatcagatgttgacttcttagataagtttttataagaaaatttaaaaacttaaattattgaagcttataattttttttttataaaagaatcctataaaagcttatgaaagcttataaatatcttgttaaaaaagcttttttatttttaaaatattacttaaattttcttataaatgcttataaacaatatttttttatccggccattcaatttgacttcccaaatgattttgaacctttcagaggaagcgtgactcatttcgtacaatgggtaaataaaggtttttaaatttaatcggggtcaattgcacccctactttgaacgtaagtctgcggcctcacgtgctctgtattcatcctttgtgtctttagataatctaagactattgtcaatttattctcataccgagcaaatgagttgtcctacttcgttttcaaggtaatctgtaagttcttttgtagtagttgattccccaaacccactaatggttacttgtgaaacaaccaagttcttcatgtttccctctgaccccattctcctgagaaagtaaaacagtcaagtcacaccatcatgacaaaatctaagagaaacctttcaacagagtctaagcagaagtcatgcaaaatacactagaatcatggatcgacaatcaaacaggtgaaaccatcatagacccaatttttgctaattttaaggtctttttaaggtattttgggtaaaatgtttgagtttatagaggtgtgggatacgggctttgccctccatgcccaattcggcccaaacacaaatagaacaagtcaataaagctcctaacaaggaagaacggcccatcagaacaacggcccatcaaaatgactgctcggcccatcacagctcggccatcacggctcggcccatcacggctcggcccagcccgataaattcagaagggcaaaacggagatatcgcaagagagactaagagaaccctagatcagctccttgcctataaataagaggagatccactactaagaagggattggagaacctaagtcaccactctgagaatttaagagagaattgctgcctagctctttatctcttactttctggtttttcgttctgtattttcaggttttccgaccattaatattagttttctgacctgtactttcggttctccgttctgtacttacggttttccgttctgttaattactgtctttccgttcgtcattaataaagaagttactccgttctccccaaaccccttagttatttattgttacaacctcggtacaaacaattggcgcccactgtggggctaggcagagttttcttctaatattaaggagtcagaaccagagcgcctcgtgccgcaccaccagctcgaccaacgatgccaccaccagctcggccaacgacaccacctccagccgcagctcctgtcgcagttccagccgcagctcctatcgcagctcccgacgtaactcttgtcacagctcctgctgaacccggagaaacaactccacgaaaaaccaatctcgacgaagtcatccgatcttacctcgaccgactcgacttacaggacgcaagaactgccgaacgcatcaacgcgattgtcgctgcccaaaaggcctcgcagaatcagatctagcaactccagtcctctgcagctcgcgccggtcgacaacttagcgatgccgaaacagtaccgccccagcgaactccaatcaaagaaagaccggcgaaccgacgcaacaggcatgcttccatcgtcgttgggtctatcgacgagcacacccgtgaaaatgcgccgaaccgtgacaaccagccaaacatcgacactcggacacgccgaatagaagatgacgatatcggtgcgcgcgatcgagagctctaaaaattacaaattactatgaaggatataactctgctctgcaccagagttagacctttcttcaactggatcaactaacatgatgcaaggacggccgagcacctcaacataaccgttgaaagagtagggaatcaagcatacccctcaagccgacccggttactcacctgcacctgctatcttccttcaaaggctgccaagacagactattccaatctcgataaaactgcaaccaagaggacttacctggacaaactcgtcttaaacgacctcaatccgactcgatagccaccatctccttcgtccagctcgttgcctagccgccagttcgtcgaattgcagcaagctcgtcgccaagtagccagctcatcgcctagaagctagctcgtcgcttagctgatagatcgtcgcctagtagccagctcgtcgtccaactgatcgttcgtcgcctagcagccaactcgtcacttaccagccagctcgtcgcctaactgatagctcgtcgtctagctgcctagtttgcctaaccgccagctcatctcaaaacggcgtaactgctgagcttcaacgtcatgagaatctcgtccatctcatagcacacatagtcttatgcttgctaattagctcgtcaatccgatatacatgcccgtcaacgctgatctcgtcaatttgacagttcgtgctcaccaactatcaggtcgtcaacccgagaattcctattcgtcaactgtcagctcgtctatccaaaagttcctgctcgtcgaatgttaaatcgtcaaccccgacagttcgtgctcatcaactgtcagctcgttaatccgatagttccagctcatcgactgtcagctcgtcaatccaaaagtttcttctcgtcaacagtcaactactcaatctaccagttcttgctcgtcaaatgccagctcgtccaactaccacatcgggctcgtcttcaagcttttcacatctcctcagcaactatctcctcgtatacatatcggttcgttacttaattgcaaagctcgtccagctcgtctagctcgccgacccagttaagaagcaatgccaaccttagaagaagtcttaccgaccaagtcaagtaacctcatcgaccttttactcggagaacttgcgatcgagtaacttaaagaccacaccaatcaggtgcaagaggccttgccgactcgaccaactagtcgacccgacgacttgaagttgctccaaccttgggaagtaatagcgtaaaaccagtcaaaaggtctcaccgaccagagaagaagtcttgtcgacaaggcgccaaacacaaaaatctttgaagtacaaactcattggagcaacgacaatcggcaatatcacatggccaaacatctcaaaagaaagagggaaagattattcgcaaccaaattgtcaaacccgttccccaccatgagacgatccagtccaccatactcgctgaactctccctcatggtcgctaagatccaatccattgagctccgcattaaatccgcgataactggaggtggaacgaatctctcaacctcgctagaccgcacatcatcttcgccgagctccgcttctggctcctcaagctcgcctctccaacgaatctcgccaactcgtcgagcatcctctaagccgagctccacacttaacagaattgtcgcaaaggatagctcacggtgatcaaagtaatccgcaaaacaaacttcttctatgacgagcttgcttctccctgtgtcgatctctccactatcctcggtgtgttcacctcatttagatctcacgctgaactcatcgcctagcatgaagacaacccacccagtccctaaacccaacttaccaacgtccctaatcctctttggcagatcaacatggctaagcgtgacaagccttgtgttggtttcctgaacctgaatttccgcgacgacggatacgctcagctctaagcgcatacatcaaaattaaaaaaaaaaaaaaaaaaacgctcgcttccgagctcatttgctatatagacaacaattggtttaatcccttctgggtgatacatatgcaacttcttctaaacgttatttttctaacgcgcacacaagttactactacaagtctaacttttacgagtaacacttgtcatccccacatcgtctccctggccaggagttcgattctaaaacgcgttcccacatggatgcagtggtgctcgttagataggtctaaaaaacctgttttcgaagaaataatccacatctttacttaagtaagctaaaacttacacttaaagatttaaagccgacccagattcgaactaaataagctgatagtaaggcagaacaatataagccgagtccgctcgcacgttctcgcttacctagaggcatccacagggtaagccggacaccagcgtcgcacctacaaagtacgacgagtcagtctcgcatacttcatacgtaagccttgtgattcgagttcaacgtatacaggataagtcaagggacgccttgccctataatacgtttcgaaatcaagcttaaacgccaaggaaaacctcgcaaaatataagcttaggataaccttgcacaaaaaactcaagaacaagcttcaagtcatcactaaattctccgtctgtctcatcattgtcacttcgtctctaagacaaactcctaattgcgtatttagataggataagccgagctgcagatcgcaccgaatctaaatttcgcaacataagccaagcccagccttgcattctaatctgaagtcaagcttagtctcgctcccaaataacaaacaatatcatgctgaatcaaactaccagttacggttaagccgagctcgatctcgcacatacaaagatcatttcctttactaaaatgcatgacgaagacatgatccacgacataacttaaagtcgtgccgatctccccatgcctaaaagaagatccgtaaaatcaacatcatcactcagtcttacgtcatctcctcgctcgccaaaacaagtttgccgcactcacggccataacaatccatcgtaatgccaaccaagtttggtaccacgcaaaatcaaccaacattcacactaatcgttttcgacgattgtgctaagcggacctacttccttgctactcgacacggatccacaaaacctaatgccaatccccgtaaatctatatccactaagcaagcgttccctgtcaagcgttccttgtagagcattactcaccaagcgttcttaacaaaactgtcaaacgttcctagctcaaaaacctcgaacgttcaatccttgcctaacaagcgagcgttacttaccaagcgttcatcgcagaaccaacaagcgtttctagctctaaaacacagagcgttcagtcctcaccgaactacaaagcattctcatcgccgaaccaaacgattgagcgttcttcaccaagctacaaagcaatcttcatcaaatcgccaaactaatctccagtcttgctaagcatcaataatcataacgagctacacctttgtcgatgccacactacatttatcacttacaaaacgttcaacctccaccgaaccttctcactatacaaagccatcacatggaacagaaccatcttgttgacaagatccatcgcaccaaacaagacttatcgccgatcgttcttcacccagcgctaggcattcccataaatgtgcaaaagatcaaactagggaacttcgcaaactcccaacatatcgttgttaggcatcttagcaaactcatagtggatcagagctacacagctcggcaaactcccagcatatcgttgctatgcatcgtagcaaacttgcagtggatcagagctacatagctcggcaaattcttagcatatcggtgctaggcatcttagcaaactcgtagtgaatcagagctacacagctcgacaaactcctagaagcatggagctaggcatctcaacaaatttatagaatatcagagctacatagctagtcaaactcctagaagaacaaaggttgacagctcggcaaactcccaccagattagagttaaggattcccgcaaacctgtagaagaacaaacctaggctgtctcgcaaacttgcaacatatcggaggtaggcagctttgcaaattcgcagcagattagagctaggaagccatgcaatttcgcaatatatcataagacattgcgaaaatcctagttcgcctagctctaaagcagttaccaaaatcgccagcaaatctcacaacgattctccctgaactcattaccgacctcattcgctaactcagtcccaccgaactcactcacctattcgaactcatagctcaagcaagaacgagttcaccttcctacgtcgacgaaagattcttgccgagcttacacgctttgtgtcgacctcgactcaccttgtgcacgatccaacatgcattgaccttaacgcatatcgtgcaacctcaacgcaacttgtaccgacctcaacgaacaattgtggtcgagctcaaatacctcgtgctcacatttacgcacttcacatcgatctcgcctaacacatctctacgaccgacctcctttatctctcatgctcctcacactaatctcaccaagtacacctaaaaatttgacctcatcgagctcttttatacaagaccagcacgccttgcatcgattttagtatcttcaccgagactttcctcgttaaaacaactttgctcttgcacaaacgcctaactcttcaaaatcactaactctcgcaaaagcgcacatctccaaaatcgtcaagctctcccacaatctccaaaatcgtcgagctcttccgtctcatgcgagcacatacatccaaagatcttaaagctctaccacgagcacctatctccaaaaatcatcaagctctcccgcgagctcctatctcaaaagatctttttgctctcccacgagcgcacatctccaaaatcgtcaagctctcccacgagcgcctatctccaaaatcgttgagctcttccgtctcttgcgagcacatacatccaaagatcttaaagctcttccacgagcgcctatatccgaaatcatcaacctcccacacgagcgcctatctccgaaattgtcaagctctcacacaagcgcctatctccaaaatcatcaagctctcacactagcgcctatctccaaaatcgtcaagctctcccacgagcgcctatctccaaaatcgtcgagctcttccgtctcctgcgagcacatacatccaaagatcttaaagctcttccacgagcgcctatctccaagatcgtcagacactcttgctagcgcctatctcagaagatcttatagatctcccacgagcgactatctccaaactcatcaagctctcccatgagcacctttcttcaggatcttcaagctctctcgcatgcgcctatcttcaaagatcttccagctctcccacgagcgcctatctccgaagatagtcaagctctcctacaatcatctatcttcgaagatcgtcgagctctcaaacgagcatatatctttccacctattgcgattctccgactcttgcaaaaatccacacttgctcaaacaaagaatttttctttggttcgggccaaattggcatgtttccggtttcagaaaaatattcgccaatcgcaagaaaccttctctcgacgaactcgggggggactaattatgggatacgggctttgccctctatgcccaattcggcccaaacacaaatagaacaagtcaataaggctcctaacaaggaagaacggcccatcagaacaacggcccatcagaatgactgctcggcccatcacggctcggcccagcctgataaattcagaagggcaaaacggagatatcgcaagagagactaagagaaccctagatcagcttcttgcctataaataagaggagatccactactaagaagggattggagaacctaagtcaccacttagagaatttaagagagaattgttgcctagctctttatctcttactttttggttttccgttctgtattttcaggttttccgaccattaatattagttttccgacttgtactttcggttctccgttctgtacttacggttttccgttctgttaattactgtctttccgttcgtcattaataaagaagttactccgttctccccaaaccccttagttatttattgttacaacctcggtacaaacaagaggaaagacaatttagatttaatttcaccttatcattgattatcgtttttattataatcgcttcatatgctccaactttctaatgcattaccttgatgatgagtctttagatttgctgacttctttagcagaattggcagtaaaaccctgaagttgtttggaaagccaacagatagacgaaacagatttttaaacaccgagattacattacggaagacatctgaaaacataagaaaaaatgtaaaactctgaacttaagtaagatgctctctggctttttctgttgatcaaaactcgaccatgggatcattggttcatgggtctattcaagcgtccaggtaattggttcagtttgtaagtgattgaaaaaatctcttaaacaaagaaacctgataataaaatggatgatgagttgaagttgatgttcgaacttttttgacaaattttttccggtgagtttccggccaaattccggccaaacggctgaacggatttgtcgggtgattagtgcattggaaagctggtaaagagttttacaaaatggtatactcatacgtcaaaaacggagttgtattgaatgagaaataagggtgtaaagtgggacacttgggccaaaccggaccgaaccaaacaaaaccaagctgagccgggctgcgggttgtcgggacgtcccgtcatcggctcaagggctgtcgggcttgcggaccgtcatgcttgtgagttattgggcttgctgagttgaatcttatggaaatattttcaggatagtctcaaaatattctcagaataggatagtctcagaatattctcaggataatctcaaaatatatcatgcatatcctgaaaatattctcacaaatcttatccccctctactatataaagagatccagcgtctcattatttctcaagctctcaaacacaaaacactctaaattctaaagtctctcctctctctctcttgcttcttaaaagtaagttcttagtttagtagtttcgagagtatatcgtagatctagttcgcttgagtctaatacttgtgtgctcgggtattagttcgtgatcggttgtatcctgggattcaaaaatcgtgatgtccaaaaagcacgtacggccgatttattgaattaaggaaaaagatatcatatcttgcctccgtgatttactttctgtccttaattactgttactgtaattttattgttattgttatcttaataaaattcgtacttgtttctcaattcggtttttgggctcctacaatcttaattcaataaatccgcttttagcttatcgctctagacggattgagaaattttcgaattttttaaaacgatttcaaaatcttctaaaaattgtttccgctatcatctttgggtgcttacgtagaaggtttatagaagaacgttattacttctttctttctcctctttctaaactgcttcgcaaacgctacgtagcgattgttgtgaacagtttcttatataaacttctctagtttccacgaacactcatacttgaggagtttgggaaacgcgaaacaagtttctgcgaatgcttcttaagcgagtttgcaaaactaattcggtgaacagaatgactgatatcggtgaaatttgcaaaacaagtttctgcgaacgcttcttaagcgaattttttggttaatatactaatcagatctttttttttgtgaaccgaatgactgatatcaacaccaacagcaagatcgttggcaacaccacagttgttgagaccccggatgaggtagctttgcaccttgcgaaagagcttgaaaagacacagatcaccgattctggtatggataatgtgcgtcgaaatctgttcgctaatgattcaaccaacactaccataccatcctctgcttcccaagggatgatgccagacttgtttgatggtaaatctgggttcaaacgtggcaagaaaagatgcgctactatttggtcagcataaacatggaaaggtacctcacagaggatccaccaatagttccgcaaggtaccacatatgtgtatacggttggaggtatggatacctgggctcaaggtgactattgttgcaaaggtctgatcctgaaccgtttggtgaacgatctgtttgacctctacaacaaggccaagtcttccaaaacactgtggctaactttagagaacaagtataagactgatgagtctggaatgcaaagattctcaactgcaaagtttctgaatttcaagatggtggactccaaaccaatcatggaacaggtggaggctcttcaacgtatctctcaagagatagagttggaagggatgtcgatctgcaacgtcttcaagacgaattgcttgatcgagaagctaccaccgggctggttagatttcaagaattaccttaacttcaaacgtaaggcaatgacttttgatgatctcgtccgaaggttgatgattgaaggcaacaattatggggctcacgcgggtgctcagaatcaagggcatgatgttaatgtagctgagcataaggccaagctgaaaggcaagggaaaagggttctctattcctcagaagaacttgaaggtttcatcgacaacaaacttcaagaagagcaatcctgagcggaagttcaaaggaaagtgtcatcattgtggaaagattggacacaagggtgatgtttgcaagagcaaagccaaggatgtcaagagccaggcaaacctaactgaagaggatatggttgcagtggtcactgaatgtaacatggtggacgacaaccaagtggagtggtactacgacactggttgcaccacacacatctgcacagataggaccatgttctccacctatgtgaagaacaagtcaaacgaacaactcttcatgggcaacacagcgatgtctatgattgaaggtaagggcaaagtggttctgaagctaacttgggacgtgagcttactctgcaaaacgtgaagcatgtacctgacatgcggaagaatctcatctctggaaagggttttgttaaaggtggactagtcaaaatgtctgtaatgacagtctttccaaaaaatgtagcttctgcttctgttgtggaaatgaatgaaaatcctattacttacttggttgaatcgtttactacttggcatgaacgtttaggacatgtgaattataaaataatgcgaaaaatgcaaaacatgaatttaattccgaaattcaaaactaaccaagaaaaatgtgaagtatgtgtacatgcaaaactcactaaaactccctcaccacgagttgaaagaacaactgaacctatgaatttaattccgaaattcaaaactaaccaagaaaaatgtgaactatgtgtacaggcaaaactcactaaaactccctcaccacgagttgaaagaacaactgaacctctaggtttaatttacacagacttatgtgatttgaaatatgtgcaaactagaggtggtaagaaattttttgttaccttcatagatgattgcacaagatattattatgtatatctattacatagcaaggatgaagctctggtaaaattcaaagaatttacactcgaagtagaaaatcaacttcagagaactataaaaatagttcgaagtgatagaggatgagaatataatgagccattcaatgcattttgcggaacgaaagaatcgaactctaaaagaaatgatgaatgcactgttgcaggaatctgggttagccaatgataactgtgtattttgcatattttgagcatccatttgtcatcactttagcaccatatcatcattgttttataccatttctcatcatttgtcatcactttgtatgtttaggatagttttgcatgcatgtggcatatttgtgttgttttcaagtgattcggagctgttgacgagctaattggaagaagcggacctgatcatgccaaaccactcgacctccaggtcgagtagacgcttcacgacctcaacacaccactcgaccacctggtcgagtataggacttcaccacttcacctcatcactcgaccccctggccgagtacccccacaagagtcactcgatcaattcactcgaccgccaggtcgactgtgttcacctccaccacctgaccatcacttgatcacaccactctacctggaagtcgagtatcaccatcaccaccactcaactacatactcgatgtcgagctttagagtcttctccattccgctctcaaccagacactcgagcacaaggaagaaaagaagattccagcttatcactcgacctctcactcgaccacctgggtcgagtacagtttttaatccgtcccaatactgcgtcattttgtgtattagggtttcagaatattttgctataagtagcatgtactttacattttcgagaacaagttttttctaagttttattccgtagacactgtgttcttgaccttttgtaatccgaatttctctttatctattcagtattcagtatttgttcttgattttgtttattgttgttcatcctgttttcaccttgctattacactgttgttatcatgttttcatttcattcaacgtttatgttttctacaatgatgtctgagtagtgaataggtttctgaggatgggttagagtagtttagaatctcagtatgctaggtggttgagtttgattgatagatctcttctgggttagttgttcttaatgcctatagatttctgatcaactggaatttgagcccagacatttccacgcccaaaaggtgttcgctgaaatgtctgaaccactaattccagagattcgtgaccctgtaccaaggtattggttgcagggagcgttttggctttaacttgttgattcgtaatgcctgttaggttagctctcgtcaatggtgattgagtctgagactaggttaacttgagggtctctattgcggtggcacttagatttggttaatgaacttgttgtgtagggatagtttattgagcatgtcaatcacctgtaaactgaggaaacgaaactactcaattactccatcctcggaaattctttatctgattgattttattatttactttaccgttgtttactgcatcttgtcatctgttgcttagtccctgcaattctttgctgttactcgacctgatactcgaccacccagttgtctggcaacagactctggagtcgagtatccctgttacattttatgtctgttactcgacctgtcactcgaccacaccctgtgttgagctgcatcgagctgtgttggtcgagtgttttcttgtttctacttgattttctgttttctgcatgctcacttaggactgctagaacacaccaaaatctgttattgcttggcttgatttagtgacttctgatcacaacttgattgttagcatcacacccatttggattgacacctaaaatactacaacgacatgattggtggtttaggataattgactaaaaacctattatcaatttggcgccgttgccaattgggtgtttgtgtgttacatttgagatttcaaacttgcttagatcaagttctttttcaattttcaaatcggttgctaactgtgtgtttttcttgttgtctttttgatctaggtacacctctgctgtatgcaaactcgatcaacaggcaatcagaacctccttttcaacgataacatcgaccgcatagctcgcgaactcagagaaaggagaaacatagtcaaccttttgccccaacaaccactcgatgactgacgaaaagaatcaacaaaatggccatgtcaacattggtgctggagatgcaccaagggaccatcgttagaagaaaggaattgcacctcctgctatccagaacaacaacttcaagattaagagtggtctcatctcgatgattcagggaaacaaattctctggtttgccaatggaggatccactcgaccaccttgatgaattcgataggctctacaacctaacaaaaatcaatggtgtcagtgaaaacggattcaagctccgtttgtttccattctccttgggcgacaaagcacacatctgggagaagaatctgctccatgactcaatcaccacctgggatgattgcaagaaggcttttctatcaaagttcttctccaacgccagaactgcaagactcagaaatgagatctccggctttttacagaaagctggtgaaagcttctgtgaagcatgagagtgttttaagggttataccaaccaatgccctcatcatggcttcactaatgcctctctgctcagcactcattatagaggagttttacaacgcatcagaatgcttctggataccgccagcaatgggaatttccagaacaaagatgttgaagaaggctgggaattggttgagaaccttgctcaatcagatggtaattacaacgacgactgcgataggaccgtcagaagcacaactgactctgatgacaaacacaggaaggagatcaaagcgctgaatgacaagctagacatgattcttcttagccagcagaagcatgtgcacttccttgttgatgacgagcaatatcaagtctaagatggggaggataaccagttagaagaggtcagctacatcaacaacaaccagagtggctacaaagggtataacaacttcaaaaccaacaaccccaacctctcctaccgcagcaccaacgttgctaatccacaagaccaagtatatcctccacagcaacaacaaggtcagaacaaaccttttgttccctacaaccaaggtttcgttcccaagcaacaatttcaggggaactaccagcaaccaccaccacctgggtttgcacctcagcaaaaccaaggtcctgctgctcctgatgctgaaatgaaacacatggtacaacatctgctacagggacaagcatctaactcgatggaaattgctaagaaattatctgaattgcaccataagctgacctgaatgccaaaatggaggcattgaataccaaagtcagatacttagaaggccaatcagcatctacctctgcacctaaagttacaggacttcctgggaagtcaatacagaatccaaaggagtatgcaactgctcacgccatcaccatctgccatgatcgagagctaccaactcgacatgtccctgatttaatcattggggacaatgatgttcaagaaggggaggcttctactcagattgaagtctctgttgttgaattcaaccattctgatggttttcgccatctcattcaatccacctcggaagagaaggccgccactatcaagagaatagtgaaacgattcaaacctactccattaccctcacgtgctcttccgtggacattcaggaaagcgtggatggagagatacaagtctgctgcaacaaagcagctggacgagattgaagcagtgatgccactgatggaagttctctacctgattcatgatcctcacaaagatgtgagaaatttgatactggaaaggatcaatatgtatcaagatttagatgatgaaagtgatgccactccatctcgagctgctgataagaggattgttcaaaaaaacttagaagatcctggatctttcactctaccatgttccattggggaattagcttttagcgattgtctttgcgatctcggagcctttgtcagcttaatgccactctctgttgcaagaaggttagagtttattcagtataaaccttgtgacctgactttgatccttgcagataggtcttacagaaaacccttcggcatgctgaaagatctaccagtcatgattaatggagtagaagtccctacaaacttcgtggtgctggatatggaagttgagcataaggatcccttaatcctgggaagacccttcttagcttcagtgggagacgtggtagatgtcagggaagggaaaataagtctcaaccttggaaagcacaacaagttgcagtttgacatcaacaaaattccacaagagtcaacagaagatgaaaaaacctctaaagactatagagtgatcccaggagaagggtatgagactgagaaaataaaaaaagcttaaaaagaggtctgataagcaaaaagaaactatagagaggctagctcactctgttgaggaacttaggagtaagctgaatcagatgcagaaggaaactcaacctaaaggcgggattaacactatcccgagaaaaaagttcacttcaagatggtctgaagagacagattaccctccagaagagaaagaagcttattttgaagaaatgagaattaagtattctgctggagacctctctagggaagacgttgagtatgatgatgatatcagagaggattatgcagaccctctctatcattcactttcttcttgataagtgtgaggagtcaagctagagactttaaacaagctcccttgggaggaagtcccatgattatccttgtaaataatttttactttcttgttatttttgatttgttttagttgtgtttgtggttctcaggaaaaaaaaaaaagaataacgtgaaggtagagtaaaaattcaaaacttttactctacttatggcctagagatcgagtacattggtcgagtatgagtgatgtttaaaaactcaaaaaaatttaaatcatcattttactcgaccaacagaagctacagagtcttacagagagttcattaagtttagagatgattgtaggatttcctgagattttcctagtgaagatagagtaatgattcaaaacaaagagacagatgagggacccactgctgctgccatgtctcccacgctccctacaaggtgataacgaaatctatccccttcttctctccatcacttgtcttcaacgccatcatcatccatccatcaccactcgaccccatcactttctctcttcatatattcgacctcttcttctcattcttgcatccaaaagacacaacaagccgccatcgctttccctcacaactctcactcgaccaccgcccgctctctcacttactcggcttcatcgctctcatcgccatctctcaacatactcgacctcgcgatatcactcgagctcgccgcttctcaccgcctctccatcgtcaccgcctgctccctctctccaaggaaacaactcgagctctccatttcactcactcgacctctaccaccaagccggcttcaccacttctagctcttaaccactcgaccaccttcaccatcaaccaatcaaatcgttttctcctccattaaagcttgacatactcgaccgctgaacacttatcaccttcaagctcctcatctcttcatcgtttccaacaccgctgctctcatcccccacgaaagcttgtcatcacctctcactcatcaccagttcactcgattcagcaaccaaactcgacctcgtctctcttgccactcatagtcactcgatctctcctcaccatcttcatcatctcccttactcgaccaccgtgcgtctcgctccaccattgccatttaaaagctcactcgattgtcaaagagaagaagagtgaagctcaaccaccgccactcgaccgcgtttccctctacacattcaacactcgaccacggtgctaccatctccacacccgctcttgttcaccatacactcgaccaacaactctcaaagtaaaaaaaaaaagaaaaaaaaagtcaaaaccgacagtttcactcaaccggtttactcgaccggtacgctggtttagattgtgtttttggttttgctattactaacatattaacgtttatctttgagtttcgtctgtttttaggtttcatcatgagtaactacagtggaaaatcctctatggaccctgattataatgtggatgaagctaagtcctggtccactagaccggagtgagagcaacatgtttacgagagctatagggatgaatttgaacgctctgcagctcgacgtaatcaaagaagagctgaaatcgctagaggaaagagggcgatgtcgagtagatatgagctgattgatgaggatatcaaaactgagtatgagccagagtcatggcgcaaggagacgaagctactgaacaaatccgacgaggttacagtggaggagtatatcagattctttgagatgaatgacttctggggaacgaggtatccctgatatgagactttagcccagttggggttactggaggacgtgcagcatctgttcgagaagtgtcatctgataaggaggagacaatcgagtttctttccacactgcaagtggaaatgtatgagggactcacagactttgagctggataccatggggttaggcttcttgacgttcttagtggatgaacagcggtaccagatttagatcaagaaattggaagaactgtttggtttccctagtggaaagggaaccaaccccaggtttgacagggaagagcttaaggatttgtgggctactattgggaacaatctaccgctaaactcgacgcggtccaagagcaaccaaatccggagtcctgtgattcgctactttcagcgctcggttgccaatgttttttactccagggagtctacaggcaccgtgtctaacacagacatgaagatgatagattcagcgcttatagggattctccgccttacaaaaggaaagaatgtcctgagaggagatcttaacgactcaccaccagtaatgcctctgttgatccatctgtgtgggtacatgaagtgggcgctgacaaacggcaagaagaaggtaagaggagcactatgcgtgggtggcgttgtgacgccaattctgaaagtttgtggagttccgctcaaggaagtagggttagcaccgagaatgatggacttggatcacttgcgccgatgtgagttctctgagtttgacatggttggcgactttcaccgctacaggttcgagcattcatcgattagaatcgccaacattcttttcccctgcatttacgctactaggattctcgagggcaggaacattgacttcaagcctgcgcttgaagatctttatttcgagggcagtccgccaactgaggagattagtcacaccgaaggagctacaatagaagatgttgatgagacatatgatatagatgaggcggagtttgacacgagcatgtatcatttcagtgagcatatacctccagcgaggaaaagcaagagtttgagcgaagctcacaggaacaacagcaagctgcagaagtggtgcaagaaacaggataagttactcgccaagtgcctcagggctatcaagtttctgaaggacaagatcagctgctcctcttccactacaactattccgcaatgacagctccctcaggacatgccttcgaggagatatgacgcgcccgagcctagagagcagaagattctgcatgtccctgcgaggcattcatcattcgagcctcgtgaatctaggaagaataggagaacgacactcactcgatctagcagcaggagcagacgacttctgcagtctcgtagtttacgcgaccgcggtgctggccgcaatagaagaagagaggtcgagtatcctcagagcggtgctggccgccacagagctgatgagatcgagtacccacatgctggagctgatacggaacatggcggttcgtctatggcttgggagcaatcacaggcagccattgactaccaacttcgttcattattcgactgaggtaagcgcctcacttcaccattatattatatcatctcttgtgatttgttctttattttgtttcagtgattggatttgtcctgagtactctcttccaagtttattcacacagtggactgtgtgatttaagtttgggggagggctcaggaagtatgttgcattgtatatatttttaagtctgcattcatctaaggcatagaaaaaccaaaaaaaaattaaaaatttcagaaaatgatttcacaaaaaaagagtgttcatgtagttgcattacatttaggatcaagtctagagtgtttcatttaggattgttgcatatgcataggggataatgatgagatagccttgtaagcattttggttcaccggattaactcagtgccctcgttgttagttgtgtgttgcgtagtgaatgaatttgaaagaaaactgaaccatgcctagattgctctactcgaccacactgtcatgatctgataccattccctatcaatttgaacctgaatttgatctttaattatcatgtctgcatcaaatttgaactcatggataccctaaaatacttggattttcttattcattttgatcactcttgttaatccaagtagctgactctccttattagagcagttaacccgaacccaaacctagactttttttcaagccttatatcactcgtgagggtttgtgaggtcttattccgattcagcttggtaaaaagtgttaggttcgtaacgacagagatagtgtctcatgtagttctagttcgcattttttggactagataggactgggtgggcgcttatactttaggttgggatgtgtttaaaagaaaaaaaaggggttgattcattgatgagaaaaggtaaaagactctaggtgaagtaagctaaagaagcagaaaaagtctagtaaaggttttgggatttgtaaaaaaaagaaagagttcttgttagctattgaagatgggcaaaagccctcggttttaaaatgttaaaaacaggaaccttagttgttaaagaaatccaaatccgctagatgtatcaaagtgttgagaaagcttttcctagagttaagagaaaagaaaagaatgattagaaaaagggcttaaaggattcatgaatgcaaagggtagaggtaagttcttatactgggattggagatgggattaccattaaagcttcatctgatatactctaggtagatgggattttatctctgcatgcatagcttgggacttacctttagcattctactaaagcttaatcattttttgagagatcccctgttactgaagcctattctgtaagggaccatctttgtctcttgaccttttaccttagccaaatgagttcattgatgatgcattgcttgattcacgttccagaactaatgaatgttaaagggattggtagatttgaaaacatgtgtaggtcgagcatatgagtcggattgattgatagtaaggcatggctaaagtttttcagtagaattcgatcatatcgcagcttagaactatcaacttggacattgatttcatttggtttatctagtgctttggctctgagtccccgatttcaaacctcacctctagcttgttcttaattgtttgcttgagggcaagcaaagactaagtttgggggagttgataagtgtgtattttgcatgttttaagcatccatttgtcatcactttagcaccatatcatcactattttataccatttctcatcatttgtcatcactttgcatgtttaggatagttttgcatgcatgtggcatatttgtgttgttttcaagtgattcggagctgttgaagaactaattggaagaagcggacctgatcatgccaaaccactcgacctcaggtcgagtagacgcttcacgacctcaacacaccactcgaccacctggtcgagtataggatttcaccacttcacctcatcactcgaccccctggccgagtaccccacgagagtcactcgatcacttcactcgacccccaggtcgagtgtcttcacctccaccacctgaccatcacttgatcacacgactctacctggaagtcgagtatcaccatcaccaccactcgactacatactcgatgtcgagcttcagagtcttctccattccgcactcaaccagacactcgagcacaaggaaaaaaagaagattctagcttatcactcgacctctcactcgaccacctgggtcgagtacagttcttaatccgtctcaatactgcgtcgttttgagtattagggtttcggaatatttttgctataagtagcacgtactttacattttcgagaacaagttttttctaagttttatttcgcagacactgtgttcttgaccttttgtaatccggatttctctttatctattcagtattaaatattcggtatttgttcttgatttcgtttactgttgttcatcctgttatcaccttgctattacattgttgttatcatgttttcactccattcaacgtttatgttttcttcaatgatgtctcagtagtgaataggtttctgaggatggattagagtagtttagaattctcagtatgctaggtggttgagtttgattgatagatcccttctggattagttgttcttaatgcctattgctttctgatcaaccagaatttgagcccagacatttccgcgcccaaaaggtgttcgatgaaatgtttaaacaactaattccagagattcgtgtccctgtaccaaagtattggttgcagggagcgttttgcctttaacttgttgattcgtaatgcctgttaggttagctctcgtcaatggtgattgagtctgggactaggttaacttgagggtctctgttgcggtggtacttagatttggttaatgaacttgttgtgtagggataatttattgagccatgtcaatcacctgtaaactgaggaaacaaaactactcaattaccccatcctcgagaattctttatctgattaattttattttttactctaccgttgtttactgcatcttgtcatctgttgcttagtccctgcaattctttgctgttactcgacctgatactcgaccacccagttatctggcaacagactctgcagtcaagtatccctgttacattttctgtccgttactcgacctgtcactcgaccacaccctgtgttgagctgcatcgagctgtgttggtcgagtgttttattgtttctacttgattttctgttttctgcatgttcacttaggactgctaggacacaccaaaatctgttattgcttggcttgacttagtgacttctgatcacatcttgattgttagcatcacacccatttggattgatacctaaaatactacaacgacatgattggtgttttaggataattgactaaaaacctattatcaacccagaacatgtgggggaaaactttgcttaccactaactacatccttaataggataccacataaggtgactgcaaagtcaccacattaactttggaaaggtacagtaccctcgtacaaatacctaaaagtgtgggggtgtctaacaaaagtggctgtaccacctcccaaaaaggtcacaattgggcctaagactatagactatatcttcatcggatatgcgcacaacagcagtgcttatcgatttcttgtttataaatcggatattccagatatccatgaaaatacagttatagaatcaaagaatgcatcgtttttttgaagatatttttccttgtaggaaaactcaaaaacgaactcgtgatcaacgagatgcagcaaccttgaaagccactattactgttgaagaaacaaaacatgaacctgaagaacaacctaggcggagcaaaagagctcgcaaagagaaatctttcggtgatgatttcttgatggcgtttttagctgaaaacgtaccaagaacttattcagaagccatgtctacccgtgatgcacctttttggaaggaagcagtcaataatgaaatagactctatcttgaaacatcatacttatgagatagcagatctacccaaggttctaaaccattggggagtaaatggattttcactattaaaaggaaaacaaatggtgatattgataggtacaaggctggcttgtggtacaaggatttcgacaaaaagaaggtttagatttctttgatacctattctccggtaacgagaataacttcaatcaggatgctcataggtattgcagccttacgagatcttgaaatacatcaaatggatgtaggatgtaaaaatagctttcttgcatggagattcggaagaggaaatctacatgaaacaacctgaagagtttgttattccaggacaagaacacaaagtgtgtaaacttgtgaagtcactatacagactcaaacaggctcctaagtagtggcatgagaagtttgacagtgttataatgtctaatggttttaccattaatgaatgtgacaaatgcatatatttccaaattactccaacggggtacattttgttatgtttatatgtagacgatatgctcatcttcgggagcaacacagatatcataaatcaaactaaaaacatgctcaaaagatattttgaaatgaaagacatgggtatagcagatgttattttgggtataaaaatcattagaactgatgaaggcattaccttgtctcaaacccattatgctgagaagatacttgatcgtttcaagcattattctaatgggactgcaaaaactccagtagatcctcaacttcacttgaccaaaaactctggtgaacctgtgcaacaggtggaatatgcaagagtaattgacagtttaatgtacttgacaaacagtacaagaccagatttagcgcactctataaatgtacttagtcgctacacaagcaatccaggacataagcattggaaggctataactagagctttgaactacctatgttataccaaagaccatggcttgcactatggtaaagaacccgcatttttggaaggttacagtgatgccaactggatcgcagattccaacaactctaagtccacaagtggatacatctttacacttggaggtgcaggagtatcctggaaatctagcaaccaaactgtggcagccaaatcaactatggaatcggaattcatagcattggatacaactgcagcggaagctgaatggcttcgtaatttcttggaagacattcccatgtgggggaaacctgtgcctgcaatacgtgtacattgtggcttcgtaatttcttggaagacattcccatgtgggggaaacctgtgcctgcaatatgtgtacattgtgatagccaatctcgtcacatcagacgacgacataaaaccattcgacaacttatctcaactggagtagtcacgatcgattacatcaaggcagctgacaacctagcggatccatttacaaaaggtttgaatcgaaataaagttgcaagatcatcaagaggaatgggtttaaagcctaccacctaagagaaagtttgatgataaccccacctacaaagattggagatcccatgacataggttcaaagggaaaactaaatcaaactaaaactgttaaaagcactgagagactgttatctcttcctagttcctaaaatgatgtacaatgcttcctgtatgtgtaaaggttaagcatttgcttttaatgatttgaacctagctttgtaagatatgtgaagtatttactggatattttttttaaatacaagcagctagtaaatcactttgtgagtgtgaaatggggccgtttctaggagaatatgtgaggctatactctccaagttccctcatgattaaccaggcatgttcaaggccacaatgaacaaaaacagagaacctcgttctatgagaaaatgaagttgtgttatacctgctgtctaagtttgcatcaaactccggatggttcaagacatcatgttcaccatctggccgagtaaactcgacagatactaataatgagtaggttcaaagctgaaaaacgccaccaactcagatacagttagttttcgtttatactctcgaaggtctgtctagtctagctagttgggtcagtccttaggattagtaaaatcgtcatatgtttagacttatttctattcatgtgggggattgttggaacttttttgacataaattgttttccggtgacttttcggccgaattccggctaaacggaattgttgggtcattagtgcattggaaagctggtaaagagtaatacaaaatggtatactcatacgtcaaaaacggagttgtattgaatgagaaataagggtgtaaagtgggacacttgggccaaaccggaccgaaccgaaccaaaccgggctgagtcgggctgcctgttgtcgggacgtcccgtcatcggctcaagggctgtcgggcttgtggaccgtcatgcttgtgagttattgggcttgatgagttgaatcttatggaaatattctcaggatagtctcaaaatattctgaggataggatagtctcagaatattctcatgatagtctcaaaatataccatgcatatcctgaaaatattctcacaaatcctatccccctttattatataaagagatcaagcctatcattatttctcaagctctcaaacacaaaacactttaaattctaaattctctcctctctctctcttgcttcttaaaagtaagttcttagtttaataggtttgagagtatatcatagatctagttcgcttgagtctaatacttgtgtgctcgggtattagttcgtgatcggttgtatcctgggattcaaaaatcgtgatgtccaaaaagcacttacagccgatttattgaattaaggaaaaagatatcatatcttgcctccgtgatttactttctatccttaattactgttaatgtaattttattgttattgttatcttaataaaattcgtacttgtttttcaattcggtttttgggctcatacagttgatccatctatatagccacgaatatccacggaaatgggaagctgccagtgtccaaggtaccttaatctactagtgcgtttgatgatgcatcaacttccactcatccgttttattataaggttttctctcatgaaaaagtggtaaaaataattcataatttcagttccactcattttttattatgagtgcaagttattgcatcaaacgtgagtgaatttttttttcaatttcgtttttctattttacgagaaaactaatttaatattatttttaataaattacaaaatttgaccatttattactctaaattcattacttttattaccaaaagtataaataattacataaatttaatttatttttttcatttttgtagtttttataaatttttgggatttttcggatttttttgagaaaaatataaaactttatttaaatattaatattttattccaaaattaatgttgttattaattctgttaatgtccgtgtatgaaacatctaacgtttaaaagttcgtgtattatcctagcaacaagaaataatttgtgtttgaaaaaaaaaactagtttgtgtattgttttggcaacgctaaaagtttgtgtatttttttcagaagatataattaagttgatttaattttcgtgatttttcccacaaaaattagtttttgttatataaaaaaagaagggatatccaagaccatcatttatgggtttagtctatacacagaaaaaaaattttgggtttaaaatgggttgggtataattagtaaccattttatttgggtcttgtttaattggtattgggtacccaatgggtatataaaagaaaatcagtcgatctcttctctccttcttcttcaaatattagggtttcgagcttcagtcctttcggcttctctttagtctgggtttgctcatcgttcttccctcacctcaagcgctgttctcgagggatctttgctgtcaagtcccttggagtaagttatagcatgtatactttgtaaattgattttgcttttctgggtttctatcaataagcttagcttcgtgaactgtcgaattgttgtaacttgtaaataagttttctaggttgatgtgaatcgattttgcttttgcacgtgttggcatcttacttgtggaatgcttgaattcgtgattgactctaagttttatgggttgttgtgaatcgagtttgcttttgtgtgaatttgattgtaaagtgaaagtgaagtgagtgaagtgtttgagtgttgtgtgaacgttaagtctccttggctttacagttgtttcataaatatgtcttcttgttccttgtgatttgttgcgtaagtattaggatttgtttcataaatgtctcttctttttttggtcatcttaagattgccattgccactttggatcagtttctatgggtttttgagaaaggtagtttttgatgttttttttatgtgtagctaagagtgtaagactgattagaacgagattaaagaatgaaaataaagttcactttgagaaatttcggttttgttatttctgtcctctagcactagtgttaataagcaactacttgagacattatctagaacagaacatcggtagtgatgtgacagagatcgttgatgaagtatcatgtagattatattacaggttgtaactttgagtgtctctactttagaaatgatagtaaagtgaaggtgaagtgtttgacttgagtgttgttaaatctcgttggctttactgttgcttcataaatctctcatagaaagtgtgctttatatgatttttatacactatattgtgtaatgatgattttggcaggtgcataatgtctaaacacaatctagtggctcaatctaagattacattgcctactactagatacggggaagaagattgcaagatattgggatcaatcaacaatcattcaaaatttagttacttgaagattattaaagaaatcctctctaactcgttattcagtaggctggaaactacttttcttggcccaatcatcaaagcgggtttaagaaaagcaggtggtaatcaaaaaggacctaatggcttgggtttttctggtcagttggttcgctttctggtagtaagacaacttgtgtcgtcaagggaagacgggatttggttttgcatcaacaacaagccgatgagattctcattgactgagtttcatcttgtcacgggattaccatgctggataaaagaagatgaagtcccagtagattttgagtgtgattggcctttgttgcctgacaaaccccctataaaggtggatgattatatagcacaattgaaggtcttggatgatgaggaaagcaaggcacgacttgctatattgattgttattttgaccgtcttcatgcggccaaatggcattacaaaatactcgattctaaaggagtatttggccaatgcgaaaaagaatatctatgcgtacccctagggaaaaaatacgcatttgacatgctggtgttgtcggtaaaggatgatgataagaagaaaaatcttgcaaagatttatcttaaaggatttcccatggcattgcagctatggctgttgggatatgtgtcagaattaaaagaggcttatgctcggctcgatgacaaatcagatcggtttcctgtttgtgcgaggtatttatctactgttcagccttcttatgaacaaatcatgggtaaggaagaagatcttgaggtaatcagttttcttggtgattcgaatgaagaagaagatgatgatgttcttatgcacttgttaaagagtgattacgtattctctgagttagattggaagagaggttatgcacttgttgagcaccaagaagatgaggaagttgagattggtgatgggtcagatgtagacgcaaatgtaggggagacgccgatgtagagacgcatacagaggatagctgataagtaggtttttacgcctacttatatgctgaagtgaggttcagttcaattctccttaaacactaacatgtcgatgcagctatagggggtgtcaatccagtccattgttattgctagcaatcaagatgtgtacataagcaactaagtcaagccagattataatgatggttggtttctagtaacaatcctaggtcaggattcgaacaacaaaaataagaacttaaaagccctactcgatcattaggtcgatataaccaacatgcaacaaatttaagaactaaaaatgcaatcaacaggtgacataaataactagccctgggagttcggtaaaaaccgagcaaaccgaaccgatcaaaccaaaacattcggttttcggcatccggtttgagaagagatataaaccgatcgtataaattaattttggaattcggatttcggttaactcggttcggtattcggttaccgatcggtttattcgggtttaggaggacacactataaaagttaaaaaccctagatctaattcatttcctaaagataaaaaatctcatctcctttctctacgatctgtcttctgtcttcatctccttccttcttttctagtctctaccatcttgatcttcctctctctctcatctcaatccgccttcaatccatcttgatcttctttgttttcctctacgatctccattcttcttcagttcttctttctccatcaacctcgtttaatggtatctctcttaatgttggaatagaatggtcggagtttgtcgcggatcagacggtcggagtttgtctcggctgtcgtcgttactgtcactgttaccgtcatcgtcacaaccggagccgccgccgttcagctcatatccttgtcaaacccctaaaatttgtattgggttgagctattaactgtattgggcttttatttgggtttagttaattgtattgggtttgatttgggtttttgttattgggctttgatttgggtttgtaatgatttattttattggatatgggtttgtaaaagaatttttttttctttctaatatctaaaccgaaatagaaaccgaattaaccgaagaaataaaattccggttcatgttcggatcattaattttagccaataaccgagccgaacaaaccgacttccgaaccgacccgatccgaatttcaattcgggtctattcggtggaattttaaaaaaaacaaattttcttcaaaccgacccgaataacccggtttagccgaactcccaggcctgcaaataacaggtaaataaaagtgcaatcatggggtgaatacaaataaatctaagaagaatagaagtcctaagaatggattcattgataagggcaactctagggttcatcaggtggctaagaggtgaaaggtagataccctagacgatagattcaagaaccgggtcaatccactctcgtgatagagacccccataactctaccacttcctaatctcaactctcattgatgaaacatagaagagcagggtttaagcaacaatctaccaaagccaataaacaaactagccaatctcttggtctataccttacaaatttctggaattcgtagatcatgcatccatttgaacgtcttttagacgttggacgtctatagtcgaatttcacattagctagcaaaaatcgcataggggccaacgaatccagaagggatctaacctaatcttaacaacctgactaacgtaaagattaccctaatctgatccatcctcaagtaccctaatcactactcaagcaacataactaagaacacaaacctagatattactaaaatcataccaaaatgtagatctaaacaaactaaacaattttactcaaagaactaaatgcaaaaacaaaatagattaagagtaattaagttttgaagattcaagaacacaaaaaaaaactaaagggtaaaagctagattctttggacaaatttcaaagtgatctatttatagtaaaatgttgaaaaccctagattcactagaagacaagagacttgaggcggtttgggcgagtgctcgatcttggggatcaagtaaagggtgctgcaaagtctgcgcctttgtgtccatgctccgagtgatcaattggtcgagtagatgcttcttcctctcctatctgtatgctcagatgtctggttgagtggggaatgaggaggatccgaagatgctttgatagatcaacaagtctggtagagttggtcgcccttggtcgagtaaatgggtcgagtagaggatcgagtaagaggggcgagtagaccgatctgctacttcctctgtggctacttggatcgagtaagtgggtcgagtgaattgatgcctcctctgtggctgcctggatcgagtgaactggtcgagtagattgttctgctgcttccctcctggttggatagggtagagggtcgagtagagtccttgtaagctccttctgcacctgaaaacacaccaaaacatgcaatatgtatgcaagatgatcctaaatgcctaagtgtgcaaaataagctaaatgtgatgcaaaatgatatgaaacaatgagtgatcactaagctaaatgatgataaacacatgcctaaatgagtaaaatatagtgttatcaactcccccaaacttatctcttgcttgccctcaagcaagcaaaatatcttcagttgaaggagaggtttgaaggtggggattcaaaaaccgaagcatgcatataaaacgggctcaatgtccaggttgctaattctaggttgcaagatgatagacccttacttaaaaacgttagccatactcgtcacaatgcaacctaacaacatgccttaatctattcaagcattcacatcaaccaatttcctttaacattcattaagcgtgaacagtggatcaagcaatggttatgaactcacttggtttcgggcttaggctaagagacagaaatggtccctctaatgatttggtcgagtaacaggggactctcagagaaaagattgagcttcagcagaatgctaaaggtaaaagccaacagacacttacaagaacagactcccatctacccaatgatatatagtatgatagctcagaagatgatcccagtcccataaatgtcctaactctatcctttttctcattctttctctttttagttcaaattctaaggggttcttgtttaaaacgattcaagagtctagcggatttggttttaaactttgacaaacttaaggcttttcttctaatcttagcatagagggcgttttattccttgaatcataatgcctaacttctttaaattccaaaccctttactagactaacactttttgtatcccccttaagaactttaaactcttattctctttttttttttttttcattctcattctcattcccattcaatccataaaaaatctcaatcccaaatacaagtctccacctagtcctagctaacccaaaaagcgtgggctaggtctacatgaaagactgctcttgtcggctcatacctaacacgttataccaagctcaatcgaaaagacctcacaatcacacacaaatgatctttggcttgaaataaggctaggctaagggtatgggaaactgctctaaaaatgagagtcaactacttgaattaacagagggtggtgaaatgaataagataatccaagtatgtatatggtagccatgagttcacaaacaatacatagacatgataattgcaaattcagttcaggttctaatagatagggaatgacatcagataagcgagtttcgaatcaaagcagtatagtcaagttgtaaattcaaagcagggtcaggtcttattacagagaaacaatcagttatgcaacatagaactaacaacctgggcattgaacttacttcattgaattaaaacatgcttaacggtttgaaatcatcattatctcctatgcaaatgagcaatcctaaatgcaaacacactatatacaattctaaaatgaaatgcaatctacatgacactctattttgtgaaatcattttctgaaattgatttaaattttcatggttttttctatgccttagatgatgcaaaatttgaaataagaaaacagaatacaatgttaaacatgtcttgaaccctccccaaatcgtaaattacacagtccattgtgtaataaaaatctgaatgagaattcaagataaaaacaaacaacacacaaagaaaaatagaaatgctatggtatatacaatggttgaggtggtgttacctcagcggtcatgtgaagtacatggaaacgtaatcgtccatactctcttgagtataagcaggggctgaagttgaggcgggagggttttgctcgttctgtccggtcgagtagttggtctagcgtgttgaagctcgtctatgcctacttcctggctctctcaacttggagatcacttcccgaggcttaaaagatgaagttcggggttggtcgattcttttagctctccttgcacctggatagttgcaacatactctttgtagctcaataggtgatccaaaagaacaacactcagcgaagtgtctgctctatcacccgccatcttcctcccatcttttgtctcactcagaatgaagaccaaagattggtctatcatgcatagctcctcttcaccaacaaatccggtggccttctttggaaagagggtgttggcgatgcattgtggagttttgtaacaaaggcctcctctctcttctttctctgaatcatcaacacagaagtgaaccttgagggttgcaaggagttggcagctctcctctttatatcccccacattggcagctcatgaatgttacaagattggccaattctatcaagtattccacatcaccacaaataccaagctcttgcatcgtttccttatgccggtatctagttccctcaaacttcaactcttcaagtattgatagtactcgctcggggttggctctctcttcctctttggtcggtttcttctcccaacaggggctggtgtatcatccccgatgatctcaatcagaaaccgcttcttcaaagggtgcctcttcatggtgttcttcttcagcctcaacgaccctctttccccaagctacttcttctctttgcatggctaagcggcttgagcttccaccttgaatcaagcttgatctttgagcacagcaagcttggcgaatttggcgttcagtcatgccactcatgtcaaacgcctcaacctcttcgttatcaacggaggatcttctagctcgagatgaactttttcttcttgaatccataaagattggtggtgagcttcaacagggcaaacaagaacaactctccaagaggtatcaaagcggaagggaatcggtttctttggtgacgaaattttgagcttgaaaccgattgaatgtttgaggatagacttgggagtgatcgagtaactttttggtgaagtattggtgaaggggaacggattcttaaagagtgatagggagcgtttggggaagggttttgaatgaagacttcaaagctttgtgagagaatttcgaaaacgagatgatgaaagagagagtttcaaggagggtttgtggaattcaatgggtggaggagacaggtctttggtttgtttttggaagagatagaaaagttgattgtaaatggtgaggggcatgggtaattgctttgtccatcgagtaaaggagtgttgggggaacaagtggggtcacgcaagttatgctttggtctctaaataatgagagctcgagtaaaggatcaagcatcttcttgaattgcgcagctcttgatcgaacggtggagagctccttgttcttgatcattcggtcaaacagaccaaaataaacctcaagaagtcactcgatcaaacggtggtggtgcttctctcatttggtcattcaaatcaacgactcaaaacactcctcctcattctactcgatcaacggttgagatctttcttgacatggtttgaatttactcgaccgttgactccatcatggtcaatgaaataaacctgaatcacttaaacaaaaacatcaaaaataacaagaaaaatagaaagttatatacatggatagacatgggacttcctcccaattgagcttgttttaagtcactaagcttgactcttacatagcttagtcagaaaaaaggttgaagagaggaacagagaagtcctcatcttcactggttgaattttcagtttttgaatcatattctgcatcctctcttgacatatggtaggatgagtactcatttgatttttcttcaaaataagcttctttctgatcagcagagtagtcttcttcttctgaaccaggctcctttgaccaatcctcaatttaaaaattggggtagcctttaaccatttcttgaagttccagaatggtgctgtttaactctttcatcttgtgagttaactttccaattgtatcctcctgagctttatatccaatccagagctctaggagttcttcagcaacaaaatcatgaatcaagtgttcttcttcagcagaggggttggtgggttgtttaggcactcctcactcaacaactggctctccaagtttctttcctctaagtgaactcctttctgatcttctggtgcaaaccattctgttgtgaaatcttcgtcctctttgatagctaatgcagtttccatcttctctggattaatactcattgaaaatttattgactattttgtcaaacatccatagttgatctttcagcttcatcacccttgaagataatccctctatgactctgctttgccatttaaatttttttctcatctcataccagtcatcttctgtaggatcttcagtctgagctaacccttctattgctttcttcttgtggtcaaaagttctcttcagcttgctgagttgagaagtatagttaaatcttggtttggttccagcttctgcttcttcatcaacattcatgtcctgaatcccaaaactctaacctcctgttgtttatttccctgaagcttttctgatgtcaaatctcatcttgatacctttttcaaggtttagatcaattttttcacatatgacatctatgactgctccagctgaagctaagaatggtctgcctaggatcaggggatccttgccttcttcatctacgcccaataccacaaaatttgtaggtatctcaacatttccaatcttgccaggcagattttcgattagaccatgaggatgtgcaacagaaccatcagctaagagtaaagctaagttgtagaacttgtattccatgatccttagccttttagctgtagagagaggcataaggctaacaaatactcgcaaatcacaaaggcacctattgaatgtcaatggtcctagagagcatgacaaagtgaatgaaccgggatcatcaagcttttcttggatgactttcttcttgtaagtttcctgagtgctgactctactaatcatctcttgattctgatccttcttgagtttttctattttgaacttttttcagaatggtgagtattcagcaaaggtgtgtgctctatagtccagatgaattgttgggtggcaggtgcagcaatttgagttgaatcccccccttcttgaatcatactgtcctcagtattgggagtctgatgacttggtggagactcatcttcttggtggatggtgatagcatttgcagtagcatagtccttagggttctgaactactttccctggaagttgttgaggatgcttcagagcagaggttgatgcaaattgactctccacatacttgattttggaattcaaagcttcaaatttgacatttagatcgttgtaagaacaatcgatcttgttgtgtaattcagctatcttcttgtcacaagccatagcgccagtagcttgtccttgaatgatttgttgaatgaggttcttaatttcaggattttgagctgcttgggcttgttgtggttgttgagtgaaccctggaagtggattctgctgttggtagcctccattaaactgttgtttagggacataaccttggttgtactgaacaaatggcttagactgattctgttgtggtggatacacttgatcttgggggttagctacattagtgcttttgtaggagaggttttggttgggcttgtagttgttgtagcccttgttgaaccctccttggttgaatgtagcacagctcttcagtttgatcattccccctttcttgcatttggaagtgctcttcatcagtgaagtagtgtatctgcttctgctgagccaacaccagcttgtctagcttttcattcagagtcttgatatctttgctctgtttgtcctcagttcctccagttcctctcactgagcgatcatagtcttcattgtagcacccatcagattgttccagattttcgactaactcccaaccttctgctacatccttgttcaagaagtttccattggaggcagtgtcgagaagcattctgatctttggtaaagctcctctgtagagtgtgctcaataatgaagccttcttaaaaccgtgatgggggcactaagtggtgtagcttttaaacttttcccaagcttcacataaagtttcattgtttttctgtgtgaagcctgagatctcgttcctcaatctagatgtgcgagcattagagaagaacttggcaagaaaagctttcttacaatcatcccaggaggtgatggagtctgggggtagagtcttttcccagtggtgtgccttgtctcccaaagagaaggaaaatagtctgagcttaaacatatcttcagtgacaccattgatcttagttaggccacagagcctatcaaagctgtcaagatggtccaggggatcttccataggtagaccatgaaacttgtttccttggatcatggagatgagaccaatcttgatctcaaagttgttgttctgaactggtggaggcactattccttgtctttggtgatgatttcttggggcttcaccagcacaaatgtttcttggttgatcaacattaggtgggtcttgaacatcaactagtttgttctgttgatccatagcagttgatctttgctgatcataggctgcctttgctttggcttcttgtaactcacgagctattctgtctattctgtctttgaaaggtagtaggtgtgcaaaacctttggatcgagttttcatgcacaaacattagtacctataccacaaaaacaagcagacgaaaagatgagttagtaacttgataaatgtaaaagaacttgatcttaactttttctgatatcttgaatgtaacaatgcaacaatgaattggctacggcgccaaattgataagtaggtttttaggcctacttatttgctgaagtgaggttcagttcaattccccttaaacactaacatgtcgatgcaactatagggggtgtcaatccattccactgttattgctagcaatcaagatgtgtatagaagcaactaagtcaagccagattataatgatggttggtttctagtaacaatcgtaggtcaagattcgaacaacagaaataaaaacttaaaagccctactcgatcattgggtcgagtagaaccaacaggcaacaaaattaagaattaaaaatgcaatcaacaggtgacacaaataacaggtaaataaaagtgcaatcaatgggtgaatacaaataaatctaagaagaatagaagtcctaaggatggattcattgataagggcaactttagggttcatcaggtggctaacaggtcaaaggtagataccctagacgatagattcaagaaccgagtcaatccactcccactctcgtgacagagacccccataactctaccacttcctaatctcaactctcgttgatgaaacatagcaaaacatggtttaagcaacaaactaccaaagccaataaacatactagccaatctcttggtctatagcctacaaatttctggaattcatagatcaggcatccatttgaacgtcttttggacgctggacgtctatggtcgaatttccacattagccaccgaaaaccgcataggggccaacgaatccacaagggatctaacctaatcttaaccacctgactaacctaaagattatcctaatctaatccatcctcaagaaccctaatgactactcaagcaacataattaagaacacaaactcagaaattactgaaatcataccaaaatgtagatctaaagaaactaaacaactttactcaaaactaaatacaaaaactaaatagattaagagtaattaaattttgaagattcaagaacataaagaaaaactaaaggataaaagctagatcctttggacaaatcccaaagtgatctatttatagtaaaatgttgaaaaccctagattcactagacgacaagagacttgaggcggtttgggcgagtgctcgatcttggagatcgagtaaagagggtgctgcaaagtctgcgcctttgtgtccatgctccgagtgatcaattggtcgagtagatgtttcttcctctcctatctgtatgctcagatgtctggttgagtggggaatgaggaggatccgaagacgctttgatagatcaaaaagtctagtagatttggtcgcccttggtcgagtagaagatcgagtaagaggggcgagtataccgatctgctgcttcctctatggctgtctggatcgagtaagtgggtcgagtgaattgatttctcctctgtgcctacctggatcgagtgaactagttgagtagattgctctgctgcttccctcctggttggatagagtagagggtcgagtagagtccttgtaagctccttctacacctgaaaacataccaaaacatgcaatatgtatgcaagatgatcctaaatggcgaagtgtgcaaaataagctaaatgtgatgcaaaatgatatgaaacaatgagtgatcactaagctaaatgatgataaacacatgcctaaaataagtaaaataaagtgttatcaatagcgctcgtgagaccctaacggacgcagatgtagagacacagacaaaggatagcgtggatgagatgcagacgctggagaaaaattaaggattggttgaagtatttcaacaactgagttttcaatatgatatatgaaccttctgctagcactacattacttaccacactactcaaaaatctcgatatggaggcatgcttagacaaaacaaaatattctctcccaatggacatgagaagaaatctcaaaggcagtgaaggaaagatcattagaacattataggtggtttatctcctttcaaactcagaactcaaaactcttgtctctagtgggtatgattttggttgttatgtgtccttttgctatgattttgaacacagctagaaatctcatcataaacactcatatatcattattgcttcgttttttcttttcagccattatcttccgtagatgtagagagcgttgaccagaatgaaatttatcaaacagtagtaatgtttccaatgttttttttttgttatataatagggagattaactgtgatgggtaggaaattaggtgttattaccagaacacgacagaactttttttaattactgttatattatcgaattttttttattacccagcgtgcccctactaaacgttatcggaaaaaacgtaattacagggaatgccactgccacatcagaatttgttgacgtggattaaatgaactcagccggctgagttacggtatgttatatatgagtcataacgaaacggcgaagtatgagtataactcagccagacgttacggctgagttgtaaaatgttgcctgagttattgtataactcaggcaacggtatggttgagttaaggatggtcggccgagttataagaagttataagataacccagccaacaatatggctgagttatgagaaaaaggctgacttctttcctcgacgcggccgagttatagttttgattggcttagttatggaaagatgtgacggctgagttatggtcgagtgctataaatcagccgccaatagctggattacgatataactcagccatgttatggctgacttatttttaaaagattaattactataatatcatgcagttatggccgagttgttgaacgttacggttgagttagttgagttacgacatacaacggctgaattaactttgttttttttcctgttttaattactgtaatagtattcatgtcacggctgacttaaagatttgcttcatggctgtgttatgaactgtttgtttggtggctgacttgccacgtcatcacttcaaaacggcgtcggctgtaataatccatgtcatcattccatgtcagcatcctcgacggaaatacgaaacgtcccttgcttctttaaatcgttttcccagactgtgtccaccgcctgaacgttacaacatcaccggaactttcttttcttcattcatcttctcatacatcttcaatttctttcatctttctcttgatatggctggtcccgctacggtcatagttctttccggtttatgggtaaagaaacagagattcgtatttaaccccgacgaaagagggtgtagagttgtgcagctagaagcggaaagagcagtttacgatagtcttttaaagatggtggtcgatgattacggagtgaatcagtcgacccatcagttacggctgagttacatgttctctaacaagacactgaaaactatgcccttcgatactccaccagtttatatctccaatgatcgacagttgcaatgttatctaggtttgacgaaattcgagcagctacgtctctgtgtggagtttacggcgaaagattcaagtgatattagtcggaaggatggatcaagaggaaggggttcgaaacgcgctattgcatctgactcaagagcagaatctagattcgaagttctgggttgggggtttgaaggtgtttgttacgattatcaagacgatgaagcaggggacgatgaagcaggggacgatgaagcaggggacgatgaatcaggtgtcgatgaagcatctaacaaagaagcaagtgacgaagaagaagatgatgaattttctagccggtttgattttttcgacgactccgatggtgcctcatctgatgatgaagactttgttgtatacggcgagcctaagaataatgacgaagattcaccgaaaccttctccttcgaagagaactcagaccatggaaatgatcggatctcctgggagcctgactgatttaaagttggagctgtctacgctaacactcgcggtaggccaacaataccgtagcaaattcgagttggagtatcgactcaaacttcttgcgataagggatgggtttgattttgatgtaccaacttctaataagactacagtatcttacgagtgctgggtggatagatgtctttggagggttcgtgcatctagacaaggaaataatcccaattttcatgtttatatatacgattcggaacacacatgttctgtgacggaacgttctggtcgatcccgacaagcaacacctgatgttctgggagttctttacagggactatcttggtgacgttggtccggatgttaaaccaaaatcagtcggaataatcatcactaagaattttcgagtaaaggtaattacaatgtttcggctgacttactatttatctgctggctgacttatagatattttacggttgacttattgatatagtatggatgacatataattttattctggttgagttatgactttcaaggctgacttaagatcacttattggctgagttgtggtatagtttaggctgacttatcgattaatatgtttgtgttaacagatgagttattcgaagtcatacaagatgctcaggtttgcaagggagctcactctgggaacccatgatagtagttttgaagaactgccttcttacctatacatgataagacgggcaaatccgggtacagtcgcgcgtcttcaaattgatgagagtggaagatttaactatatgttcattgcatttggtgccagtatcgctgggtttcattacatgcgcagagttgttgttgtcgacggtacctttctccatggtagttacaaagggacgctcttgacagcccttgctcaagatggtaattttcagatttttccgttagctttcggtgtagttgacactgaaaatgatgattcttggcgttggttttttacgcaactcaaagttgttattcctgatgcaacggacctggcgataatctcagacagacataagtcaatagggaaagcaattggtgaagtgtatccgttggctgctcgtgggatttgtacttaccatctctataagaacattttggtaaaattcaaaagaaaagatttgttccctctggtcaaaaaagcggcaaggtgttataggctgaatgattttactaacgcgttcaacgagattgaagagcttgatcctctactacatgcatacctccaaagagcgggtgttgaaatgtgggcgcgtgctcatttccccggtgatagatacaatttaatgactatgaatatagcggaatcaatgaacagagcactgtcacaagccaaaaatcttcccatagttcgactgttagaagcgataagacagatgatgactaaatggtttgctgaatggagagatgatgcgagcaaacaacatactcagctcacacgtggtgttgagaaactcttacaggtaactcagctgtaactagtgcataactcagtcgtcgaataacgataaccccgtcataacgagaataactcagccataacgagaataactcagctataaagggaataattcagccataacttttttttttgtttcttgtctcttctctctaatagacccgcgtcaactcgtcaagacttctagatgtacaaacgattgatgcttcccgcgttcaagtagcttaggagcatctttgcatgttgtaaatgtggatgaaaaacaatgcacatgccgtcttttcgaccaagagaaatcaccatgcatccatgcaatcgcagctgcagaacatatgggtgtgtctcgtatatccctgtgcagtccttatcataagagcagtcatttggtcaatgcgtacgctggtgcaatcatgccttcagatacagaagtccctgttcctcaaattgtaattgaccaaccgtgtttgcctccgattgttgcgaaccagccaggcaggcccaagaaactaaggatgaaatcagcactagaagtcgccgttgagactaaacgccctaggaaggaacacgcatgttctcgatgtaaagaaacagggcacaatgttaaaacttgtcgtgcatagtactgtttgtactctgtatgtgtcttctttcccttgtttggcaacagtggtatgtatttcggtcattttacatgttatggccgagttatataattagggaagtcgaaaggttcggtcattttacatgttatggccgagttatataattagggaagtcgaaaggttcggtcattttacatgttacggccgagttgagttcattttaccttttacggctgagttatagataaactatgttaacttacgactgagttatattcgtattatgttatttagtgtctgagttatttaattataatacggctgagttatcaaactgaattttgaaggcaaagacaaaatgaagttcccccagaatagttgtttgaaggatacataggaggaatgaaaagtaaacaatggtaataacccgattccttccatcttgcattactcgaggaccatttttaactcttgcacttcttcgatattggggtcgacagtcacatctgatatccgggcatgattttggatcttcacgtgattggggcaaggatgatacctgaagatcttccaccaggtgagtgcaacatatatattgtcaataacaatattgtcattgcgaaatgatcgaaatttcctatgcaagtcaaccgccaattcgccaagagcctcacatttcaacctctccttactgaaacatataaaacagtcttacacttaagctaactcaagaaaaatacatgatgaaaagaaagaaatttagaagtaaagaaacaaaagaaattatactatttgtccatactctcgaaggtaagtctgaatccgtccatctcccaaccatcttctgtaatatttctcagacatccgacctcgacgagtgcaccaaccaaatctgggagtatgaaataaagattaaaagcaggcatgtgatttgtgaaagtatgaaatttgcattagatacgtattacttaccgaccaaattttcagtatgagcggtgtcttcaataatgtagtcaaaaggtgtgaatctgttaaataatacattttcccttgggtcggaatgatttagctcagttgcattcatgaactcaatcatgtatttgtgggttgttgttcggacaaaaccacagttttcgataacaccaaaagttctgatttctttccactgattctcttcaagcatgttgtagtaacgttgagaaaaccgacttccgattatagcttcaatttggataccctatgaaaacaacattggagggtgagttatatagggaataagacaagcagaaggttaagtatgccttgtatcacgagtgaagatcccattacccactcatcgacaaagacgacccgtagtttgaatgagttatctgtgataaacgagacgtacttcctaagaaccataacacaaatcgtccagcaagttatgtaaggattcaagtcgcggaggccgtcgtaacccatggtgaaattccgagtcgttgaaaattaaagaaatattttgaactcgttagcttctgtttgtgcgagtttagccttctggtgtttatgggagaagccgtttttataggcgtattaaaccgctggtaattaggccggatataaccgtacctcggttagtcagtaaatcgaattgaacttcatgtttttattgacaactcagccgtaatgtgatttaaatcagccataacaaggacgatttgtcgccaaactcagctgtaacacgcaacctttcgtataccttgacttgtcttttttaataattcttgacaactcatcatttagacgtctcatcctcacatcttaacgacatggtgcctcacatcgacggacagtttctaagagatgtcgaagccgtgctcaccgctcctgatcgtggattgggtacatgggtcgacaaaaccactgttacgtggttcaaattcaatcaccaactagctgtcgcaattggtgatatactccaacgcaactttcaccatgcgtggccgacgtaccggatgattcccgttgttttcaaggcaaggtggtttttcctcctcacggtaagcatcgagtttttatataaagcacttcctgtaaaccgtagaccaaattcttactatttgctctctttgtagcgtatgcacacctgggattcaaggcacacggtgacggtgtggacgcagtttaatttggtggctagaacgttgtaccgggacaatatgcgggtgctgaaacggggatgggcgcgtggtttggataagccgaggtggatgacgacaacagtttggaatgatttggtggacatgtttactgaatttgacccggatgatgtcggtttcatgtcttgaatgcttttgtgtctcttacttatcgtccctttatctcattcctatgaactcaatatgtttctctgtttttttttgtgatggctttatatctcatattatctacgatcgccttctcagtaaagtcagtggttatcgcttgaggtaacttgttaaattttatcataactcagtcatagcgtatgattaactcagtcatagcgtataattaactcatccaaaacattataataactcagccgtaacctatatttccgaagatacaacagatattaactcagccataacgtatgattaactctgccacaacattaccagtataactcagtcaacgatattggattagcttggccgaagacaaagttccatttcattgcaagctagtacttgaaccaaaaaaacgaattaaccctatacgctgagttaaacatcaaacacataatggattccagtagcaaacaaatcatacaaacataaaacaaactagtagcccagaaaaagcctctgttcgttgatttttgggaacattaagataccaaaaacaatgacaatgataataaaggcaagacaaaagcagcaaagtttgatcatcaatttccatttctggttttccctttcgctcctcatcacttcttctttcagttctttcaccatcgcctgtaatgcttctagctcgacagaaacctcggacttggccgcgcttaactcactgtcgaagccggccaatttcagccaactgtctacaaccacttcgtatgtaccatcttcgacccatttaaacaaatggtcctgtatattcaatcacatccgcaattaacaacgaaaccaataaaaccctcaaatcaattatatacttacatcttcaagctaataatataactaacaatttggtggtcagtttgatatatcataataacatatggtatctcataactcggccaaaacacgaaatcttattgaataactcagccgttacgttatttgattattagagggtttagttaaggaataatttcgaactcgtttgaattattttgaatattaactacgggcgtgtgtacctgtacatgtggaccaaatcattactggcggttccccataaagttgctgtttgttatctcgataatgatataataaataatctcgataaacccaacctaaagcaacacgctaagtagtgacatactgtatgacgacataactcagccacaaatcagtgaaaacccagccgcaatgctatgacaagtcagccacttctaaatttattcagccaatacaaatacgccgtcgtttgattaatacattttgtggcagacatgactatatagaaccagtgctttagtaccgtactaattgcagtgaagatgatggctcagaggtctctttttcatggcgaatctagtgttgatgaggtatttatctccacatctgaatagtacaaatcgttgcccatctaacgtcgagtacatcatggttgtgttaatgtaggagctcaaccgtatggaaataaggatgcgaacgaggtacgacaaaaacaggaggcgcgataagggcgttccgatcgagtgtgattgcaatgctaaggttgtcgttgccacttctcttgatcctgttacaaccggaaaactttttttcagttgtccgcacgaaatatcagatgtaagcatcttttcttgagttaatgttctttattttatttattttattttgtatccctatgaatcaacctcctggttttttataagggtcccggtcaaggatgcggtttcaagagatggtggactgttgcattgtgtgacgagtttgacatgataaaagaggagacaactgagatgaagaaggatctggaagcagccaataagcgcgtcgagtctcagacggaaaagatctttcttatggaaaagaagtttgaaacgctagagaagaagtatgagagcctgaacaagtatctgtgatcttagcttaatctgtttttctcactttgaacttctttgtactgtctattatcataaagtcagcgaattgtgcgattataactcagccaaaacgtacaatcggattaaatttatattaactcggctgttacgttagactaactcatccacaactcaatactatctcaaccaaagttgaattaaaatataataactcagccgtaacgttagattcactcaaccatacatcaagttaatctacgataagtccgccttaacgttagaataacaatgattgagtcacatgtttaactcagccaaacatcaagttaatctacgataaatcaaagaaaaagtttttgaatcacacacgcgagtataaaataaaaagtgaagtttgaaaattgaaaagacagagtttatgataacataggataaggagtactggaatccaacaacatacatataatataattgaaaataaaaaatgaagatacaatcacatcaatcgccatcttcattcttaatcggactccgaatttggacgaccggtcgatccataccccagtttgtcccaatcaatactactcaccgggcgttcacgctgcgctctgtaggccttgccaacctgcgccagcactttctcgatctcctccttcacgttaaatccgtcccttaagaccttaagttccgcttccttctcatgcagtttgatatcaagcaagtgtgcttccgccgtctcccttatgttgctcctgatgtaagagatgacggatttgatacagctttagggtggggctttcatccacagacgaccacttgttgggaccgtcatccacacaccaccgcttgtttgaaccgaacctgaatctgatgcatccatgatctcggaatggttttgtttctcagagaaaggacaagagaagaatgaagagttgtagttgctaagaatagacaagtgaaaagacaagaggaaaccagtgtatatatagtcctctaacgacgtttggtcctctaacctaacgacgtttggttctctaatgtaacgacgtttggtcctataacgacgtttgggttcttgactattcgggtgtcgtaaacaggtgtatgtatagtcctaaagtcacgtctggtttatttgatgggaaggaagtttgggtttgactagtcaaccaccacgttatacaaactcagccatcaaacgatttatctgatgacaagtcagccaccgcgttataataactcagctaaacatcgaattaaacaacaataactcagccgtgtagcacgagttgagcgatgataagtcagccttcacgttagcatatatcagccgtaaaacgaatcgagcgatgataagtcagccattacattggtttttgttataattaacataataatagattcatacagacataattctggttatcaatcctaaagtgtcaatatttagtacaatcacatgctaaaaatcccaaaagacacagacatgttcgaaaaagcaaatcatgtctcataaaaccgaatggacattctgttaggtagttcatcgtagatctctgttgccatcctaacccgtagcccctggatatttgaatcaggaatgccttcaaaagaaacaccaagcaataaacattcaagaatctttaacgtgtaaacgccgcagtccccggtgatagtattctgcgggacctttttaaggtccctccgctggaatgaaaattggtcgtattgcgggacacggacttcgggagggataatttcgctcttgatctgtggaatcatcctcgtgaacggcctacagtgttccaggatttttccatcgctttcctttgtatgacatccgacgatgcaatcatagcagtccacgtgacccctaggcaagtccacgtgtatggtcgcccaatgattacctccggtttggaggatagtatacaagtgatccacatctggtatccacttcttgtttgtcgggtcttctccacccgtaccgttgacccaagtttcatacgtagaacctttgaaagaaaccctcttcggcttcatcttccactgtgcgtaatccctactccacattgacgtgaaccacgggtctagaatcatgacgcgttcgctgtagtatggggtgggatctcgcaggagcctcgtggtgaggactttcacatacgcagcaatgtgctggacaaaaataaaaccaagacaaaacacaacattaactcagccgtaaccaagtaaaactcagccttaacacctaaataaatctgccattagctaaattaactcagacagaacgacacgataactcagccataaccttagacaaactcagacagaatataacaataacttacatcgtaaatcagtcattatctactataactcagacataacgacacgataactcagccataacattagccaaactcagacggaacataacaataacttacatcatcacccaaccatccatgtttcttgtctggccagtcctttctttcggctatgataacagagtagaacagcacatcgtcgaacccatatgttttgtaataatgtttgctaacaaataataaagaaagttaatataaacaaatagtgtaagcatgtcgtatttaacaacttagtaatgtataaagggtcatacctttcgggacctgtcaaataagccttaagcttctgcagtttggccggatcaaccggtgccagaggatcatagattgctcgtgaaggcagacaaccctttctcatgcagctcagcccgttgtctccaataactggaaaagtgtgagtgggcatatcttcgaggttaatcaatgagctcccatccggggccagcttaacagttttgagccgaatttcttttacactctttagcctctcggtttcctcctcatcttcatcagactcaggaagcatttcattatactcggatacaaccttatccgtgacatcaactacatccgaatcttcctcagctttttccttagcttcctcagctttttccttagtttcctcagatggttttggtttctttattctaatctttggcgcagtaggaggcacctttttaggctgctccaaaggctttcttcctcttcctcttctcgctggcggtttctggattagctcatttaatgttttctcctttttctgctttggcacatttggggctggtggcttcctagagcgtaaacggcgattgagaggagaaacagtctcaacgaaatcaaaatcagacacaatggaggccttatcaaattctgcttcaagcttcctacttaccccaacatcagcatgtttcgactgcataaacgtaacgaaaactcaggcgttaaacaacgaaaactcatacctatgtataaatataactcagccataactaactaaactcaggcgtatcagattcatatacctcagtcgtaactaactcaactcagccgtatcatattcatataactcagccatgactaattaaatttttaactcagtcgtataatattcatataactcagccataactaactaactaaatttataatatgaaaacaactaagccataactaaccagcgtttataactcagtcataaaatatttatataactcagccgtaaaatattcagataactcagccgtatagttcagataactcagccataactaactaaaagttataacgcagccgaataatattcagatattaactcggtcataaccaactaaaagtttaccggaggaggactaggagcagtagattggttatttgtaattttctttggaacgtctggtgtcttttgagtttgggccttaggattgtcttcctgcgtttggggctgtggtttggctaaaaacatatctctaatataactgcttgattttgagtcagctatggccttcagctgctctttaatctgtttgacatcgttctcaatcgatccaaaccttccttcaaactttgcttcaacactcgattcgatttgacatccaatcacatccagacgggaggacatttcttttatgctagtatcaacggtgtcaaatcgagagtttaagggagagatcaagttggacaccacatccacgagcgactgctcgtctccctgaccatcctgctcacgagaacgaacatcctcgtcctcatcagattcgacagctacttccttcttcttattcttcttcttcttcttcttttctgcatctttctcaagagaatcaacatgctcactgtgagagaccttttgcttcttagcgggagattcagacacctctgcttttatcttttaagagtttcttcttcttctcactcgtcttcacatcccaataacctttaacaagcttaaccccgtgtaagtcttggatcaagttatccagtgctgggtcttctaattggtctggccaaaaatgaaacagctcgcttaactcagccttttcaaccattgtacgaacacgcagctacaacacgagagataataaaacccatcagtatgtttaactcagccatcacttaatataactcagtcgtcacttaagctaactcagtcatcacagaacatatctcagtcgtcacttaatataactcagccattatagaacataactcggtcgtcacataacatatttgccaaaaaaaatagaacataactcagccttcacagagaaaaataaaacattaactcagccgtaacataaatatttgataaaaaacagaacataatagagccgaaaccgtacctcaccaccattcgctttgatatcttcagcaatgaccgattctatagttgcacgggtacggttgccaccccatctaagcaacagaatctcatccgcgttaacagcgttcccaaaacgctcggcgatggtgatgattgactcatacgcccaagcctgcaacacgaaaaccagaccactgacggtgtacgtcttgccaataggcctcagcaactttatagagacgacaagggcttcatatgctgcccgaccccatggataagtcttcatggctttgtcgtcgaaaactcttttggcactctcaaatggtatcctagagttagtatgcaagccaaaaagtctaatggatagaagagtcaataacccaaaccatctacgcttttcagtaggccaagctctgcacgttactaagccctgcctaagttcatctagattaggaccttcaccggttggcacatgcaattcactgaagaacgctttgtagtcagctgcaggcacaaacttttctgtaggcagttcatctatatttaaacccgtgatatgatgaaattcgttcaatccaaaccggatgggtttaccagccacgatacaccaaagctccttcttcagtattctcagttgtctgcatagtagataatgtacggtcttaccagaccatagaaaataactatcaacaagcttagcaattaatctaagctctgtctctttcagttctgcccatatttcttttcctattgattctctaattgcagggaactctcccagctttatattatgattaatgcctttaccctccagattagaatccccctcttggtaaagtcttggagggtactcccttgcttggtcttcagacatctgtataaccataaatcagccgtaagcattccataactcagtcataacataaaacaaactcatccacagataccataactcaggcaaaacataaatctaactcagccatagataatataactccgtcataacataaacctatctcagccacacataacataactcagccataagataaatctaactcagccatattttaacagaaactcagacatcgatgtaaggttaaaccataactcagtcacagcataaaacaaactcagacacggatgaattgataaatcataaatcagtcggcaaacaaatagtaactcagccgtcaaatcaaatagatctaagaaatcggccaccatatgtcaatcaacgacgacgttaaaacccagctttaaaaaccatcgttacgcatcggaaaacgatttcagtgacgggaatcacttgagattgaacttagatgtcagagtcttacttaatggaaacatactcactggaacttagatgtcagatgtgacttcgcgcttacagaaatgcgactccggcgtctgaatttcggccggaacagacgagaaaagagcaaaacggcgaaagaaatcgattttgttccgtcgagagagaaagaggaagaaagcgacagtttttttttttttgggagatgatgaacagtaaagccaagaaataaaaaacccaaacgttatgcggtttggagatgattaatgacgtggattatcgtaatgacatggaatgatgacatgtataatcactgttttttaatttaatttttagttaaaaacgaattaaataataataattaattaaaactagttagggttgttaattgtaattacacaagaactgaaaacatctgagtaataaaaaaaaaatgtgttctattctaggaataaacatacaaatgtgttctatcttaggaattatttctatataatatgtatatgttcaattgtgatccaaaaataaatgtttcactacatattatggaaacaaattcgaataagtgttgatgcaaaatcacttaataatcagataactgaataaattttagaacaaaaaaaatggatcttataatgtcattgttttctagcaaaataatatgatctaccggggatcccatcctcggtggtgaactctactgaagtgtggttaactctgttgaagtgtgatgaatagtgggggagtagttaggtgacgactctgcttcaaatgtgatgaagtctggtgacgagtaacatgagctatttcacttatccctacaaacccatctacattaataacatcttgagagaaggtcaatctctactcccccactattcttttcggttaacttagatgccaacgcttaaaataaggtggatagttgagtccaatataactctaatatttttgaaagtgctgttacgagtttttttgaatgcttgtttccgagttcatagattgcatggtataggttattaatagcatacatgttcatcctacagtagtaagaaaataatgacagataaaggaaattacgtcacatattattggttcttatttgacttttcagcattttcccgttgttgttttattttagggtaaattgcaggccacacctgttgaccatgttttatttccatggattgtcaaaatcaaatgtggttttcaccatttatcttttcgcctgcaaaatgacgcttctgcccttgcgcttctctcttagtaactgttgaaatgtacggtttagtttagcaggtttagttacgtacactgttccggttcagttgaagattttttgtttcacgttgacgcgattcggttccgttacaagtgagattatttccattattccgaagtgacatcaacatttaatgcccccaaaaagtttagacgtgactattgtcacaattaatgcaaaatcatcattacatcaaataatattaaaaaaattattgataataattaataaaaaaattgttgagataaagaagatgaacccaggaacaaagaattattgagaacgtacattgctgctgaagaagtgttgatcttgtttttgtaccaagtttggagccaaaacaagcattgttcgtgtaagtaatgaagttcttttaagaagttttttgttatgtcatattaggatcttgattgtgttcgaactccatttttttatcagaaaatttgcaaaatctatatttgtttgtttaaaatagtcaaatgataattggtatttaggtttataaatgtgtagtatcgacattccatttgtttttttatatgtatagtatttttcagttgcatttaatgtgtgtctcctgaatttatgatgcaggtgggttatggatattcccgtatttactatggtcggtgagtggaaatgcaaagaaggagaatggaaatttgaacctgaggaaggcatctttggtcgttgtgtacgagttcaggaaaccatgacgtacacggactttgtccgtacactccgagaggctttcagtttgaagtccaccgagatcaatctcataattagctactggataccgggagaaatgtcagtgctgatagatactaaacgccctcctgtatacattgacagtcagatgggtctcgaaacgttttttttggttcatggtgggtatttttctctcaacttgttcgtctctttcaataatacagtgaaggcgttcgggaatactgtctctaggtctcatggtgaagtttctgaaagtggtcgtgtgttttatagtgctacaaatgttgatgaaaataatgaggatgtagaggagcaaggcgatgttgaagacgatacaacaaaagaggatgaagtggaggagggcaacgaagatgatgatgggtgtgatgattatctttgtgtggatggatctattgggggaagtaccttgtatcctaccacagacggtagtgaaggtattagcgaagaatacgattacaacaagtggaatgatgtaatagtagaacaatatgtacaaggaaatcttgaggaagacgtcagtctcactcaacagactgctcaacatccaggggaattcagtcgtttattggaaacgtgtatgtacacgggtgttagtgtacctggcggagatacaggggaattcagtcgtctcttggaaacatgtacgtacactggtcttagtgtacctggcgaagaaacaatttctccattgggtttatggtacacgctgcgaagggcaaagggattccaatcttatttgtatagacgaagtcaccgcggatgaagtgatcgacggtattggagcttcctcaactgggacactgaatgataatggggtagttaccgcagctgaggcttaccaagtgtataatgaatttcctaagttacatggtggcgagttggcgaatctcggtaacgatgctgctcctgtgttcgatgacttactcaattttcgagctgatgagacacaggctgaaatcagcaccacatgcgaaactttgtttgttggaagtgtttttaagaatagaaaagtcctgcaacaaacaatgtctcttcaaccgataaagcaatgcttttgcttcaagcaacctaagtcatgtcctaaaacattgaagatggtgtgcgttgatgagacttgtccatggcatttgactgcctgcgtcgtgaaggattcagaaagtttcaaaatcacttcgtatgctacgacacatacgtgtaacatcgactctcggaagaactacaataaacatgctaattataagctcctcggagaagttgtgaggagcagatacagttctactcagggtgggccgcgagctgtcgatttaccacagctgctcctaaatgatctgaatgtgcggatttcatattctaccgcttggagagcaaaagaggttgcagtggaaaatgtaaggggggatgagatagcaaattacaggtttttgccgacctatctgtatcttctccaattagctaatccgggtacaataacacatctacactatacaccagaagatgatggtaaacagcgcttcaagtatgtctttgtctctcttggcgcttctatcaaaggtttgatatatatgaggaaggtagttgtggtagatggaacgcaactagtcagaccttacaaaggatgtctccttattgcatgtgcccaagatgggaacttccaaatattcccaatagcttttggtgttgttgatggtgagaccgatgcttcttgggcatggttttttgaaaagttatcagagattgttccagacagtgacgatttaatgattgtctcggacagacattcatctatatacaaaggcctaagtgttgtttacccgagagcgcatcatggagcatgtgctgttcaccttgagcgaaacctctccacctattatggtaagtttggtgtgtctgctttatttttcagcgctgccaaagcttatagggtcagggatttcgagaaatattttggactgttaagggaaaagagtgctaaatgcgcaaaatacctagaggacataggatttgagcattggacaagagctcactgtagaggagaacgctacaatatcatgtctagcaacaactctgagtccatgaatcatgtgttaacaaaagcaaaaacttatccgattgtttacatgatcgagttcattcgggatgtcctaatgcgatggttcgcatcgaggaggaagaaagttgctaggtgcaaatcttctgtgacacctgaggttgatgagagatttctacaagagttgcctgcgtcaggtaaatacgctgtgaagatgtctggaccgtggagctatcaagtgacaagtaaatccggtgagcattttcatgtcgttctggaccagtgtacgtgtacgtgtcttaggtacaccaagctaagaatcccatgtgaacacgctctagcagctgcaatcgagcatagaattgatccgaagtcttgtgtcggatggtggtatggccttcaaacgttttctgattctttccaagaaccaattctacctatcgcggatccgaaagatgttgtcatcccacaacatatagtggatttgatactcattcctccatacagtagacggccaccaggaagaccactgtccaaaaggatccaatctagaggtgaaaaccgggtatgtactaacatcgttcattcatctacttgtattttgagtattaccatgcggagatttttaacttcctatgtacgtcacttcagaaaaagagacagaaaagacttttaccaaatcagtgtttcacgctgtcgacaagcaggtcataacaagaagacgtgcaaaaatccaatctagttctggtgacaagtttctgagccggccaatatagtgtacgcttctgtgttttctcggtgtacgtaagtttatatataatccacctaactatgtacgttgtgtacgtacgtttaaactctacgttcgtataactatgtacgtttttgtctgtgtacgtgttaaagttcatgtaataagggtacatagaggtggttgctcaatattttgagtaatttgaaataagttttttgaaaatctaacttattccccctcttaaatgaacggagttggagatatggttgggtatattgtggttatgttggtatttaatggaaaggacgtaactgttgctgtttattgtcaaattaacgttataattaccctatatgacggttaccaagctattaccaaaaatttgaatcaagtgtagttggaaccgcattaataactgtagctgttccagatttcttctatttaagtctcctcccttccttaattttatccacaatcctcattctaaatccatttcttctgccggcagttatatcattcacaaaaattttttttgtctttcgattcgcttgttcttgctatccgtgagatggaggggtttcatatggtctcagaattgtctcctctgatcactgggtggcgaatttatgtctttgtcgtgagagtcttcaagatggttatatcgccaaacgtcttcgaactcggccttatcctggcagattacgcggtaatttccgtcgaatcattatgtgtttttctcattcattcgcttaacttgtatattaaactgtctactatcatgttctgtatgtaaagaataaccgtattgaggccaccgttgatcgtcgccttgctccgttttacgaagaccgattcgttgaaaatgagtggaagacaatcacctctttcttggtccgtaagtcaactgactcagtcagagcaacaaagcatgaatacggcatactgtttatggatcggaccgtcgtcgttcaggccccaccgagatcaccaccagttccagatttcgatttcactcccttcgactacattttggagaaatctgcttacaagaacgttttagtcggtgaggaggaataactccgatgcttcatttattacatttttgaaatttttttttattatctttgtttctccatcatctagatgtcgttggagcgttggttgatgttggcggattgactacagactattagggtctcaaactgagtttcaagataaaagatagatagtaagtgttcttttcattgttttatttacaatatcactctaaacgctaactgtccttatttctaacgtagcaatgaagtcttggagtgcgaagcccgcaatcaacaggcggagtacttggatggttactttcagagtttgggtaagggaaattttgttgttgcactcagcttttcgcgtttaaccgaactgtctaacccgaagcttgagagccatggtgctatttcaaaggtggttgccaatccggacagacccgaagttgcggatatcgcgatggtggttttttagctagagggaatgaaccattattctgcgttctaatataatataagactacatttcaattaagttttctttcccagttgttgttgttgtttccataagaactaaactacatttcagtcgttgttgtttcctgtttccgtttaaatgttaatctaatttgttgttttatgtacgtgccttgttttattgttcaaatcctctcgcaatgtacgtatagtttctgctgtacgctatcgtgtacgtatattagtttgggtgccttcaacatcaaaaactattagatttatacttatgttgtgtacgcaatttctcaatgtacgataaaccaagtttaatgtactatatagtgtacttacacgaagactaaaaagcgaccgttgtcatgactgaaaagccctgagctactgtcacgaagttgctcgcttggcgaacaccttcaaggatccacgttctacaagcagctcaaagtatggccggaaggtagactccggttggagtaacgacggccacgtcatgaattc

SEQ ID NO: 759 - DNA, 72800 bp, Arabidopsis thaliana
caatatgaggatcatctcatggaattgtcagggcataggtgttccgctgactcagtcccggcttttccgtttaaatcgcatatataagtatgatattctatttcttattgaaacacttaatcagtgtgatgttctacataaattagcttgtgatttgggattttctaatgtaataactcagccccccaatggaaggagtggtggcttagctcttatgtggaaaaacaatgtatctttgtccttgatttctcaggatgaaaggatcattgatacctttgtaacatataataataagagcttctacttgtcttgtgtgtatggccatcctattcaatctgaacgtcatcatctttggcaacaacttgaacaaatttcagacaatcgcaatgctgaatggttgttaattggagattttaatgagatattatccaatgatgagaagattggtggtcctttgagagaagagtggacttccagaaatttcagaaacatgatttcatattgtgatcttgaagatatgagatcaagaggggataggtttacatgggttggtgaaagacacacgttcactgtgaagtgttgtttggacagagccttcactaattcagtttggtctgcaacttatcctaatgctgaaactgaatttttggacttctccggttcagatcataaaccggttttggtccataccaatgactcatttgcacaacgacaaaagccctttaggtttgataactgactggttgatatccccacgttcaaacgtgtcgttcacgaaggttggaaaacttctcacaattctcaatcaattgccattacagaacgaatctgatgctgtcgtcaagctatggcaaaactgaaacatcgatcaaatttaaattcggatctgcacataaagacacttcatgaacgtttaaacagagcgatggagagtacggttagagttgaaaggcaacatataccccaaatacaagagtcgttgacaaaggcttatagtgatgaggaaaaatattggaaacaaaagagccgtaaccaatggatgaaggagggtgatcgtaacacaggttactttcatgcttgtgcaaaggttcgaatttcacagaacaggataaactcaattagtgatgatcaaggacacatatacacgggagacaaagagattggtcgtcacgcccaagatttcttcacaactatctacaacacaaatggagtacaagtttccccaattgattttgcagattttccttcaactgttactaatacaatcaacttggatcttacgaaaccttttagtgatagtgaaatatatgatacaataagtcagattggagatgataaggcaccgggtccagacggtttgactgcgagattttataaacgatgctgggacatagtaggtcaagatgtcattcaggaggtgaagcatttctttgagtcatcaactatgaagacgagcatcaatcatactaatatatgcatgattccaaagatccaaaatcctacaacactatcagattacagacccatcgcattgtgtaatgtattatacaaaatcatttcaaaatgcttggtgacacgtcttaaagctcacttagattcaatcgtctcgaattctcaagctgcttttatcccgggtagaatcattaatgataatgttgtgatggcacatgagatcatgcattctctgaaggtacgaaagcgagtctcaaaaacatatatggctgtgaaaacagatgttagcaaagcatatgatagagttgaatgggatttcttggaaacgacaatgcaactctttggtttttgtgacaaatggatagggtggattatggctgccgttaaatctgtacactactctgtcttgattaatggatcaccacatggatatatatctccaacccgtggaattcgacaaggcgatccattatcaccatatttattcatcttatgcggagacatctttagccatctcattaaaactaaagcattgagtggtgatattcgtggagtgcgtattggcaacggcgcaacggcgataacgcatttacaatttgcggatgattcactcttcttctgtcaagctaatgtaaaaaactgccaagctctaaaagatgtttttgacgtttatgaatattactcgggacataaaataaatgttcagaaatcattaatcacttttggctcccgggtttatggctctactcaattacgtctaaaaactcttttgaatataccaaatcaaggaggtgggggtaagtatttgggccttcccgaacagtttggtcgaaaaaagaaagaaatgttcagttacatcatcgaacgcgtcaaaaaacgaacagcctcttggagtgcaaagttcctctcgccaaccggaaaggagataatgctaaaatcggttgctttagcaatgcctgtgtacgcgatgtcatgtttcaaacttcctcaaagtattgtttcagagattgaatctcatctaatgaatttctggtgggaaaaatctacaaaccaaaggggtataccttggattgcatggaagagacttcaattgtctaagaaagaaggcggccttggtttccgagaccttgcaaaatttaatgatgctcttcttgcaaaacaagcttggcggataatcaaacatccgagttctctatttgcacgagtcatgaaagctcgatattttaaagatgactcaatacttgatgccaaaaaaagaaatcaacagtcctatggttgggcttccttactatccggtataacattattaaaaaagggtacaagatatgtgattggtgatggaaaacaggctcgaatagggtttgataatgtcgttgattctcatccaccccgtcctttgatcacagaagaaaaatataaggagctatcaatggataacttgttctcgcatagaggtttaagccgttcttgggatgactccaaaattacaaaatatgtggatcaaagggatcatgcataccttaaacgaaactatctatccaaaaaccctattccggacaaacttatttagaattacaacttcaccggagattatactgtccgctctggctattggtttctcactcatgacccgtttgacacctctcgagcaatcattcagccacatggttcgatcgaattaaaaaataagatatggcacttgcctattatgccgaaattaaaacattttctgtggcgaattctttctcgggcattaccaactacagaacgattaactacaaggggaatgcggatagatcctggctgtccacgttgccgaaaggaaaacgaatccatcaatcatgctctattcacatgtccatttgcagatatggctaggcgactattggatccaacgctctataggaactttccgatatccaacaacattgaagataacatctccaatattttcctattcctccagaccgccacgatacacgattctcagaaacttagtccattctgcttgatgtggcgaatatggaaagcaagaaataacgtggtattcaataacttccgagagagtccttcaataacggttttaagagcacaggctgaaacaaaggattggcttaatgctacacaaattcaaggtccacgacgaccactgaaccgatcgaacgccacaccgaagaattcatggacaacaccaccaataccgtatttcaagtgcaattttgatgctagttttgatgtgcagaatctaacggcaaggggtggatggctaattcgagaccataacgggacaccaaaacattggggttcgatgactttagaacacacaagcacacctttagaggctgaaacaaaggcgctcttggcagcactacaacaaacatggatccgaggttatactcatgtcatctttgaaggagattgtcagactttgataaatctggttgcgaggtctacatcccatggctctttagcaaatttattaatcgatatccatttttgggaagcaaaattcactagctgtcagtttaaattcattaggagagtgggcaataatatagcgcataatttagcaaagtttggttgtaattcatctgatttttattctgactttggttctctgccaaattggctctgtaataactctgtttaatcaataaaagtgttttgtcgaaaaaaaaaataaaaaataattaagcatataaattcacaaaaataataacagatggactatagcctttttatgcaagaattcaggaggcatagcattccatattagaattcaataggtatagcttttgtttgatcgtatagaaggaggcagagcctaccatatataacgatcaattccgataaaagcataaccttttatttgatcattaaggaagcatagtctaccatatatataacgatcaattccggaaaagacatagcttttttattttatttgatcgtgaaggaggcagagcctaccacttgtaacgatcaatccggaaaaaggcatagtcttacgaatcacgatgtctaaaatatttctattctataaacataaacgaattaaataccataaattttacttatctcataaacgctcaagcggtaaagacatcatgctgataacgtgttataaatcataagcaaaaaaaaaatattataaaaatagaaatatgagagtgagagagtagacgagaaaaaaaataattgtttgcttttcatcttatgtcttatgattaacaacgaacaaccatatatatacaaacaaaagatttggtgatgaagttttgtagcttggagagaaagacttttaatggctaagtcttatataaataaaatcaaaaactagatggataatcactaatgattattgtttataccaatatgacattaatgaagctcaaaaattgaaatttgcgtttcacatttgtcatttgtttgaactaggcagctctagggagtcaagtggttctggacacagaaaaaaaggcgttctctcttatttcttatcttctcaacttgttaaaaaccaaaggtttttagttgtcaaatttactttaaatatcaatttgtaaacatattcttcgattacaaatatataactttaccaaaatagaagaaacacacacaaaatcagcctacacttggaacaaattcattagtgaaacggaaacatatgtgttacatgaagcttgcagtctttgcttcacaagtggtttatcagtaccttctattgaaatgctattttaagtatgcaaaaaattacagagagagtatcatcatcctaccagcaagcgatcccaattgaaaccatgatcactacagcgggtaacactgaaaatggagatatgctagttcttgtatatacagtcgctgttaactcttactcttaggtgattcacttaggcggttttcaagaatcagctatcatcttaggtgattcgtctactgcttgttcttccttgtttcttgttgcgtcttcttccactgggatcgcattgcagtggatcgtgtgtgacactggtttctctagctggaacagccttcaatttccacaagaacaaggttaacaaactaacggatcataagcttacttataaagcagtgactcgtgtttggtaattagcattcaagatgaaacatatagttacactagtgtttccgttacgacatggtctttcaatggagcaggagtaaattcactttgaaaactggttttcaagtaaatgagattttgcttacggatgcttgcacaaggttgggcactgaacagtcagtgcgtacttgcaagttgataattcagtgattgaagtgaccattgcccttgtttctgcgcatacaaacctcacctgcatagagcaatttcaagcataatgaatcataattcaatgagcccaaatgcaatgtagtaaactagattacatacctcgacttcgcgaggtgatcctgtaagatcacaggtggtcccattggtgtatacatgagagtgatacctgcaaccacaccaccataacagattagctgagatatatctttctgctgctataaaggttatgtaaaacctcagcttatacctctgagatgcatcagttgaagcatcagaaacagtttgattaaacgccgcagttgcctctgggtcaaaagtacccaaaaaaaactcttgaacaatctgcagtggcaggatacaagggccataccattagattgtgattcaatgaaggattaaagaagagtaagaaaagagaaccaataaaagccaaccttgttttcatcctcaacgtgtagctgccgcacatacttctgatgacaaaactcataagaccaccaaccctcttgctgctcaaatccagggagggattagtttcaagaatttgttaaatagggtcaaaagaaaccatttttgaaatgcttaccctaaaaagacatttttcactaagtggttgaagcaattcatcaggagtctttagcttcaccagttgctgtgtttccatcatcacagtactaatattttgctgactagaagtccatccactcgtcgctttttcctctttcggtaagtaacataaaaaccgatttccatgcttatccaacataaccattgattccagattatcaccctataaaagccaatattagcgaaccaaaacgccaaaatcatagagggatctctatgttacaactatctctactcaatgtaactcatgtcaaagtgaaaaataagctttaaatcaatagcttgtgataaaaaaaaaagccaacacttatcgaccataacaatagattccagattctcaccctatacaaaacaatactagagaatctaaacaccaaaaccacagaggatctctaacttaaaactatctctactcattgtaacttaagatcaaagtgcaaaataagtttcaaaactactatactcttatccatcgtaaccacagattccagattaccaccatataaacaacaatattagagaataaaaaacaccaaaacaacggaggatctctatgttacaactatcactaatcattgtaactcaggtcacatggcaaaaataagcttcaaatcaatctaaattgtgatttaaaaaagctaatctaatccaccataaccatagattccagattctaaccctgttagtgacaatctctatgttacaactatctctactcatagtaaatcatgtcatagagaaaacgtaagcttcaaatctatctaaagtgtgactaataacaatattagagatcaaacaccaaaatcacagagaatctctactattaatattcaattagtgcaaaaattaagctttttgaaatctatcttaagattgcgttattaccgggtgaaaaggtgaatcttcaggaaggaactcaatcttgtactttggttcacgattgtttctgctgaatgttccaactatacataaaacattgaatcaagacaaaactcgaaattgatcggaaaattatgagaagagaggaaatgatatagacctagatgagctgggaagatctgatcggaccagacatgggagcttgaagacaatgccactattaccagacataacaagatctgcgtgattctcatcttctaaccggtacgaaaaatgtgagattgtgaaggagaatagcaccggacggtaacaggcgacggcgatgtagacgatgaggtcgctcgtcgagtgttattagctgcggtgatgtgactaataagacggccacgcaggacatccaattaaaattcgacacgtaatgttataactcaacaaatctaattatcgtgttacagtgtcgggaaaaatttcatcaaaaccaggtttcgttcaaaccggttatccaattcatcaaaacttaaaagtggatttattttcttattacacttctagaaacaaaaatcaaatggaaactataaaaaaattctttcgaaaatgcaacaattttatataaatgatttgtaattttttttttttaacgtctacttttattgatgaaaaatcatatctaacataaacaagaaaaaaataagaagaacttacaaaaaaccaactaaggttgaagcaatttaaagttttaacttagttttttcattgatttaaatttcaaaccaattatgagtaaaagtttaaagcgaaagtgcgaaaacgattttcccacggcttattttatcgtatttataaacaaaagtttccattatgcctaaacttacattaactaagtcagaatttaaatatttttcgttgtaaatatagtttatcagctatatttacaatctcaaatatatagcattatctacaccctcatggtccttccattgactggcagtcaggcccggcccatgacatatttctaagaaacatgggtattgagccaccaaaagttttaaggtttttagtatcaaaattatacctcaaaaatatttgttgcctcattttctaaattttttagatttagtctcaatttttaatttttatctattttctattgaatacataggtttcattttcataacattttaagatttggtctcaaaaaaaaaaaattcttctataaacccataaaaaaaaagttattttgagcctcatttttcacaagacaggcactgctggcagcctggcagcaaataatttggttcaaatgaaggatttccaagtatgcctttatagcttcggtgacaactagacaacgacttcaccaaagagatggaattttgctatgggatcttcaagttccttacctttaatgcaaatttaacgatgaaacctcgcaacacattctttgagtgcacattctctagtgaagtatgatcttaattcatttctaaggcccatattgatcctccaaaactgtttgtggatactgaatagagttacatggataaaagacctctgccaaaacaaaaatgtgacagtcgagaaaataaaatccaatgaggtcttttaatattaaatgtttttaggctttagctatgccgttactatattcacaaatcaaaattggtccaaaattttcatattatccttttaactttataatcttaactaatttaataaattactataaatattatttttcctaccctaaatatgtccccccttgctcacaaagtcaaaagactcattaatatttaacgtgaaacaaaattgaacctcattttaattggaaattcaaatattcctaaaatagtaaagaatttcaacttctcctccgaagttttggttaaacagttcatttcaagaaaaaataataaatgaaaatcaaccaaatatctcgtcgatcacttgttttctgttttgtttttctttcctctaatacagatttgatctttctttcaatgtcttccttctcttttgcattcctttgttgatctaaccaacaaacattggttttgtaaaaaaaaaatgggaagcgaaacaatgaccaacttgtctctacaaaagaaactcaaatcaaggttttgcatcgccggatgttttcgtacgaccaatcatcaccaccacgacaacattcccgacgacctaccatcatccccggtcaccaccgagaaatctacacaaagcccacatggtggtggaatgaagaccaaatctccaagactcactaggacgttgtccaagtcacatgaaaaatgtaagagtctgatccatcgaatgggcggtggagtaggtggcgttggcggtcacgggaagcatattcgccgccatactgctgactttcattacgatccgtcgagctatgcgcttaactttgataaaggagatgaggatgacaatatcgaccgttttccgctacgtaacttctccgctaggctgcctcattcaccgccttcttcggccaaggccgcggattcttcgtatacggttcaaaaccttttgcggtaaagaatgaatcacacatttctatctaccaaataatctgatgtttttagcaaatgtaaatacaaaagttgttttgagaaaaaaaaaaaaaaaaaacttgttgttgatataataatagttgggatcggacagtgtttactatttgacatgtgcatgccaatgctaatgtcgtcgtttcaaatttttttgttgatcataacatagagaaatatgaaagaattgtagaagtttcataatgaactcttgtaccagaaccagaatagacgatatagaaaatgtagtttttcatggtcatgtgtatattgtaaagaagaatggatggatgaattattccaaaactctgtacatgcatgccaaaaagaccacttgttaagttgaaaagaagcaaatcgatcatagatgagtaaaaaccaccagcttgtaggtggaaagcaatactagacgaaataattgttatgagaagacacaataacgattagaaaacatcgatcgaggaaggccatgtaactgaaaatctctcgaaaagtgactgtaacatccactgccgagaagatgtgcacacttgcgcatatatgtccactgccactaaaattgcacttaaatgttggtattcgagagaatcaaatccaatgaagcatttccacaaagcaatatggaataggcagagggttacaataaaaactcatttttgtcagttttagaggatctcgaaacttttgattgacctcagggaactctggcttttcttatcatgctttaattcatccactttctttgtcttccctgcaatcttgtactgcaaatctacactcaccgcagcttattatctaagaacataggatatacacaccaggaagagaccttgttctagtagaccatgtctgctctgcaacctcctcggctccactcactaataaaggaacattgttgccctcatagcgaacaaagttcggttaaagctgtctcaaaacttttacggattctaattcatctggtttgattagggagctctcacaattctacttcatttttttcatacacaattttctcaatcataaacggcatgaccgcaacaaactgaaacatttcacacactaatccttcactcactaaaaaacacctgaaatcgtttctctaccctcattgggattcacctttgaaaatccagaccacaaacagggttactcaaaccgtaaacaacgctctatcctaaattactttctctgcagatgattacaacccactagaaggttagttccggagggcaagtcaaacaacaacaacctcaatgttatgattatataagctcttctctatactaatctttagcaaccaccagagtaggattaaattacaatttcattttcatatagtagaagaagcagaagcatgattataaacaagatttgacacacacacatatatatatatacgaagatacgataattaaggcaaagttggagagagtgaaggattagtgaccttaagctctccacagccactaatgaaaaccgtcttcaaaggtctattccacaaagatctcgcgttttgagctctctcgtctccaagaaactccgcaaaatcgttaaactgtttaatattctccgacggcttatacgtcggaatcgaagaaatactcgtcactacatctaatcctgcaagtagaaactcaccaaattcaattccaagattcctaaagagttcttaagaaaaagcttaatcttttaccttcaagaacagttccgaatacaatgttaccgccatcgagctgcggagacggtccaggaccagtagtgattaagaattcaacatttctataatcaggatcgagtctaatatcatcatcatcatcattctcagataaacaaagagaaacaacaccagcacgagcatgaggaagtaaaaaagctttggaattaacaacgtcggtgttacgaggtaagtctctgagtgaataaccaacctccgccgtatctcgccgtcctcctccttgtcttccggcgagaaaatactgaccagggaagattttgtggacaggtgtgtttttgtaagatgtggaagatgaagtacacatacgtttgaaagttgagacggttatgggaacgtgacggccgtataatccgagaacgacgcggccgagaggagttgaatcggagcaaggtgtggtggaggagagtgtcgcggagggatctgagcggaagtaggtggggcagagggagaagtcgaggaagactcgatcggttattgtgatgtcgggggaaggtggtttagctggtggtggtggagttacggtggcgattgtggtggagaggaggagattacgacgggtgagaatcggagggatgaggattgatgatgatgccatgttggatgatgatgatgatgatatcattgtctctatctctatatcttttcttcttttacttgctatgttctacgatgtcgttttggaccttaataggttactgggtcgggcttgcagtttactatttttttgttgtcctctaaattttattaaaaaccaaagtaggatacaagttaaaatatataaatcggtggatcaatggattgtctccagaaactcaatccaaaagagggaagaaaaaacccaacagatatgggaaaactaatttaaatcaaagaaatcaaaccaagagacaaaattctaatgaaggtcaaaaactatgagaaaaacaagatttaagcactaaaaatgagcaaaaggatcagaaactctcaccaaactttcctaatgtgaacgtcggaagcaccaataaaattggatagaccttacatcgaagtcaaaccagtagcaaaccgacagagagaaaatcaagaggatgctaaaaccagagacacaagtacaaacaccatcacacctcaccaatcggacggagatggcaaaatgcaatagggacaaggctttcagtttactatctttatttaattcttttcatatttgttttttgaaaagtattgcggtttttcttttttactgtttctttattatgaaagaaatatcttacaaaaccactgttcttgagacaaaaactcaaactggttattcaatctgacatcaaagacaactgaaataaaaatacatgttatctacatgttatctacatatatatttttgcaaccatttttgtaaataaatcctcaagttggaacttatttacaaggaatgtcattaacattaattattatcatttaaataatattcctaattattagcatttccttatttaatatatctccatcaattttaattacttttaaaaagaaaaaatcttaggattttattaaagataaatattatagttatttaaagtttctaaaatgtttagaatatttaacgaaaaacgtttagaatatatataatatatgaaatctataaaattaaataaccatttcaaaagaaaactttttaaattgatttgaattataattcttttaataaaaatattattagaacaaaaaaaaaatgtttaattttaccaaactggattagatggtgggacggattttactattacggtttactagagaaaaagaaagagaattctccagttttactattttactagacgaaaaaaggtattgcggtttactttttttttgttaacaattcttttcatattttattaaccatttttattttcttttggttgtctcatctcatgcataaaatatttcaatttcttttgtaccatattacaatagtagcaaggttgaaaatgttagaacatgataatgttatcaaggatataacaaacaaaagtaggtaggcaacctgagaaaacaatatttacgtgcatgatcaaattgtggattagtgcggacattttatgctagtgtacatgtgcctattctagcattaactcgataagaaacaaatgaaacagaaaaacaagagaaaatttttacttacactttacgatttcctcgagatatgacgaaaatatgggccactcttttggtgaagacatgtacaccatgtcaccatttttatgagttcataaaagttcgtgacgaaagaaactatattcttctgcttggccgttagacattacttcgcccaaattaatgcttctatatttgtatgcagggaagtaggctccgttgaagacaaactcatatttgatgtttcgttatattaatctttcgaacaatatcctgaaaaattatattttttctccaaataccgatcaatgaaagaacaataaccaaaaaaaaacattctcctccagtatagctaatccagtagacggattatctctgctaacctctatttgagccaaaattcaaattgaatgtcaatgatcagatattcggattgaatgtcattagtcattaccaaatataactataaaataattaaatttatatattttttaagtcacatagtaaacaaatattttctcttagacgtatggaatacacaattttttttttcttggaaaacaatcttagcaagtcgctcaacaactctacattagaatgtcaagagatttgggcaaatgatagcgtagtataatcaaaacaatatgaagacagtggtaaccgaagaacataaaataagaagaaatagcttgaagatcatattacaaaaattaaaataaaattatttttctcgcattccaatccaaatttcatctctcgatgttacaaacggtttatgtataaatttacatcatacaaaaaaaactataattacgctcaaatacatgattctgtacaaattttatagaaaagcctccctacaattgaccattatattacaacatttgaattagtttcctttgatatccaaggaaactcatgaaacctttccaatcacacaccaaacataatttgactctcttcgaaacaaacaaataaaagacaaaaaattaatgaatgggaactaataatagttcatgccttaaatgggagaatcaatatcagacacggtcgaagataacgatgcaagggtagaaatagacgaagacgacgaaagtgactggaggttagaggaagaagaagatgaggcaagatgcagagccaaactgtttccttcactccaagatcgttggatagggaacataacgacctcagaccttccatgacgacaaggagtcgctgaacctccaccgcgagatctctcgtgaagggcacaaccgcagttcttgtggtatggacgtcgttggatggaagagtcacagctagagatgcaaccttcaaagatgttgcggaatattccgtccatggatccggcagccatcacgacaatcttcttgatctttctcttttttgttacgaaggagatttttttaaattccccgacgtgaacgaagagtgaaacgcgtttgtggttgacgaagagagttttcttttgttgttgtcaaaaaatgaattctgatttttagggttactagagattctttttttatagccatgcagaaatagtagttaaaggaggtggcgattgtacatgagaagcgtgtgaattatgtgttaatgctttcttttcgggatcttttgaccaaaccacctcttcttcttcttattattatatttcttcttttcttctttttactttaaaaaagaatatatattttcatatgagaaattgtagtagataaccaaaatttaggtggaatttaattagctagatcgatatctaacaatccattttctaatttaatttgggaatgactagttaagcgatgaaaatatatttgtttggttctgtacgttcctttcatatgaagaatttccctaatagtttaatttagacccccttcttaacttttatttatagatatgtatagtctacttttatataaaataatagcataaaaaaaaagctttatggtggcacttacttatactttaaatttttaaaattttgaactcatacaacaaattatcaaggtgacaattttactatttcaaacattcggagtggctttatgccaacacaaattaattttaacaaaatatatacatttacatgtttgatttgatggtgatgtgtagcatttaaatgtttgatttgatggaatgaatcaaaagatttcttttacaagtttttttagcacttgtccgaagtcattttttagtcgcctcgtttttctattaaaattatgaaagcggaatacttggagggttgaaataataaactagcagaaaacaaaaatatctctaggaactaaaaccctataaaagagaagcagaagattaatactaaaaaggccaaagaaatacaatgatagaagagggaaaccacaaatgaacaatacaagaatcaaaaactgaaaaactcgtgacataacaagccaagcaaggaaacccatctccaagagatcttttgatagtacatatcgaagatgtccacatacaaccatcgataatcaaattctcctctaaagatgccaagctgcgtaaacgtaacggaacttgtatgctaatcttcatagcctagctagcaaaacagaaccactcataattcctcatactttcttccaaatgcggcgatgtcattgttggggttggattcccccagagaccgagctgaatagaagcaacgagcacctcgacaggcttggcccccgatgaagggagaaccctcgagagctgatcaaaggctccggtgctatttccttaagcacgccccgaaccggaaaaagaaatacttcgacagaacaccaccaccaggatgctgcggaagacagcaaacggttcgggtgtttttcctgtaaacacactccgagccagaaagagtgtttcgggttcgaaaggggatctctttggtttcccccgagccaaacttgggagaatctcgaggttaagatatcacctcggggataactaattcatcttccatcacgccccgagccacaatattttacgacccaaaaagttcttcggagcgccatcaagtccaaatcttgtccgaggcaaagatttaaaaaattcaaatcgaagtgttattattttcggaaaacccgaaaatgatatcaaaggatctccgaagacgtatataattttttttctgaactattaaaattattaatgaaaaaaacctcgaatatgaaattataatgagaaaattccttcgtttaaaactacctgacatatctagcttaattgatatttttgtttttatttgataggaaatgacagatattgtttctttagactttaaatattgcggtgtttattttaatgaattaaaatcactaatcgcaatttaaaatttgatatatatatatatatatatatatatatatatatatatatatataaaatagagccgtttttgtgcttatcttttcaaaaacattaccaactcttgtttattttttggctggttaataatttttgcatttggaaaaagatcatttttgttaataatttaaatggaaattggatataaaggaaatccagaacaatttttatccatatataccttttttgtaaattggtaagatgggtttttataaaaatttaaacccaaatctaccctattttctctcaaaagtaattgaaaaaaataaagcttcctaatttatttacaaacctaaaacaggaatcaaaaatgactaaacctattcgccgccgtttgactcccccgttcttgcatctcttcttcctactttcacatccaattcagccctccaagcttcaacataaataaagacgaattcatatgttagaccggtttaattttcttaagtttcaaaacaagactaagagaagacgacggagtctctagctgcaatggcttagatgttaacgcaagatacaatccgggaaatatgctttctcaacgctgatttgatgttattgatcagtgatcacattaaatccacgagctgaattgcggtttggggccgcgttttgttctcctctgaagcttgacgtatcgtctagcagaatcgaatcgtcacatccctatatgtaagtatgaaaacgtttagaagtaaagaagcaaaataaccattatactaagtttcttgaaatgcaaggaaaacaaaagaggtgaaagaaaaaaatgttatgctgacaaggttaatttttttgcagagtttgatatataagtcattttggtccttttttttaagtttgagagatccaaaaggaagtcactttgaagtcaaagtcacatgagttttttctagagttaccgaattacatcttctgaagtttatatactacaaaacgactaccaaaagcgacaatcatcgtagtcgtcttcttgtgcgactattttacaactattttacgacaacgacgtaactagtcgttgagtagtcgttcaatagcgactaacaaattgtgtcagaacataatcgttaattaacgagtatttgatgcctatgatattgaatagagattatagtcgccaattgacgactacatttccgacttaattcttttgtcgcttatttggcgactataatacgactactctcttttgtcgtcatgtagtcgcctaattgtcgtataatacatttgaaaaatacgttttttgcattcccgggtaggtacacctaattatgttacgactacaacctgtagtcgtttaatagtcataaagaatcgtctatataatgaaaattcaccacactctttattcatcaataaaacaaaacaacatcaaaagaaaaaaaagagaaaaaacgatttgaaagaaaaaaataaaagtttagtttattgtataatggcgggaaactacaatcatggcggtagtggcggtttctatcgggattggatgtacaagagatttgatatagtgacggggaatttgtcaactgaatacgtcgtagaagttgaggaattcatgacattcgctaatagccagcctatagtacagtgtgtaagaatgaaaaatacatcatctcgggtagaagagttagtagtcatttgtttaattaaggatttgtttggcataaacatggagaaaaactgaatatggatataagaacgagttacatggatatgacgtattttagtgagaatcatgaagaactggttaatgaatatttttcattttgttatttaattgtatttttcctcatctaaccaaatcaaatttgactcgaaattaaaccaaaattccaacccctaattatgattaagagagaaaattggcaaatttagtgaaactaataattattttttatatgttctaataccaaaattttccttttttttttttttcatatgttctttctaatgttatattttccatatttatttctattttataaatatcttaatttcttaatgatattatttatattttctactaacaaaattttaaagtttttgtttttccacgtgttattttttttaagttttcattttttcttctttaaatattgctttttccttttcataaatatcttaatattaaaaattattagaacttcaaaaattaaactaatgaaattcataaaaattaattagcaatatacctaaccgtgattggtttctactaacaaaattttacattctttgtttttccatatgtttgttttttaaaaaagtttacatttctttttgttctatatattgttttattttcttttcaaaagtatttttaaattaaaattattagaatttaaaaatgtaaactaacgtaatagctaaaatgtcatcaaatgacatatccaaccgcaattggtcgtttaaattcttatgtgtacgcctctagaagcttacatccttaactttgaattagtatatactctctctgttcttttttatttgagtttctaggaaaacaatttgtttcaaaaagattgaattttttaggttttctatgcaatatttattagttattattgatgaattgtaaacgttaataaaaaagatcgaatatcataggtttaaagttataggaaattgtaaaacacaacaaaataatatatttaaaatcaactttaatatgtgtgttttttctaaacaatcaaataaaaaaggaacaaagggagtatttgaaaattttaacatatatatgggcaatttaacacttttttgtaattggaatttagcatataattttagtcattgatgattatcttaggttgggaatgagatcactattttagaattaagaaattttcttgatgttaatttttttttaatataaattatgtcatcatatccaacataaaagttattttataacaatgatcaaacggattatgttgcaaaatagcatagcagcttcataaaaacaattaatggtttttacattcaattttaggttcgatgtggagaaagtcacaactcacaacattcataaccactaacaataatctatttatttttttccaccaaatattatactcaagacattgatgcatggtatttctccgccgtaaacttctccgtcaagaagactcagctttcctgatatgtgacatatactttagggtttcaaattatagccaccagcactacaaaaaaacaaaagatttgcgagggaacttagcgagggataacgtgcctcgcaaatttactatggttttgcgagatacatgcgagggcggactcacatatcgcaaaaccctcgcaaaattggcgagtaatatattcctcataatttgtgaggaacttacgagtaccataatcggtcgcactttttgcgacggatttgcgagccagtctctagttcggtgaacacgttttaagaaaattggtgtgtctatagatagaaaacgtaagaaatgcaaaaatcataaatcaaaatcaaatacattatataaaaaaacttcttaaagaagtaactagaaagattgtttgagttcacctgatctatcttctagaaggatcatcggatcatcatgaaaacccaactacattgctagaattcatgttatatattggaaagaggtttacctccttgcttctatggtacaatcctcttcccgcgggtggaagctgtgggttcgagccctgtcagtcccggcggattcaatacatcaactccccttatcgttcatatactctattgtgtctgaaacttatggattacattggtgcaaatccaatcaactccaaagtatttttgtcccaacaattaagaattgttttcccctacttgaaaaagcttgtacagtttaggaaggggttttgattgatcaaacagaagaatctacaggcttattttaaaatttattttaatattgtcttaaaagcttattttaaaaaactacttaaaatagtacttcttaaacttcttaaatcaaaacataaaccctaaaccttttcactgagctcaaacatgcttaagccaagttatacacattgatctagaaaacaaagaactagaagacatcaatgacgattctaaaagaataattggacgaagtcgaaaagtctgatgaccaagtagactctaatgatgataacaaaccttataatgattccgaaaatgaatctagataaatgtttattattgtattttcttttttttaaaacaaaatctaacaaatcgattattcaattcctacgaagtaacaaaaaaagtgcaaagttcaaattaattaaattttaattataaattgattttgattataatttctatttcatttatttaggtaaacaatattagtgtaatcctctaatttcgagttttaccatctaatttcgaatttttatcgttttgttattagtaatgtgcgagggatttgctaggtttcctcgccattccgtcggagtaggtgacgcgttttaattggtttttcttccgctccttgcaaactcctaacaaatttgcaagggatttgcgaagaagattttttctatatatgcaaacttaaccgcctctaccgtctcttccatctccaaggtaatcttcagacaaataagggtgttgtttggaccctaatctctcaattctctcgattatctctctaattatatatatggtttctttatttttcgattcttaattagggtttttgtttctttgtttttgtcttctcagctctcaatccctaatctccgattctctccgccctcgaaccctaactctcccttctctgattctcaccgcctctacagtctcttccatctccaaggtaaaatcttcagacaaaaggttttgtttggaccctaatctctccgttctctcgattatctatctagttctagctagtatttctttattatttgattcttaattagggttttgtttcttagattttgttctattcattttgaaacaacccgacccatttgttttttttaaaaaaatataattaaatattcccataaatacttaattaaaccaactaataaagcaacatttaaaccgcaagtaaaaaatactattgaatgaataaataaacaattcaaccaacaaaaaccaagtatgattaacaatcctaacacaactctaaccgggttccaataaccaaaacacaaaaataaatcaaacgagttccgaaatcatcctctcttccttgccatgattccacgatcacactttatctttacctgcaccaaaaaagaaatagatgcgtaagtattatcacaaatacttagcgaggcaatcctcctatctacgagctatacacataagcaattaaaagggtataatcacaaatacaacataaacaaaccagtcactgaacaattcacccaaaaacacattcaccacacctacatatcatcacacaaaacaaatcatacaacccaatcgctcagataagctcatggtcacgccctcaccttatcaaattgattctaacaacaattaaacccaggagagactctccttgcgtctgaaacagtccagaaacgtcgtacaataagtcacaaccaaaagaaagagatgcgtaagtattatcacaaatacttagtgaggcgatcctcccatctacgagctatacacacaagcaattaaaagggtataatcataaatacaacataaacaaaccagtcattgaacaattcacccaaaaacacattcaccacacctacatatcatcacacaaaacaaatcatacaacccaatcgctcagataagctcatggtcacgcattcaccttaacaaattgattctaacaacaattaaacccatgagagactctccttgcgtctgaaacagtccagaaacattctacaataagttacaaccaaaaagcaaccttgaagcatattgtacatgaaaatcagaaataaacagtctcaaagacgaaaccctaacatacaaaccaaccattaattatcaaatccgtccggtgaaacgctagccttagacgtcagcgtcctacacaatctcgtgccgatctgaaactagacgaaaccacgatctcagttacaatccccgctggtcctaatttgcgtatgagaaaacgtgtctcacaaaaccgcgaataactcaaccatttttaatccaaatccacttctgtaaactggagaataacgatacaagacttgggaataactctaccaaatttcgttacctttgacaacgatttgatatgtcgaaatcgttttctcccaaaccctaacgattctggttcttctccttctctctctttttctcctttataaaacgaaaagtggctaactaaagccctaattttgagttttctttttttataggcacactctagagtttccaattaatccaaccgattaaaccggacgatttaaatacaaatcctaaccgatattccggttcacgggcgttacaattctcccccactaacatagattcgtcctcgaatctagcttcacccttccactccaataaactccgtgcaaccatcactacggtctgcacaccctccaacaagaccccctctaggtctctctatccagtcagtatactcagatttactagtcattattgctcacaactcactctccactctcaaaccgcaatcttcgagcataaactgtcactctcaggcctcggcctacggcatctcgggtatcacacgtattatcttccccactcaaagtcaaaccctgagttgtgtcggctcactctcaaccacaaagtcatcgagttacgataaagcgtgctctcggatcgtcatccgaagccaccgtacccctcacactctaaagacaccaagtctctcgagttaccggtacctcaggagcataccccgctcctcacaagttgttgggaccctcatgtccctcgagcaacaatactaaacgcttccgagcatatctccagactctctcatggattcgcgtaagacacctttatgcctcaccatccatcatatccccttgggaacatccttatgaccaactctcggccatctcgtaaacacacctctctctaaggttgtttactcaaactttccaaaaatagacaagtcctttttgggaaactttccattcttggaaaccgcacaacacattctttaacaacacaactcaagtcaaatataataaaaaaatacttatcttataaatcatcaaatgtcatgatcgttacaacgccaaactaaagagaaataagaacaacaactcaaaagctcaaaaactcaacaacactaaaactggaaaccaaggataggcaaactcatgcagcaacctgcttctcaaaccacttcttgaaccttgccttcatcctcgcctctggctcccaagtctcctctgtcacaccatcgcagtcccataggactttgatcaaaggaatctttttccgtcaaagttccttgatcctcctctcgagaaccctcactggtctcgcctccaaagtcatgtttggatgaaaatcctctggaatcttagccaacacctcatcatccttgtgaagaaatttcctcagcatcgacacatgaaagaccttgtgaaacgcacgcataacatctggcaactctaacttgtatgccactggtcctaccctgtcaacaatcctgaacggacccatgtacctcggactcaacttagtctctgagatagacctgtttggacctcacaacatgactatcttgagatacactctgtccccaacctcaaagtcaagctctctcctcctcttgtcaacataactctgctgtcgatcttgagcttccttcatgttcagcttaagaacccggatcctctccgtgatctcctgaacataatctgtaccatatatgctcctcttccccacgtgggtccagcataacggtgtcctgcatggcctcccgtacaacgcctcaaaaggagccatcccaatactcgcctgatagctgttgttataagcaaactctaccagactcaagtgatccgcccaatgacctccccaatccaagacacacatccacaacatatcctcaagcgtctggatagtcctctcagattgcccatctgtctgaggatgataagccgtgctcatctccaccttagtgcccatctctgcctaaaaggctctccaaaacgcagaagtaaacttggaatccctgtctgatacaatactcacagatactcaatgcaacttcacgatctcgctcacatattttttagccaacaccgccgctccattagtttttctgatggccagaaaatgtgctgacttagtcagacggtccacgatcacccaaataacatgtttggttcgcgacacaggcaacccagccacgaaatccatcatgataaaatcccacttccactcaggaatgggtaaattctgcaacaggccacctggcacctgatgctcagccttaactaactggcaaacatcgcactctacgacccaattagctacatccctcttcatcgcgacccactgatagtaccgcttgaggtcccggtacatcttagtcgctcctggagaatggaaaacatgctcgcatgagcctcactcaagatttcccatcgcaactcctcatccttaggcacacaaactcgcccatgcacaaggatagtcccattagctgcgaactaatactcagagccctctgccttagaagccgcaatcaacccctcatccttctcctgagccaaccgaactctactcaaaaaatctgctcgatccacaacttccaatcccaatggctcccgtgccacaacacacaaccgcaaagcaccaatctcactcaccaaggcctcaacactctgccctggagccgcacccacatgcttacggctcaacgcctctacaaccacattagccttacaaggatggtaggctatctccagatcataatcaaccaccaattccatccatcgcctctgcctcaggttcagctggctaagtgaagatatacttcaaactcttatgatccgtgaacacctgcactttcccgccataaagataagacctccaaatctttaaggcaaagatcaccgcaaccatctccaaatcatgagtaggatagttgtcctcatgcttcctcaactgccgcgatgcataggcaataacctttccaccctgcatcaaaacacaacccaaaccaactcttgaggtatcagtatacaccatgtaaggctctccatgctctgacaatgctaacactggtgtaccgatcaacatctccttcaggctcacgaaaccctcttcgcactccggttaccacacaaaaggaacatccttccctgtcagcgtagtcatctgttgtgtcatactcgcaaaccccttgacgaacctcttgtaataccctgccaacccaagaaaactcctgatctcagtggcattcgtcggtctaggccagtctctgataacctcaatcttctccggatccactgaaactccttctacagaaataatgtgacccagaaaactcatctctctctgccaaaaactgcacttgctcaacttagcgaacagcttctgctcccgcaacttctccatcaaccttatgaacgttgtaggtgcattagtcaaaccgaaaggcatcaccacaaactcaaaatatccatatcccatcatgaaagcagtcttgcgaacatctgcctccgctatcgggatatggtgataacccgacgtcaaatcgatttttgagaaacaagtagcacccctcaactgatccaacaactcatcgatccttggcaaagggtacttgttcttcacggtgacccggttcaactcctggtagtcaatatataagcggaaactcttgtccttcttcttcacaaataacactggcgctccccaaggtgaagtactaagacgaatgaatcccttacccaacaaatcctctagctgcttcttcagctctgccatctctgctggagtcatcctctagggtgccttagacaacggcgctgtcccttgttccaactcaatcgtgaaaggatcaaacagtgatggtggtaatccctgcaatgattgaaacacatcctcgaactcctgaacaacccaaatgtcgctcagtgcagcctgccccacagactccgacatagatatcgtcaccaggtaagcctcgcagcccttctcgatcattttctctacctgcactgctgagatgacgagactccctaaggtaggtctcactccctgataaaccaacctcccttctggccgctcaaaagaaactctcccacggtggcaatcaagatgtactctgtaatgatccaaccaatccattcccaaaataacatcatagaactctacatggctgataatcatatctgctggcatcgactctcttgcaatttgaatatccacacccttagctctccctagaaccgttagaaactgccctctagcaaccttgacggctccaaactgctcaccaagatccccacggatgttgccgcgcgaggcactctccggagtaatgaagcaatgcgatgctccagagtcaaacaaaacatgggcctctacatcgcccactaataaggtccctacacaaacctcatgtgctaagaaccctaacattcatcacaaaacaatgatatctaaaaaaaacagaaataattcacaaagtctgagtctcagaaatcataccagtgatcgctctgttgctggtaccacgtatctcacgcgtagtgctgctgcaatatgtgctaactgctgcatattttgctgcactccctgctgcacctgcactccctgctgcacctacgctcccttctgcaccgccggctgtactactgccactaccatccgctgcagcttaggacaattcggcctgagatgtcccctctctctacagtggtagcactccctcgtctcagctcgctgcgtgcaatccgctaccttgtggacaaggccttcacaagaaaaacatcctccacgactaccctgtccagttctggaaggatggtcccacttcctcttatgcccctgcgcaggcttgccgcccttgctaggtgccacgtgctgctgagtcttcttcggctgtaccgctagactcactgtctttacctcagcagccgtctccactagtgccgccttcttggcgtactgcgacactctacaccgcaacctcagatccggtcgaagtcccctcaagaacttcctcaactggggctggtcatcttccatgccccgatccgtatacatcaagaatcagttaatctctcggtcatactcccaaaccgaccgctcaccctgtgtcagctcaagaaaacgagcctctatacggtcgagcgcttcctgcggaaagtacttggcattaaactcagccacaaaatctgcctaagatatatctgctggccttctcatggcagtcacatccaccaccacaaatgtgcaccccctctacaaaatgcactgtcagatccacccgatactccaccgggcatcggctcgaactgaagttccgctcaacccgcgatcgccaactgtcggcgtcctcagaactagtaccaccagtaaaatacccagtgctaatccactgcaactgctccatcatcctcaaataagatggaacctcctcagcaaccacagccctcttctgcacctccgccactcgtggcgcaactggagcctgcattggtaccacacctggtaaccgctccaacaactgtctaaacaggctcgccaaaccaacttctggaacttggactcctccgactgcggcacccatcactcctgggtcctcagcaccaacggcatgcacaccagcaccgacaccagctccactagcccccactccggctgtaccagctatatcggcaccaagaccgtctccagccccagactccacaaactcaggctgcgaacccacactctgctcaactgtggtcatcactctcgccggtaccctcgaagactcgtcctttaccgcgaccacgaccacgaccacgaactccagcttctctaaccatttgcgctactcaagaacaaaaggctaagaaactagaacaaacaaatatatcacaaacaacttaccgtggaatctcatttaaggcttggagaagatgatgctaggactgcaacaacacacaattgactaaacactccataatcaatcctcagtatgctaacaccctagctatcccacatcaatcatcaggaaaataattcatcaattaattttttctatacatcttagaaacgtgatcgctttgataccaaattgaaataacccgacacgtttttttatataaaaaaatataattaaatattctcataaatacttaaccaaccaataaagcaacaattaaactgcaagttaaaattactatttaatgaacaaataaataattcaaccaacaaaaaccaagtatgactaacaatcctaacacaaccctaaccgggttccaataaccaaaacacaaaaagaaattaaacgagttcctagatcatcttctcttccttgatatgattccacgatcacactttatctttacctgcagcaaaaagaaagagatgcgtaagtattatcacaaatacttagtgaggcgatcctcccatctacgaggtatacacacaagcaattaaaagggtataatcacaaatacaacataaacaaaccagtcattgaataagtcacccaaaaacacattcaccacaccgacatatcatcacacaaaacaaatcatacaacccaatcgctcagataagctcatggtcacgcactcaccttaacaaattggttctaacaacaattaaacccagaagagactctccttgcatctgaaacagtccagaaacgtcctacaataagtcacaaccaaaagcaaccttgaagaaaacaggacatgaaaaacagaaacaaacagtctcaaagacgaaaccctaatatacaaaccaaccgttaattatcaaatctgtccggtgaaacactagctttagacatcacaaagcgtcccacaaaatcgcgtgccgatcggaaactagacgaaaccacgatctcagttacaatccccgctggtcctaattcgcgtctgagaaaacgtgtctcacgaaactgcgaataactcaaccaattttaatttaaatccaattctgtaaattggagaatgacgataaaagacttggagataaactaccaaatttcgttactttcgacaacgatttgatatgtcgaaaccgtttcctcccaaaccctaacgattctggttcttctccttctctctctttttctcctttacaaaacgaaaagtggctaaataaagccctaattttgagtttccttcttttaaaggaacactctagggtttccaattaacccaaccgattaaaccagacgatttaaatataatccctaaccgattttccggttcacgggcgttacaatttctctgatcgattttttttttggaggatgtcattttctgggaacgattacttaagattccggctgcagcagcagcaacaacgtgttccttcgcctctcagtgaagggaacaactcggcggttcatggtagaagccttccctcctctcctctgactccaaccaatcaaaactctgaagcacatgggacttcttctacacagcaaaatcaaccgcctcaaagcttctgataatcatgctaatcctatatctaggcgtttcaacaacctgacacttgatgagtttcttgatagtcccggtcatgcatctctaacgagactagaccctaatcgtcctccgggaactctctggtaagttgatgtctttcattctaacactaattaggtttctattatggttttagggttagttgtgtagatgttttgtttggtttagcataacaatcaggtaaaatgttttggtttctattctggttttagggttagttgtgtagatgttttgtttggtttagcataacgatctggtaaaatgttttggttttagatgattatactaattagaccaattgattttttttttttaggtttaacgaagactcttctgttgttggcactgtctgcagcatatttgagagagattttaaagatccacatgcttattggacaatgacaccgcaaccagtgatcacttgttggtttgaaacttttgcggtaagtggaattggtgtcttgttttcttgtgttaatttagaaacttatctgctttgtatttggctgttgtgtcaagattatgtgactatgttttcttgtgttaatttattgacttgattgcactttttgatatatcatctctctattttgtagcaagtatacaactgggaccgtgcaataaacaagagagttaggatagagtttgaagcaaagctgaaggataggatgtgcgatcaaatctctcgctggtagggaaagtggaagctgaaaggagatgaggcaatggcgcggtggcttgatcctgaggagtgggctggtcttgttaggtattggaaagatccgaagtcagagttaaagagtatcaaaagtaggcaagcatgatatcatgatccacagggcctcggtatatctaaacaccgttctggccatacctcttacaaagctcgggcgcaaaaaaatgtaagttaagtctcaagtctcataccatttcttaatctgcaatgttataatgacaactgaccttatattttcatgtggtttagtgtgagaagaccgaagaaacgactcctgatttccttgtgctcttagatgagacacacagaaaagctgataggactttcattgatggaaagtcccaagagatctacaaggaagtgtcatccaggatagcagaggaagagactcagctgtgttctggggagagttcagagagcattgcttcaggtggattgtctgttcaagccatgaacatgatttatacccatgtaagctttgtcttttaattcattatagtttttgttggattaattgaatttattgtcttaactgctttgtatttgcgttttgtgtatggtgtttgaattgctttgtatttggctgttgtgtttttggtatgagattctcgtgatattaggcgatattgctttgtcttttgagttgtgtcattttgtctgaattcctttgtctttatatgttctaccacttacatatgattctgtttttgtctgaattgctttgtcttttgagttgtgtcattttgtctgaattcctaagtctttatatgttctaccacttacatatgactctgtttttggtctgataggtttgaattgctttgtcttttgagttgtgtcattttgtctgaattggtttttctgatttgcaggttgctccgaggaagaagggaaggatttatgtggttggttctctgcatcttgaagcatcctcagcccatacttgtctaccccttcctcgtgatgatccagttttactctctgagaagttggctgtcgctgaagcttgtattgcaaatcaggctgagaagatcaatagcttcggtgtctactttgactaccttgccgacaaggatccagtgtttgctgcaatctttcgaggcgcatcctctacaaggactaaacctactagcgccaatccaagacctgaggtggctaatctgagacctgaggtagctaacctgaggtgggcaacgagacaccaattgctgctgtgggcgctggcgctagaacagaagccggtacttgatcctctccatcagcaacattctaacttctaagttaatgttttccatgttttttggattatgttttatgactatccatcacgaataaaaacaatttcaatgattgtgatttgtaacggtattgctatgtaaaatttggtttcaaatttgggttttaagattgttttagaaaacataatgagagtttaaatatcagattaattagctaactcgagattaattaagccctaattacacagttaaacaacgataaacaaacatgcaaacgaagagcaaagtcctagcaaactctgtgatggatttacaagaaaaagaacacagaatcgcaattccctcgtagaagtgctaaggctctgcgaggacaaaaaaatgttgactttgtgaaaactggtactgtttaccgattgcgatgaaaacaacgtagtaaatccatcacaaagtatgctagagaattgcgaggctttcattttccaagtaatttaggacaaaattgttgcctcgcaatatgtgtgtaatttgcgaggcgaattattcttcgcaagttttgcgagggaattgcaatgttttcctttttgcgagacgtgatttgcgaggaattcttctgtgtcgcaaattccttgcaattggtgttttgcgagggagtccctaggaatttttccctcgcaaattatgtttgaactaaacgacatcacttattacagagacaaaacgacgttattttgtctgtcgaaacaaatttaaaccctaaatttccaaatcgatttcattatctcaaaacaggattcgaggactatcttgtttgggaatggacaaccatggcacggatcacaaggtgaaccatctcaaatttcgcagggagctccatctgcaccatctcaaccagctcaatttgaatgacttctgaaatcgattttgaggtaatgaaatcgatttggggattaaggtttaaatttgtttcaacagacaaaacgacgttgttttgtctctacaataaacgacgttgttagttctaacagaatagataaacgtcacattatatccgtaaaaaaaattatgttaccctatttaacaatatgactcaaatggcaagtcaacaaaacctttgtcatttatttagaaagtcaacaaatactttacgacttatttgtcttctgtgaagttcaagattaaatcgtcccaaatttgaaagttcgtgatttttttgacatttttcccttttactaataaggaaagaaagagattttcaaaaaagatatatgcagcatgtgaaaagtttggaaggtaggacttgtactgtttagacaaaattataagagaaggaaagagaccaagtaggaaagaagtatgtgaaagattttttcagaagaaggttaagtgaagagggattaaagtattttttgtccgtgaagtgttaaagtttggaaggacatggttctgatggtggtgttcctaatcgtatcaatttgaatcaagttccagaatatataagttgagatttttcagtctggaaagcatgaaggtgaagagaatctaaattacaacatcaaagaagaaaagtgatagagttaagaaccaatgtagaagctataacattttcttagaataatagaaaacaaaacagagcaaaacaaaaaaattattattaaaaatttaaacgaagagtttatagacttgactcagctacctatcgacgagtttgaaaaatgttgttactaacaaggaaagaaagggattttcaaagaataggtctaaaacatgtgaaaattttggaaggtaggaaatctatagcttagacaaaatcataagaagatggaaagacacattgtaggaaagaagtatgtaaaagatttgttcacaagaaggtgaagtgaagagggattaaggtgtatttggtctttaagcgttaaagaaacgtaacaaggacgtggtttgatggtggtgtttttaatcctatctatttgaatcaagttctcgaagatataagttgaggtctttcagtttgggaagcgtgaaggtgtagaggatctaaactgcatcaaaagagagaagtgatagaagctaaaacattttcttagaataacagaaaaacaaaacagagtacatcttgacgaccttgaaaaatgcttatatttacaagaaaaggaaggaatttttgaagaagaaatatggaacatttgaaaagtttagaaggtatggcatatattgcttaaacaaaatcataagaggatggagacaccgtaagaaaggatggatcaaagaaaacgagtgcttgcaaaaagatagggagagtgatagctcttcgtaaaaaattgtgaagacagaaattcatattgaaaagaatgtgagaaaaatatgagttgttaaaagaaagtgtagataagcttatgaatatacttctgtatagtatcttatttttagaagagctatactaagtaatgcagcgaagataaacgaaaattaatagtaaatttgcgggtaccaaaatgagaaagtcgtcgaagtttttccccatacaacaatttatttcatatgtaaaaaacgtcgttatcctaaatatcgaaagccaaagagtgatttatgaaccaaaataatgttcttttgataaatgttgtaaaacctaaaagttgtattaaagttagttttagttatatacttaaattgtaacaatttgtcatagtaattttaaaaattaaggagtttataatattaacaacaagtagacaggtgaaaacatatctttcaaaattttcaataaaaagttttagtcatacaaaaaaaatactaagagttttaaaaatatccacgcgtatcgtgggttcataacctagagaaagtttggcaatttttccaattagaacaagcaaagcatcattcgtttcaggaggtagaatactcgactcgaagaagtttagcacaaaacggataaccgaactccccaccgtatcccaacaattttgatagaaaaccggctgatatccatcgggccctggggctttgtattgtcccatgcttctaatcgaaatttccacctcacttgctgagaaaggttccttgagattcaacacctcctcccgtgtcactttctcaaacccagcatgaggcaacctgtcggaggactggtaaacattatccaaagagtagagatttgtgtaataaacaaccgccaagctctccaactcgttaggatacgtaacccatgtatcatcgtcattctttaaactttcaataagtttatttttccttcgaataaccgtacttgtataaaaaatacttcgtgttcctctcccccaaagctatccatttttctcttgatttttggtaccaaaggacttcctcttgctccaagataacatcaaattcttttcccagcctctcttcttcttcaagcagggcatccgtttggttcaaagcaagcaaatcttgtaccctttttatatcattggctaccttagctttccgcaattggacatctccaaacacctctctattccacttcttaattgtttccttcagtctttgtaaggcaactggagtagacacctccgtattccaagatttttaaaatggttcaaaaagacttacacgtattttaaaatatttacaaatttggttttaagagttaaaaaatgatttactaaagttttctaagattttataagagttttaaaaggattttaaaaaccatttgaaatatttttaaaccattgtaaaaggttttaaaatgatttacaaggattttaaaatacttacaaaagttttaaaacgggttttaaagtatttatatatgtattaaaagactttataactattttaagaggttttaaaatgagtttcaagcgttttaacaactttacaaagcttttaaaaagctttacaaggattttaagtgtttttaaaaggtccttaaaaaagttataagattttttaaatgcattttttttgcgggaaaaaagtttgttacaaggaaaaaattttggcgggatatttgtttttggcgggaaaaacgttttgacgaaaaaaaatttttggcgggaaaacttcagtttcttattacatgttttcattagatgcgggtaattttgtcgttttttttcaaaaaaaagtatttttaaaaatagccaatagaaaagtgtattattgtaaaagggtaataaaaaaagatatttttgtaaagccccttatatttatttcttttaattaaactaataattttcgtttgataaaaagattatgttaacacatcgtttcctattacaacttctttcaactcttacggtgaaatttcttcaaactgcagttcatagtgattaaaagttttaaacatcggaacaccgagtcaattgccagataggtaaaccatttattaaagagtatttttaatgtaaaaaggtgggaatgaactcgtatggtgatacattgataacactaatacaaactaatagactatatgttatggtatattataaaaaactagaattttgttttgtattaatgtttttcagtctcatgtaatcgttaagagataatcaataatcaaaagaataacattttgagttttcttaaatctaagttttcttacatggcataaattgtctggtactattgatttatttttcgtattttaaaagacaaaaactattacaaactattgattatttttgatatgattatattttctctgagtaactaattttttgtcacgcatattcattaccttgtaatcagaaataacataacacgatttaaaggaaaaccctttaattattaccaaaataaaaaaaaataaaaataaaacatcacttcaaaatttgaacttttaaaatgataataaacagaaatacaaattattaaattcttcaatcggataaaaaatccccataggactaaggattattggtgatgttaggcgcacaagcatcagcggtggtagcgaaacgattagtttcagactagtggtggctaccatccattgaaggaacgtccgcatcctcttcaacgttaagatatgggacaacacgaggaggtaaagaagaagaagactcaccattcttcttaaggtactcaaccctgcttttaaggctattgagatagtcatcaataacagaactcaaatctttgagatccttttcaccgagttgacacacattaatatttccttcgatacaaccccacataatttttcgagccttcataactcgattttcatcacgcaacttttgcaattgcgcttgtgctttttcaatcttctcacgcaaaaaagcctcttgatccatctttttgtgggtctggtctttgtgatggatgtttgttttattggcatataaattatttatatagtaaagaaaggtgctataacccattagggttctaatttctttgttggactcatttctttagattatgttgaatttcggatagagtatcaattccactccgacgtgtacgcatttgattgagtataaaacgatatccttttgattttaaagatacttgtaatctaatctatatattatacctttagaggatacaaagaccgaaaatcgaggtaataaaagcacatgaagacttgaggcaaataagacaaaatatgagttatatttttaattaggaggttaccttaagaagtaaaaaacacattaaagttaatttattatatttatagagtgcatatatttattgttattatttttatattaatataattaagaaaaaacagtaaaatagatatccttaattaaatgaataacaagaaaaagttaggtagtaggaaagaaagaaggattttaaaacaaaaagttggacaaaagacaaaatttagataatgtaaagatataatatatgttataaaattcaacacgacgtaatcatcgagactctttgttttggttcaacgatttttttggtttagatatttgataaattggcatagaagcctgattaatttggttttagttttttttttcctaacagcaaatcaattatatcatattatagaaatgttactagataaatgacaccattcaaatacaacaattgaaccaaataaaggaaataggtcataatttcgatgaataggtagaagtaaccctgatttccaaacggaagccttacatgcaacatataaaatatgttaagtcatctcgtgatatactcgtaaaatgctaacattttatagatgaaactctcaaatatttttttgtataactctaatcaaacaaacacactcaaatgttgcttgaaatggttttgaatcatgttttcttgtagcatccttgccatcgtggcgggttagtgatcatggttttttttcacacataacatgaatagtctgatcggaggacagcgagtgcatcaccatctgaccaattccttcaatcgaaacgatatgtttattgattacttaatcaagtacccaaatgactttcccagataacgtcggtgaattagaccaccggaaacaaactttataacagattcatcttaagtgaagccaatgcatcgaaagaaaaaccatgaatgaaagatctccatgattggaggaaattgctggaaacataattgtttccacttaccaacaaatgaattctcaattgagacttccaaaccaactcacttggatagatctgccatcaacactctgtggaccaaaaactacatggagaacatcgaaggtctccagtgatatctctattgcaaacaagtgcagttggaagaactacgctacgcgggagtttgttttttattgattatttaatataattttccgattttagtaatcacataaataactatacattgatgatattgatgcaaaaggactatttttcctttttacgtaagtgtttttaatctaaaattttgttttaataagtaagacaaaaattttgatataaattatggtgtaaaacatattaataatattatatatcattatattttagaaattattgcagattaaattatcaaaatatgtacatgttttggcttttcgatgtttgtcttatatatttttgtttaaaaattcctattaatcaactaaaacaatttcttaatacgtgaaacatattactaatagatttttatttatactaaaagaactattgataaacaaagaagtaaacactattataaaggccaagacttgtttgcccgaaaaaataacaaaaggtcaaagccaaacataaccatttgggtcgaccatacaacgaagaccaaatccacaaatccacgaaagacaaaggccaccctgcaaaatgaaaagcaagatgcagatttttacttcgagaattttgatctgatctgatctgatttatgtgatactcctagtgatttttggggtttgggaaatcaatccagtttagcagacgtggtttggaagccgagtagctggtttttttctatcgattaaggggaaacacagagccattcaaatgagagatgaggtgtgttggaccgtacattttttcaaatcgattccgccgaatccaggctcatattgtcacaatctcaagaaatcttatctgtatcatcatcttcaaatcctctgatcattgtatgttcacctattctttagattatagtcgattttgagatttagtctctcttttgatgatactcgctttgtggttcagatatattgtgattaattgtacatagcaataattttgatgttggttacatagttaattttaacgttgataaaattgaataaacttttatttcttgtcaacaatctccactactaaagtatgatgcttcattttttctttaccaagaacaatggggtaaaagatggaaaccttaaaaacttgaatatcatctttgggtattgaagacactaacgcaaacgctagctacaactaaggaacatttgcaagaagtttacatatggcagataacaaatatattcttataccaataattttgatgttggttacatagttaattttaacgttgataaaattgaataaatctttatttattgtcaacaatctccactattaaagtatgatgcttcgttttttctttacctagaacaatggggtaaaagatggaaaccttaagaacttggatatcatctttgggtattgaagacactaacgcaaacgctagctacaactaaggaacatttgcaagaagtttacatatggcagataacaaatatattcttataccaataattttgatgttggttacatagttaattttaacgttgataaaattgaataaatctttatttattgtcaacaatctccactattaaagtatgatgcttcgttttttctttaccaagaacaatggggtaaaagatggaaaccttaagaacttggatatcatctttgggtattgaagacactaacgcaaacgctagttacagctaaggaacatctgcaagaagtttacatatggcagataacaaatatattcttcaggtaaaatatagatgacatatataaatcttagatttatacagaatataataatttttgaacccaaattgaaagaaagttaatttcattaataatataaaattaaatatcgtatctggtaagaaaataataataataataataataataataataaacaatcgtatatggttatactatgtaggtagcccgttgtaaatttccttgtaaacaatattttttactgtcttctctgcatcattatgtggttttagaatggttagacctgtaggaaatgttacacgtgaaagcgccacatacaactggccatgactgaaaactagttgtggtaaatagagcagcaacgatttcaagctttgtccttggattttgttaattgtcatagcatagcatactcttactgggaattgacctcttcgaagagagaaaggatgctttgtgtcaggtggtgataaaattgtatgtggtagaatgacctttcaccagcatgtgtacctgtgactatttcgccctcaatcaatcgttttcccaaacgtgttatgattaatcttgtaccattgcatttgcatagatcctctttttgattaaggttgcgaagcagcattattggagctcctactttcaaagtcaacttatgtttcggtagtcctcgaaattctagtgagtttaaatactcaaccgtgtataaggactcatagtctgtagatattgtgtcagctttgcctatattgtctgagctaaaatatttatttgatgttcttggcagttgtgttaacatgtaattagtaatctcatcgactgtctcgtttcttggtgttaagatcgttctctctgtaatgtttgcataagtactttctgataaactcttatctgcatttgtggcttaaaatatatatcctgcaaatgatgtccagttaattgcattatgaacttaggatcaatgtcctttatctgaccttcatcttcatgtctttcttcacttgtggtggttgcatttccatctccaacgcttagtagccatgtagcaaaaaaatttttcttctgattcttgaagtctcaagttttgttttagggagtagactttgcaagagtcccacaagtacgattgtttaattgatgctaagattgtatcggctcgagaaccttgtggaataactggtagcgtttgtctgaagtccccacctagtagaacggtcttgcctccaaaatgttggtccttagcttctgttttttccatggacatcaaatctcgtaatgttttgtctagcgctttaaatgcgtacctatgtgtcatgggtgcctcatcccatatgataagatctattttttcaattaattctgcaagcatcgttcctggccttatatgccatattgaatcttcattgacatccaagggtatcttaaagcgtgaatgtgctgttcttcctgcatgtagtagtaatgttgcgatgcctgacaaagcgactgggaggacaattttcttttctgatcgcaacatagaaatgatggttgaatagaggtacgttttccctattccacgaggaccatatagaaaaaataattttcccaaaccattttcaactgactccataactgcatcataaacctccttttgttgaacattcaaagtgctgaaaagtttgatgtgatctttcttttccttgtgtacattgtattgtgactcttgggttaacaggctgttacctagttcattgataacgtctaaatctggtttaggcatatctttgaactcagttagtgagtgttcatattggtgcattaccttctctacctcaatcaaagtgtactgctgaagctcagattcttttagtcgtgatcttttaaagtaatattcgaggagctgaggaagaagtaatattaaagtgctgtttttccgaaatcttgggtggtgatgatagttgaccaaagcttgaagacgcatcgaaatctcaataaagatttcataggtaatcttaagagtatattaatctggagattaagaggaatgtaaatcggtttcatcggctagattgctgtcaaaatcggacagaagctttgtttctctataaaaccctaaaactatatttttttcctctggaataaacaatatcaacatatacatttttggtaggatttttggccaaaaatccctcacctatttactaatttcaatattaatccttacaaatttaatctcagacaaataatttataactaaaaacttacaattggttgaattgcattaattagttgaattaactctttcaaaattaattgctaatttcctaaaatctctccatcgacattaaatataaatatatgattttcattcatttttatttgttcttatatctaaattatttgattttacataaaatagatacagttaataaaatattagattttttctacatatgatgtaattcaaatttttaaaaacagacatatattactccatcgatgaagaaaaaatattagtataaaaggtcccacattgcttaagaaattgggcaatgtttcagagtcttattataaaaagaatcaatatgattttgaatatgaataagtcgaaagcttgatttatcagacatccaaaattaaaagtgttattcaggttactttgcttctttattttacataattgaatctttaaaaatttcaaaaattaataaatatttaaactttattaaaagttaaatattacaaattttaagaattttgaaatgttaaaatttataaaacattttaaatatttataattctaaaatgttaaacttaaaaaaacttttaatatcgaaaatgacaaaatgatgtttaattttacgagacggagttatatggtgggatgagtttgggtcaatattaagacatgatgatatatactatgggtgaaatactagaattaaaaaccaagatacaattatacaattttaaaaactaaccaaaactaacaatattaacagaataaatataacactaaatttcaaatcttttagttataaaaatcattccgagttctatcatacataaaacaaacaatagcatatatctatacatcatcttaaaaacaaaaatttatttttgataaaaaatatagacctgtgatatacttcttaatatattattcatatataaatatattaactgaaataatttttttaactttctaacaaaaatatcaagtcgcagtgtaccacgtgtcagtctctggtaggggcagaaaatacacttcgatttctcctttttctaattaaaccaaatataacaaatttattttacaatattaatttccacgttacacattcattagataatacaagttttaaatattttttacctctaaaaaaaacaaaaccacaaaaaaagtaccgaactttaataataaattaatatacaacaaatatgagaacataaaacataaattatccaagctttagataaataaaaaatttaagaatatattattcatataccaataataattcctataaaaaaatatctataacttttcagtgaatatatacacccgcaccgcgggtcaatatctagtgaataagtaaataggagaaataaatggcaatggaatataaaagtcttaagaaaaatatcacaagaattgattttatagtgttaacaaaaagaattgattttatagattttatttaagaaatttttttaaaaacaatcattatcattatttaacagattttttttaaatggaatcaaaatgatagaacttctacaatatatacttttcggaatgaaatttaaattaaattatgatattgatttggtgaaattcatctttaagaaattgtctttagagtaaatttggaaaaataacctctttatgagttactaggttatgaaaaattgttccaaagctttgatgcccgtaatatacgaatgtgaaatcgaatacttgaaaaagaggcaattgctataaaggatctgcaaataatcgattttttgaaggatgtcattttctgggaacgattactcaagattctggtcgcagcagcagcaacaacgtgtttcttcgcctctcagtgaagagaacaactcgacggttcatggtagaagccttccctcctcttctctgactccaaccaatcaaaactctcaagcgcatgggacttcttctacacatcaaaatcaatcgcctcaagcttctaataatcatcctaatcctatatctgggcgtttcaacaacctgacacttgatgagttgcttgatagtcccggtcgtgcatctctgacgagagtagaccttaatcgtcctttggaaactctttggtaggttgatgtccttcattcgaacaataattaggtttctattatggtttaagggttaattgtgtagatgttttgtttggtttagcataacaatctggtaaaatgttttggtttctattatggtttagggttagttgggtagatgttttgtttggtttagcataataatttggtaaaatattttggtttctattctggttttagggttagttgtgtagatgttttgtttggtttagcataacaatctggtaaaatgttttggttttagatgattatactaattagtccgattgaattatttttttaggtttaacgaagacccttctgttgctggcactgtccgcagcatatttaagagagatttcaaagaaccacatgttaattggacaatgacaccgcaactagtgatcactcgttggtttgaaacttttgcggtaagtgcaattggtgtcttgttatcttgtgctaatttagaaatttgagtgctttgtatttggctgttgtgtaaagatgatgtgactatgttttcttgtgttaattttttgacttgattgcactttttgatatatcttctgtctgttttgtagcaagtatacaactgggaccgtgcaataaactagagagttaggatatagtttgaagcaaagctgaaggataggatgtgcgatcaaatctctcactgtaagggaaactggaagcttgataacattgtattttactcattctagacatgtatttatcatcatttagcttagtgatcactcattatttcatatcattttgcatcacatttagcttattttgcacacctaggcatttaggatcatcttgcatacatattgcatgttttggtgtgttttcaggtgcagaaggagtttacaaggattatactcgaccctctactctatcaagccaggagggaagcagcagagcaaccactcgacctttttactcgatccaggcagccacagaggaggcagcagacactactcaaccctcctactcgatcccctactcgacccaatcactcgaccaaaggcgacctactctaaaagacttgttgatctatcaaagcgtcttctgatcctcctcattctccactcaaccagacatcttagcataagaataggagaggataagcatctactcgaccaattgatcactcggaacatggaggcaaaggtgcagactttacagcaccttgtttactcgatccccaagatcgagcaatcgtccaaaccgcctcaactctcttgtcttcaaatgaatctagggttttcaaaatttagtataaatagatcactttgggatttgtccaatggatctagcttttatctcttagtttttctttgtgttcttgaatcttcaaaacttaattactcttaatatattttgtttttgcacttagttccttgagtaaagttgtttagcttgtttagatctacattttgatatgatttttgtaatttctgggtttgagttcttagttatgttgcttgagtagtgattagggttcttgaggatggattagattagggtaatctctaggttagttaggtggttaagattaggttagatcccttctggattcgttggcccctatgcggttttcgctggctaatgtggaaattctaccataggtatccagcgtccaaaagacgttcaaatggatgcatgatctacgaattccggagatttgtagactctataccaagagattggctagactgcttattgactttggtagattgttgcttaaaccttgttctgctatgtttcatcaacgagagttgagattaagaagtggtagagttgtgggggtctctgtcacaagagtggattgacctggtttttgaatctatcgtctagggtatctgcctttcgcctgttagccacctgatgaaccctagagttgcccttatcaatgaatccatccctagaacttctattattcttagatttatttgtattcactccttgattgcacttttatttacctgttatttgtgtcacctgttgattgcattttagttcttaaatttgttgcctgttggttctactcgacccaatgatcgagtagggcttttaagttcttatttttgttgtttgaatcctgacctaggattgttactagaaaccaaccatttctataatctggcttgacttagttgcttttatacacatctcgattgctagcaataacagtagactggattgacaccccctatagctacattgacgtgttagtgttcaaggggaattgaactgaacacaccactcttcagcacataagtaggcctaaaaaacctacttatcaatttggcgtcgttgccaattcattgttgcattgttacattcaagatatcagaaaaagttaagatcaagttcttttacatttttcaagttactaactcatcttttcgtctgcatgtttttggggtataggtactaatctttgtgcatgcaaactcggtccaaaggttctgcacacatactaccattcagagacagaattgacagaatagctcgtgagtgacaagaaaccaaagcaaaggcagcctcagatcagcaaagaccagctgctatggatcaacaaaatagaccagatgatgttcaagacccacctaatgttgatcaaccaagaaacattggtgctggtgatgccccaatgaatcatcaccaaagacaagggatagtgccccccaccagttcagaacaacaactttgagatcaagagtggtctcatctccatgatccaaggaaacaagtttcatggcttacctatggaagatcccctggaccatcttgacagctttgataggctctatggcctaaccaagatcaatggtgtcactgaagatatgtttaagctcagactttttcccttctctttgggagacaaggcacaccactgggagaagactctgaccccagactccatcacctcatgggtcgattgtaagaaagcttttattgccaagttcttctctaatgctcgcacagctatattgaggaacgagatctcaggcttcacacagaaaaacaatgaaactttctgtgaagcttgagagagctttaaaagctacaccactcaatgcccccatcacggttttaagaaagcatcattattgagcacactctacagaggagctttaccaaagatcagaatgctactcgacactgcctcaaacgaaaacttcctgaataaggaagtagcagaaggatgggagttggtcgaaaatctggcacaatctgatgggtgctacaatgaagactatgatcgctcagtgagaggaactagaggcactgagaataaatagagcaaagatatcaaggatctgaatgaaaagctagacaagctgttagactcgaccccctggtagagtagatggttctatgacttcaacaaaccactcgaccccctggtcgagtagatggcctcatcactgcacatcaccgctcgacccccaggtcgagtaccaccaagacaaccactcgatcacatcactcgaccccctggtcgagtatcatcacgtccaccacatcaccttcactcgatcatactactcgaccacatggtcgagtacctacatcacctccagctcatcactcgaccactcactcgaccacctgggtcgggtaccattcttaatccgtcccaatactgcgtcgttttgagtattagggttttgaaatatttcgctattagtagcatgtactttatattttcgttattctaagttttattccgcatacactgtgttcttgacattttgtaatccggatttctcttaatctatttagtattcaggatttgcttttgatttcatttactaagttgttcatcttgttatcatcttgccattactctgttgctatcatgttttcattctattcatcgtttatgatttctactatgatgtctgagtagtgaataagtttttgaggatgggttaaagtagtttagaattctcagtatgctaggtggttgagtttgatttatagatccttctggattagttgttcttaatgcctattgctttctgatcaactggaatttgagcccagacatttccacgcccaaaaggtgttcgatgaaatatctgaaccactctagagattcgtggctctgtaccaaggtattggttgcagggagcgttttggctttaacttgttgatttgtaatgcctgttaggttagctctcgtcaatggtgattgagtctgggacaggtttaacttgagggtctctgttgcggtggcacttagatttggttatcgaacttgtcgtctaggaataatttattgagcatgtcaatcacctgtaaactgaggaaacaaaactactcaattaccccatcctcgggaattttgcatccaattgatttctttgttaactctgctattgtttactgcatcttgttacttgttacttagtttttgtatttttctcctgttactcgaccttatactcgatcacccagttgtctggcaacagactgtgcagtggagtatctctgttacattttctgtctattacttcacctgtcactcgaccacacccagtgcttggcaacaagctgtgttggtctagtgtttttactgttctgcttaaatttctgttttctaaatgttcacttagaactactagaacacacccaaacctattattggttggcttgactctgtgaactctgattgcatcttgattattagcatcacacccatttggattgacaacctaaaatactacaacgacatgattggtgttttaggataattgactaaaaacctattatcaatgtgctacattcagaaccaaggagggttcaacaagggctacaacaactacaagcccaacccaaacctctcctacagaaacactaatgtaggtaactaaaatctacaaggagagaactaagcttttccatgacaagaggatcatcaccaaggatttcgaagttgttgattagatgctgctattcaactctcgcttgaaactctttcctggaaagcttaagtctaagtggtctggtcctttctgtatcactgaagtctgtccttatggagcagtcactctagctagtaagagtggagatttcacagtaaatggtcaaaggctcaagaaatactaagcagatcaaatcctcccagaggtgacgtcggttcatctccaggaacttctaaatgattaaaggagtaaaggagtcgagctaatgactttaaacaagctcacttgggagaaagtcccatgactatctctgtaaataaattttttacttcttgttatttttcatttgttttcgttgtgtttatggttctcaggaacaaagaaacaacgtggagatggagtaaaaattcaaaacttttactctacagaaggcctggagatcgagtgtattgcccagtggagtgcaaaatttttaaaactttctgttgcacctggagaccatgaattcgagtatatcagtcaagtatatgtgaggtttaaaacccatattttttaaatcatcattatactcgaccaacaagagctacagagacttgtagggagtttatcaaatttacagaagatttcctaaagttttcccagtcaacagggaacaaagtccaaagacaagtcaacagagtgtggaccacgcgttttgttcctgaagaaaagatggagagagaatcacataatcaatctccaccacaccttttgaactcgaccacacattccctaaaagtaaaacctactcgacccatctctcttcgtctctccaccgacactccaatttctctactccaccacgaatcgccatccctcaccaaagagccagtcgactcaacttcactcgagttcgtcgctatactcgaccatttcacttcgccgttcgccgtcactttgttctcaccatactcgaccttctctcagtcgccatagtcgagttccccacctcgttcaccgtcgaagtctcatgaactactccattacaaccacaggactcgaccgtcgacttatggtttcgtccctaccaattctgactcaccgaagaagtactcgacctctggacttcaccggctgaactcgacctcaaaatttcactcgacctctggtgctagcaatcaacagagccactcaacttcagagactttactcgaccaccggtctctaatctactcgatccaattcgtgatagagtaactggggagcactttagtttactcgagtattatactatactcgaccaaattggtccatttcattgcttgttgattacaattttggtttcattgttatctttgagacagacctattgacatttgagttttgagttctaaatcttctgcaggacaatcatgagtaattatagtggcagttcttcagttgatcctgactacaacatggatgagacagagtcgtcgtcttcaaggccagagagagaacatagagaatatgatagtttcagaagaaaagctgagatagcccgagggaagagagcaatgacaaagagatatgagcttatagctgaggatctggaagacgagtacatgcctgagcatactcgaagagccaccaaacttctgcataaacctgatgtattgtttgttgaggaatatattaagctcttcaaattgaaagagttctgtagcacaaggtattcatgctcgaccacactcgcacaacttggattgctggaggatgttcagcacttgtactagagttgtcatctggacactttaatggcttatccgtatgtagcatatgaagaagaaacgattcagttcctctccacactgcaagtggagctttaccaaggtatgacctttgatgatttggaatgcgaaggattgggattcttgagattctctgtgtatggtcatgagtataggttatcaatcaagcgcttggaaggattgtttggtttccccagtggaacgggtactaagcccaagtatgatagagaagagttgaaagatttagggatcaccattggcaactctgtaccgctgaattcttccaggtcaaagagcaatcagatacgcagccctgtcatcaggtacttccagcgttctatagccaatgtcctctactcccgagagatcatagggattgttaccaattctgatatggagatgatcgatatggctctcaaaggcactctccgccaaaccaagaacaaaatgtctctccaaggtgaaatcaatgacacacctctctctatacttcttctgatccacatgtgtggatacaagagaagggctgtcagcaataaccacaagagagcacgaggcgctctttgcataggcggtgttgtgacaccgattctgatcgcttgtggagtcccaatcacatctgatggactcgagccacgggtaatggatattaagcatctacatcacttcgaattcctagagttcgcaatgcttggcgaaatgcaccgtttcaagtttgagcactctacggataagagagccaacatccttctccccagcccaaggttacacgcataatagagggagaaaacattaattttaggcctgagcttgggaacctatacaatgaggacgctccgccattgggtgaggatgatcttatagaagaagaagctgaggatgggatggatgaagacagagaagtggagcttgacactagcatatatcattgtagtgaatatgtacctccagcgagggagagcaagagcttgagtgtaacaacaacaagctacagaagtggtgcaagaaacaggacaagctactcgccaagtgcttcaaaactatcaagttcctaatagataagttgagctgctcctcttccactacagttatcccacagggacaccctcctctagacatgccattgaagagatttgatgagcctgagccaagtcaacacaggcctgagcctagtgagcagagagtctcacatgtccttgctaggcatttatcattcgagtcccgggagcacaagagaagaaggaaggctacactcgttcgctctagcagcaaatcacgccttatacacttgaggagatcactcgaccgtggtgctggccgcagtagaaggagagaggtcgagtatcctcagagcgatgttggccgccacatagttgatggggtcgagtacccacatgctggagctgacacagaacagggcggctcatctatggcctgggagaattcacaagcagccattgacgaccaactccgttcattcttcgactgaggtaagcgcctcacttcaccattgtattatatcatctcttgtgatttgttctttattttgtttctgtgattggatttatcctgaatactctcttccatgtttagtcacacagtggattgtgtgatttaagtttgggggagggttcaagaagtgagtgttgcattgtttatactcttgagtctgcactcatctaaggcatagaaaaacgaaaaaaattttaaaaaaattcaaaaaatgatttcacaaaaactgagtgttcatgtagttgcattacatttaggatcgagtctagaatgtttcatttaagattgttgcatatgcataggggataatgatgagatattcttgtaagcattttggttcaccgaataaactcagtgccctcgttgctagttatttgttgcgtagtcagtgaaattgaagtaaaactgaaccatgcctagattgctctactcgaccacactgtcatgatctgatgcattccctatcaatttgaaccttaatctaatctttaactatcatgtctgcatcaaatttgaactcatgtataccctaaaatacttggattttcttattcattttgatcactcttgttaatccaagtagctgactctccttattagagtagttaacccgagcccaaacctagactttctttcaagccctatatcacttgtgagtgtttgtgaggtcttattccgattaagcttggtagaaagtgttaggttcgtaacgaaagagatagtgtctcatgtagttctagttcgcattttccggactagataggactaggtgggcgcttatactttgggtttggatgtgtctaaaagaaaaaaaaaaagggttgattcattgatgaaaaaaggtaaaagactctaggtgaagtaagctaaagaagcagaaaaagtctagtaaaggttttgggatttgtaaagaaaagaaagagttcttgttagctattgaagaagggcaaaagccctcggttttaaaattctaaaaacaggaaccatagttgttaaagaaatccaaatccgctagatgtatcaaagtgttgagaaagcttctcctagagttaagagaaaataaaaaaatgattagaaaaagggcttaaaagattcatgaagcctattctgtaagggactatctttgtctcttgacctttaccttagccaaatgaggtcattgatgatgcattgtttgattcacgttccagaactaataaatgttaaagggattggtagatttgaaaacatgtgtaggtcgagcataagagtcggattgattgataacaaggcatggctaacgtttttgagtagaattcgatcatatcgcaacttagaactatcaacttggacattgatttcatctgatttatctggtgctttggctctgagtcccggccttcaaacctcacctccagcttgttcttaattgtttacttgagggcaagcaaagattaagtttgggggagttgataagtgtgcattttacatattgtgaacatccatttgttatcactattgcatcatatcaccactgatttataccatttctcatcatttgtcatcactttgcatgtttaggatagttttgcatgtatgatgcatatttgtgttgtttttaggtgatttggagctgttggcgagctaattggaagaagcggacctgatcactgcaaaacactcgaccccctggtagagtagatggttccacgacttcaacaaaccactcgaccccctggtcgagtagatggcctcatcacttcacatcaccactcgaccccctggtcgagtaccaccaagacaaccactcgatcacatcactcgaccccctggtcgagtatcatgacgtccaccacatcaacttcactcgatcacactactcgaccacatggtcgagtacctacatcacctccagctcatcactcgaccacctaggtcgagtaccattcttaattcgtcccaatactgcatcgttttgagtattagatcccttctgggttagttgttcttaatgcctattgctttctgatcaactggaatttgagcccagacatttccgcgcccaaaaggtgttcgatgaaatgtttgaaccactaattacagagatttgtggctctgtaccaaggtattggttgcagggagcgttttggctttaacttgttgattcgtaatgcctattaggttagctctcgtcaatggtgattgagtatgagattggtttaacttgagagtctctgttgcggtggcacttagatttggttatcgaacttgttgtctagggataatttattgagcatgtcaatcacctataaactgaggaaacgaaactactcaattaccccatcctcgggaattttgcatccaattgatttctttgttaactctgctattgtttactgcatcttgttacttgttgcttagtttttgtatttttctccttttactcgaccttatactcgaccacccagttgtctggcaacagactgtgcagtcgagtatctctgttacattttctgtctgttactccacctgtcactcgaccacacccagtgattggcaacaagctgtgttggtcgagtgtttttactgttctgcttaaacttctgttttctgaatgttcacttagggctgctagaacacacccaaacctattattggttggcttgactctgtgaactctgattgcatcttgattattagcatcacactcatttggattgacaacctaaaatactacaacgacatgattggtgttttaggataattgactaaaaacctattatcactgtgctacattcagaaccaaggagggttcaacaagggctacaacaactacaagcccaacccaaacctctcctacagaaacactaatgtaggtaactcccaagatcaagtgtatccaccacaacaaaatcactctaagccatttgttaagtacaaccaaggttatgtccctaaacaaaagtttaatggaggctaccaatagcagaatccaccaccatggttcactcaacaaccacaacaaaccccagcggctcaagatcctgaaattaagcaacttattcaacaaatcattcaaggacaagctactggagctatggcttttgacaagaagatagctgaattacacaactagatcgattgttcttataacgatctaaatgtcaagtttgaagctctgaattccaaagtcaagtatgtggagagtcagtttgcatccacctctgctctgaagcatcctcagcaacttcatgggaaagcagttcagaatcctaaggactatgctactgcaaatgctatcaccatccaccaagaagatgagtctccaccaagtcatcagattcccaatattgaggacagtatgattcaagaaggggggattcaactcaaattgttgcacctgccatccaacaattcatctggactatagagcacacacctttgctgaatactcaccactctgaaaaacatttcaaaagagaaaaactcaagaaggatcagaattaagagatgattagtagagtcatcactcaagaagcttacaagaagaaagtcatccaagaaaagcttagtgatcccgtttcattcactctgccatgctctctacgaccattgatattcaataggtgcctttgtgatttgggagcatctgttagccttatgcctctctctacagctaaaaggctagggatcatggaattcaagttctgcaacttagctttactcttagctgattgttctgttgcacatcctcatggtctaatagaaaatctgcctatcaagattggaaatattgagatacttacagattttgtggtattagacatagatgacgagggaaaggatcccctgatcctaggtagaccattattagcttcagctggagcagtcatagatgtcaggaatggaaaaattgatctaaaccttgaaaaaggtatcaagataagatttgacatcagcaaagcttcggggaaatcaacaacaagaggtcagaatttggggattcaggacatggatgctgatgaggaaacagaagctggaaccccaccaagagttaactatacttctcaacttagcaagctgaagagaacttttgaccacaagaaaagagcaatagaagggttagctcagactgaatatcctacaaaagataactggtatgagatgagaaaaaaaattaaatggcaaagcagagttatagagggattatcttcaagggtgatgaagctgaaagatcaactatggatgtttgaaaaaagagttaataagttttcaatgagtattgatccagagaagatggaaactgcactagctatcaaagaggacgaagatttcacggcagaatagtttgtgataagtaggtttttacgcttacttatgtgctgaatgtgaggttcagttcaattcctcttaaacactaacatgtcattgcagctatagggggtgtcaatccagtccactgttattgctagcaatcaagatgtgtacagaagcaactaagtcaagccagattataatgatggtgggtttctagtaacaatcctaggtcaggattcaaacaggtaaaaacgagaacttaagagccctactcgatcattgggtcgagtagaactaacatgtgacaatattaagaactaaaatgttatcaacaggggatacaaataacaggtaaataaaagtggatttattgataagggcaactctagggttcagcaggtggctaacatgtgaaaggtagataccctagacgatagattcaaaaaccgggtcaatccactctcgtgacagagacccccataactctatcacttcctaatctcaactgtcgttgatgaaacatagcagagcagagtttaagcaacaatctaccaaagccaataagcagactagccaatctcttggtcaagtatacaaatctctggaattcgtagatcaaacatccatttgaacgtcttttggacgctggacgtctatgatcgaatctccacattagccagcgaaaaccgcataggggccaagcgaatccagaagggatctaatctaatcttaaccacctgagtaacctagagattaccctaatctaattcatcctcaagaaccctaatcactactcaagcaacataactaagaacacaaacccaaaaaatactgaaattataccaaaatgtagatctaaacaagctaaacaactatacttaaagaactaaatgcaaaaacaaaataaattaagagtaattaagttttgaagattcaagaacacaaagaaaaactaaaggatcaaagctagatcctttggacaaatcccaaagtgatctgtttatacagaaatgttgaaaaccctagattcactagaagacaagagacttgaggcggtttgggcgagtgctcgatcttagggatcgaataaagagggtgctgcaaagtctgcgcctttgtgtctatgctccgagtgattaattggtcaagtagatgcttcttcctctcctatccatatgctcagatgtctggttgagtggggggatgaggaggatccgaagacgctttgatagatcaacaagtctggtagagttggtcacccttggtcgaataaatgggtctagtagaggatcgagtaagagggggcgagtagatcgatatgcttcttcttctaaggctaccttgatcgagtaagtgggtcgagtgaattaatgcctcctctatggctgcctggatcgagtgaatgggtcgagtagcatgccctgctgcttctctcctagttggatagagtagagggtcgagtagaatccttttaagctccttctgcacttgaaaacacaccaaaacatgcaatgtgtatgcaagatgatcctaaatgcctaagtgtgcaaaataagctaaaatggtgcaaaatgatatgatacaatgagcaaatgcacaactaaatgatgataaatacacacctaaaatgagtaaaatataatgttatcaactcccccaaacttatctcttgcttgccctcaagcaaacaaaaaattttaagttgaaggagaggtttgaaggtggggattcaaaaaccgaagaatgcatatagaacgggtaagctcaatgtccaggtagctaattctaggttgcaagatgatagacccttacttaaaaacgttagccatactcgtcacaatgcaacctgacaacctgccttaatatattcaagcattcacatcaaccaattccctttaacattcattaagcacgaacagtggatcaagcaatgctatggttatgaactcacttggtttcgggcttaggctaagagacaaaaatggtccctctaataatttggtcgagtaacaggggactctcagagaaaagattgagctttagcagaatgctaaaggtaaaacccaatggacacatacaagaatatactcccatctacccaatgatatatagtatgatagctcagaaaatgatccatgtcccatagatgtcctaactctacccttttcctcattctttctttctttttggttcaagttctaaggggttcttctttaaaaatgattcaagagtctagcgggtttggttttatactttgacaaacttaagacttttcttctaatcttagcatagagggcgctttacccttttctttgaatcacaatgcctaacttctttgaattccaaaccctttactagactaacactgttgtatccccctttagaactctaaactcttactctcttttttttcttttttttttcttttcattctcattctctttccaattcattccataaacaatcccaatcccaaatacaagtctccacctagtctacatgaaagactgctcttgttggctcatacctaacacattataccaagatcaatcgaaaaagacctcgcaatcacacacaaatgatctttggcttgaaataaggctaggctaagggtatgggaaactgctctaaaaatgagagtcagctacttggagtaacagagggtggtgaagtgaataagataatccaagtatgtatatggtagccatgagttcacaaacaatgcatagacatgataattgcaaattcagttcaggttgtaatagataggaaatggcatcagataagcgagtttcgaatcaaagcagtatagtcaagttacaaattcaaagcagggtgcagtcttacttcagagaaacaatcggttatgcaacagagaactaacaacctgcgcattgaacttacttcattgaatcaaaacatgcttaacggtttgaaatcatcattatcccatatgcaaatgagcaatcctaaatgcaaacacactatatacaatcctaaaatgaaatgcaatctacatgacactctatttttgtgaaatcattttctgaaattttttcaaattttatggttttttctattccttagatgatgcaaaatttgaaataagaaaagagaacacaatgttaaaaatgccttgaaccctccgccaaacttaaattatacagtcccttgtgtaataaaaatctgaaagagaattcaagaccaaaacacaaaacacaagaaaaaataaaaatgatatggttctttgtcttcttctttgatctgattcagttctccttctttttcgatctgatacagtacttctttgtcgttcatcttcgagccaattcaattaagttctcatctctcttcctctctttatttgattcatatctcttcctctttcttcttctctcgaatcttcgttccatctctcttcctctcttgaatcttcgatccatctctcgaatcttcgatgcctaacgccggtcatggaggatcccaaaagcggaagacaacccctaactttacccagagagccggaggatcaacgcctggtggaagacctgcttcgctacttcagcagtacgacttcactctagcaccagcggttcaagttcctgcgacgcaaccgcctcaagtagccgtcaaggaactgttccagagctccaccactaagcgtgtagatccaccaccgcgatctgaagaggtgcactataatccaccaccacaagagcctcttcacctagtccctccaatgtctccaaatccaaacactaaggctcacagttatccatcttctcaaggcaacaacttccaagagggagctcctccaatgttgtcgaagctccaagaagacttggcctgggctctcaatgacatacttatggtacctggcagggaaatgtggaccaccgtactatctcctattactcgaccaaagactgaatggtatgttctcttcctcaacctaattctcgttttctattgtcatctaagtttatatgttgtgttctcttgctctattgtgaaacgtagtaaactgttgtgctctgttgtgttggcttgctctcttgtgttcgcttgatatcttgtgtacacttggttagattatgttctgttgttttcgcttactctcatgtgttcgcttactatcttgtgtatgcttgctctcttgtgttgtcttgctctattgtgaaacatagttaagaattgtgttctttgtgttcgcttgctctcttgtgtgctcttcctctgttgtcatctcagttcatctgttgtgttctcttgctttattgtgcaaaaaaaagctaaaagagttgtgctctgttgtgtttacatattgctctcttgtgttctcttgctttgttgtcatcttagttcatatgttttgttctagactttctattgatttgtttcacttttgtgacatgtttttttctttcattatttcatgtgtttggaggtttactcgcgaaaggggatctcgattggttagaaagatcactagaatttttacacaaaaattcgatgctcccttctataactggtcatgtgtgccatttaataataataaaaagattatttctagagtttgcgataagctgtcattcatctccctaactttgttaactttgcagtttattctttcagattttcactataaatctctattttttttgtagaaaactcacatttggaatcccttaataacaaagacaatgcattattactttaatgagatctgtagacggtgcatgaaggacatggttagcaccacaaagacaagtcgagagcagcctccatggattggagaaactctatggaaaacaatgtgcgcttacaaggacacaaaataagcacaaaaaaggagtcggacctattccaaagctcgtctccctgattgtaacggtcttggtcctcacatccacttctctaggccaaagtcttatcaagaaatccaagacgaattggttagtgtttctgttacctctttcaattaccctcacatgtatgtttttgagattttgatatgtgtttaattggttacattgcaggaagagaaattgggaagagcagtcagtcttggtgaggtgttcatccagacacatactaagtcggatggtacttatgttgatcggaaggcggagaagattgctctaatttatgagcaaaatgtgaaagataggttgtccgaactagaggcagctgcttctgctgtctctgatggcttttcacgatctcgggatctcacaatagaggagtatacagtcatctctctcgaggtaagatgttgcagtctaagtcctagtctttgagtttacatattctatcactaatatcttcttctctatttcttttcagtccatagaaagtgattcaagaggcaatcattatggacttggaagtctgaaagacactttaggcagtgccaaccgcaagcaccctggagactcacccatcctttcaagctgtagaacggctgcaggaagcgcaatgcaaaattgaagagcaggctgcatataatgagaagcgagatgctgagattgctgctcgtgaagctgagtaagcccgagttgcggctgagcaaaaggactagctcgagcacttgtctttagtcgagagatatctgcgagaaacagatccgcaattcctaaacttcatgaccactcactcttctacatcgacaaagcctctagcagaaactcctccacataatgatccataggtttagattttccaacacttttcccttgaactttgaactaatctttcaagaagatgtttatgaacaagaataatgtgtgtttatgtatttgaattccaatgtttgattttccatttatgaatgtgttataatactttatagcatttcaaacaacaaacaagaacacaacccaattgcaaacaacaaacaagaacacaacaatcgatgaccaaattcttattcagacataaaacgtagtcgcaaaatagtactaaaacagtcgtaaaacagtcataaaattaacgtcaaatagtcacccaaattaccgactattaactcacaatggccataagtcgttcaataatcgtcacatagtcgtaaatgttttagtgactatgatacgactacaagaatcatacccacatacaatattatttacgtaacctagtcgctaaatagtcgcccaattatacaactataccacgactattatatactttttgtatagtagtcgtatatttgtcgtaaaatgacgactaatatacgactacacaacttagcgaatatgtattaacgactacggagtttagttgccttctagtatgatattttgttttacgactactgagcgactacctctgtagtcagtgatcgcctgttttcttgtagtgactagaacaaggttcggttactgtttcaagataatgtgttatattggttttcattgttcatgcatacaacatgaattgtgcttagaagttgttagatcgactagatacaagttcttgagaacatattattcatacaatctccacacaccactccttacgtagatgtgcatcgattaaccatatgcacaaatcgtagaatagaagaagaaaggaaaaatatagtaaattttggagacaaataaaatgaagatgactacaaatattgttgaatagggaagaagaaggaaaaacgagctgctagggtttagacgaaaatatttaaactacaatctttaaatcataataaaaactaaataaattacaattgaaacgtaatctataatacatatttagtttccttatttatttattcactttctatattcagagttttctaaaaagttcagaaactcatatctaaataatagtaaaatgtcagttctaaacgaaaaataacactttttaattaacattagcagacgatgaaataattcatagaatggctatttcaaagtatttagatcataaagtaaaaattttagaaatcagattttcggattctgaattattcaaaacgaaaaaaatctaaagttcatagaatctgtatagaaatgtaaaattcacagtctgaattttgtagaacgctagaaaacatgttttaaaaatttcagttaaactttatctatcaaattttttttttttaataaataaatagaattacacttcaaaacatttctattcttctgtatctaaatattaatgtgaatatttttttgaaaaaaacttaaaataagatgtataaatattttagtccaaattaaccttctcaccaaataagaatagatggacaatttttttttgtagatattcttttttaaaaaaatttcctaaaatttaattgagttttgaaatgaattatactttacggaacgaaaaaaaaaaagaaatgtcatgctttacggagttttgaaatgaattatactttacggaacgaaaaaaaaaaagaaatgtcatgctttacggtgtttaacgtaaaacgaaaacaaaaccgacggtgcggtaggtattgtggtaattattttgagtcatggagggtaatttcgtccaaacgtagttttaacatgcgtcggtgttcttcttcgtcttcactcgtcgtattaaaagcctcatgcgttccttcaccgagaaattctcacttcttcgctaccaaatctcctcttccccggaataggtgagttccgatctccttttcccgtttcgagaaccctaatctcatcatttctcaaaccacttatctgtctccttcctcgaattttctagatctgagcttcttctttgactattcaccgatccggatctaaaaaggtgtttcctcaatttgttaaaccagatatgaggtcaatggatcgatttgggatctgggttttggcgattttgttagtgattcaatcaagttttgggttttaccttcctggaagctatccacataagtatgaagttggtgattacttgaacgtgaaggtgaattcacttacttctatagaaacagaaatgccttttagctattatagtttacccttttgtaaacccagtgaaggaattaaggatagtgctgagaatttaggtgaacttcttatgggagatcggattgagaattcgccttataggtttagaatgtttaagaatgagagtgagatctttctttgtcagactgataaattgtctgctgatagtttgaagcttttgaagaagaggattgatgagatgtatcaagttaatcctatgcttgacaatttaccggcgattcggtatactaagagagatgggtatgttttgaggtggactggttatcctgttgggattaaggttcaggatgtttattatgtttttaatcatttgaagtttaaggttcttgttcataagtatgaagaagctgctaatgtggctcgtgtgatgggtactggtgatgccgctgaggtcattccgactattgggaagaaagattctgatgtccctggttatatggttgttgggtttgaggttgttccttgtagctttgctcataatggtgaatctacgaagaagttgaaaatgtatgagagatatactactccgattaaatgtgattccactagggtgtctatgtctgttaaggaaggtcagtctattgtcttctcttatgaagtcagttttgaggagagtgacatcaaatggccatctagatgggatgcgtacttgaagatggagggttcgaaggttcattggttctcaatcttgaactctcttatggtaatcactttcttggctggtattgttctggtgatattcttgagaactgttaggcgggatttgactcgttatgaggagcttgacaaggaggctcaagctcagatgaacgaagagttgtctggatggaagcttgttgtgggtgatgttttccgtgctccatcaaatgcctcgctattgtgtgtcatggttggtgacggagttcagattcttggcatggctgttgttaccattttgtttgctgctctagggttcatgtcaccggcttcacgtggaacacttattactggtatgctcttcttctacatgattcttggcattgcagctggttatgtttctgttcgtctttggaggacaattggttgtggcgaacaccgtggatggatgtctgtcgcatggaaagctgcttgctttttcccgggtattgcgtttctgatccttacaacgctgaacttccttctatggggtagccatagcactggagccattcctttctctctatttgtcatcctcctcctcctgtggttttgcatctcggttcctctaactcttatcggtggttactttggagccaaggctcctcacattgaattcccagttcgaacaaaccaaattccccgggaaatccccgctcagaaatacccatcctggcttctggttcttggcgctggaacacttccattcggtaccctcttcatcgagcttttctttatcatgtccagcatctggatgggccgtgtctactacgtctttggattcctttttgtagtcttgatccttcttgtcgtagtgtgtgccgaggtttccctagtgctaacatacatgcacctgtgcgttgaagactataagtggtggtggaaatccttctttgcatctggatccgttgcaatctacatcttcatatactccataaactatctcgtcttcgacctcaaaagcttgagtggacccgtttcagcgactctttatctcggctactctctctttatggtcctggctatcatgctcgcaacaggtaccgttggtttcctctcttccttctggttcgtacactacttgttttcttcggtgaaacttgactaaggaatcagaccagaggcttattggcttaaagagattgtataactttttggagagaactgagatatcgtttaagcaaaggcatcaatcaaatcattcaattgctccaacaaggaagtgtaagggttcattgtgtcatattggaagcttcaaattttccttttcatcgtgtaagaaaatttgtttcctctttcttgtttttctcatcttgttgcatcttttatggtaatgcctctgaacttgaaaatgtttatttttttccttaatgtttaagattaattttggttctgttcggttttgattactatagaatacacactctaccatgttggtgaccgttgccttttcatctcttgttttctagaactagaattgacattttggtagagatgttgtggtgggtaaaaaagctcagcccgacctgaatccaaaataaacccgtccaccaaaaacccaactttagaaaacccagatgggtttttgatatagtgggtaaagctccaaaaaacctgattgttacgagactacccgtgggtatccaacttagtttttatcatttttttagagtttatgtttaactgttaatatactattatatgtatgttatatctatattttgcttataaatatattttaaattatatttattttctgtattacatataaatttgatgggaaaaaggttgaattgcgtctttggcgggaaaatgttaaattgcgttttttggcggaaaaatgttaaattgcgtttttggcggaaaaatgttgaatatcatttttggcggaaaaatgttaaattgcgtttttgaccggaaaatgtgaaatctttttggcgggaaaatgttgaatgtcgttttggcgggaaaatgttaaattgagtttttggcgggaaaatgttgaattgcgttttggcgggaaaatgttgaattgcgttttggcgggaaaattttgaatgtcgtttttggcgcgaaaatgttgaattgcgttttggcgggaaaatgttgattgtcgtttttggcgagaaaatgttgaatgtcttttttgtcgggaaaatgttgaatgtcttttttagcgttaaactgttaaatcgcggttttggggaaaaaatgtgaaaaaaaaattgacaacaaaatgttgattcacttgaaaaatgacttaaaaaaaatccgtgggtacctataatccaatgaggtaaacccatatgggttttatttatttgggtacccagcccattttaaacctgtgttttttttccagaaaaagtagatgtatgggcttaaaattttatgtgggttttgggtacccagtgagttttaacccatcattaacatctctacattttggtaacaaattgaatcaccagtctatagaattgttgagtttgtgatacatttttgttatgaatttgagtaaagaagtaaacaaacgcgaaatagtagggaaaatggaaaatggaattttcatacccttacaatccgccaaatgtgtttttagacttaggcgctaaatgttttgtagctttttattggtttttagtttttgatttttttactttttattttgttgtagattttattttttgcaaaatcatgaatgaaaatttgtttaatttttagcttttacgtaaattgttaaaaaaaatccacaaatttgggttttagattctatgaagaaatagctaaaaacttctaaaatctggttttctatttcttaggaaatctacattttgtaaaatcatgaatgagtaattatttggtttttcaaaatctaaaaactattccaaaaattgcagtcattcaaggccttatccaaaaatatacggttaattttaactaaactccaacaaaatttgaatttcatacctaaactttatttagtatctaattcgatatcgtaattaaccgttacagttgcgaatcaactgacatatgtttaatagtatggcttaaaacgacatcgtgttgcttgtttaagttaacgtttgaatttttctacaaaaatcgggtctcgacaaatcgatatatttcgtaaacgagtgaaacgttgtgggtttaagatccgatttttgcagaataattcaaactttaaaacggttttttggccaaaacaaaaaatatgaaactaataataaaaaatgaaatctagcctctaggccacaaatatacatttgtccatcttttgcataatggataagagtacgacaaaacattgtggatatttattttctcccaaaagcattcttcttttaatttagtccattttatagttttttgtggtggccgttatttaaaatccagtccagaaagaaacaatgttgcattgattgatccaaggaaggagcaaagtagaggatttaacaatggcgtctctttctctcagttctgctcatttctcttcaacttcttcttcatctcgctcctctatatccacttcatcgctttctccgtcgtcaacttctctccctctcttacaatcaccgatccgccgccgttaccgctccctccgccgccgtctctccttctccgtcattccccgtcggacttctcgctccttctccacttccaattctcaggtacttcttcttacttaccttgttctcttcaaattactgatccaatccgtttcctcaaatgtgcttaattttacacaattcatgaccaattcggaatctgtagatggagaattactgtaatgtgttttgtatccgtttgtgaattgtgattgtatagattaggtgttcgataaatgagccgttgaaggtgatgatttcgggtgcaccggcttcaggaaaaggcactcaatgtgagctcattgttcacaaggtaatattttccactcttctctatcggtttcttgttttgagctcattgttcacaaggtaatttttttatactctttcatgatctcttttctggttgtcttatgggttctgactcatggtagattctctcttgagtgcggtgaagaatggatatgcatttaaaattatctagtatactgaacaatgcatataaaacgtttgctgtgactcataaaatcttatttgccatccaaaggttgctgaattttccttgatctttggactgttcattaaattattgcaataatcacagtttctagtacgtttgatgtaaggaagactatctatgttgccattgtttgtatgtcttgatttatatcaagtttctctttcttggtcatgcagtttggtttggtgcacatatcaacaggggatctattgagagcagaggtgtcatctgggacagatattggaaagagagcaaaagagttcatgaactcgggtagtttggttcctgatgagattgttatagcggtactgattttacttacctgtttcatgcattattttataatattactctgatatctactacctttctagatggtggctggaagattatcacgtgaagatgctaaagagcatggatggcttcttgatggatttccacggagttttgcccaggcacaaagtctggacaaactgaacgtgaaacctgacatttttatcttactagatgtacgtgcaaattactcttattgcgtttgttatccatttcagcaataggtgttgaaaccaattttcactatcagtggctatgtttctttgcttatatgtcattcttaatgacaggttcctgatgaaattctgatcgatagatgtgttggtcgaaggttggatccagtgactggaaaaatttatcatatcaaaaattaccctcctgaatcagatgaaattaaagcaagactggttacacgcccggatgatacagaggagaaggtgaccttttggacctattatttgcttttgaattttttaactaccgtcaattgtaatctcacaagtttacttcgttgaaggtaaaagcacggctgcaaatatacaaacaaaattctgaagcgattatttcagcatactcagatgttatggtcaaggtactaggcaatttttttttggtttcccttaacctttggttcttaaagtattgcaatgccatctttgatatttgtggtttggtatcatctcattcgaacacagattgatgcaaacaggccaaaagaagtggttttcgaggagacccagactctactgtctcagatacagttaaagagaatgataaagactggcaagtagtcacacatttatatatatatgtatattttcatggtgccgttcttgatagcagggtcagtgttttccagttcaagatgagtttccccaatctttgtaatcttaacttttatcttgttctattctaggttatttagaaaataccttgttcagtaatttgtctctttgcttccataggaaataccatcttttggttgttattagaattttgattctggtattctaaacaataatcttggttaaactttatggacacatgtaacatagaaagggagattcaggaactcccctagtgtgtttgaagattttattgtcaatcattatgttttaggactaaatttttccttttacttcttgtttaactttgatttgatgaccactgtatgcatgcgacgctaattctgaaacaggtccttgcagataaagcatctcctgttcaggtccttgaataatacttttctttgaagctatcaagtagctggaagtaaattgggagatattcttatctttgtcatgtaacatttctttcaggataaatggagaggaataccgacgagattgaataacattccacattcgagggatatcagggcttatttttatgaagatgtgctgcaagccacaattagatctatcaaggatggtaacacccgtcttcgggtgaggctaatccacacaatctatttgcaatgtcgcatgttatgtcatctttattttgcaattcctaaagcagctgcttgacgggactgatactgttacaaatgaataggtggacattaatatccctgagctaaatccggaaatggtcagttattcatttcactaactgttttatacgatttctaaagcttcataagttgtaccaaaaagcaagctattgtgataaataggatgtttaccggataggaaccttgatggaacttgttc

SEQ ID NO: 760 - DNA, 120067 bp, Arabidopsis thaliana
gaattctcaattgagacttccaaaccaactcacttggatagatctgccatcaacactctgtggaccaaaaactacatggagaacatcgaaggtctccagtgatatctctattgcaaacaagtgcagttggaagaactacgctacgcgggagtttgttttttattgattatttaatataattttccgattttagtaatcacataaataactatacattgatgatattgatgcaaaaggactatttttcctttttacgtaagtgtttttaatctaaaattttgttttaataagtaagacaaaaattttgatataaattatggtgtaaaacatattaataatattatatatcattatattttagaaattattgcagattaaattatcaaaatatgtacatgttttggcttttcgatgtttgtcttatatatttttgtttaaaaattcctattaatcaactaaaacaatttcttaatacgtgaaacatattactaatagatttttatttatactaaaagaactattgataaacaaagaagtaaacactattataaaggccaagacttgtttgcccgaaaaaataacaaaaggtcaaagccaaacataaccatttgggtcgaccatacaacgaagaccaaatccacaaatccacgaaagacaaaggccaccctgcaaaatgaaaagcaagatgcagatttttacttcgagaattttgatctgatctgatctgatttatgtgatactcctagtgatttttggggtttgggaaatcaatccagtttagcagacgtggtttggaagccgagtagctggtttttttctatcgattaaggggaaacacagagccattcaaatgagagatgaggtgtgttggaccgtacattttttcaaatcgattccgccgaatccaggctcatattgtcacaatctcaagaaatcttatctgtatcatcatcttcaaatcctctgatcattgtatgttcacctattctttagattatagtcgattttgagatttagtctctcttttgatgatactcgctttgtggttcagatatattgtgattaattgtacatagcaataattttgatgttggttacatagttaattttaacgttgataaaattgaataaacttttatttcttgtcaacaatctccactactaaagtatgatgcttcattttttctttaccaagaacaatggggtaaaagatggaaaccttaaaaacttgaatatcatctttgggtattgaagacactaacgcaaacgctagctacaactaaggaacatttgcaagaagtttacatatggcagataacaaatatattcttataccaataattttgatgttggttacatagttaattttaacgttgataaaattgaataaatctttatttattgtcaacaatctccactattaaagtatgatgcttcgttttttctttacctagaacaatggggtaaaagatggaaaccttaagaacttggatatcatctttgggtattgaagacactaacgcaaacgctagctacaactaaggaacatttgcaagaagtttacatatggcagataacaaatatattcttataccaataattttgatgttggttacatagttaattttaacgttgataaaattgaataaatctttatttattgtcaacaatctccactattaaagtatgatgcttcgttttttctttaccaagaacaatggggtaaaagatggaaaccttaagaacttggatatcatctttgggtattgaagacactaacgcaaacgctagttacagctaaggaacatctgcaagaagtttacatatggcagataacaaatatattcttcaggtaaaatatagatgacatatataaatcttagatttatacagaatataataatttttgaacccaaattgaaagaaagttaatttcattaataatataaaattaaatatcgtatctggtaagaaaataataataataataataataataataataaacaatcgtatatggttatactatgtaggtagcccgttgtaaatttccttgtaaacaatattttttactgtcttctctgcatcattatgtggttttagaatggttagacctgtaggaaatgttacacgtgaaagcgccacatacaactggccatgactgaaaactagttgtggtaaatagagcagcaacgatttcaagctttgtccttggattttgttaattgtcatagcatagcatactcttactgggaattgacctcttcgaagagagaaaggatgctttgtgtcaggtggtgataaaattgtatgtggtagaatgacctttcaccagcatgtgtacctgtgactatttcgccctcaatcaatcgttttcccaaacgtgttatgattaatcttgtaccattgcatttgcatagatcctctttttgattaaggttgcgaagcagcattattggagctcctactttcaaagtcaacttatgtttcggtagtcctcgaaattctagtgagtttaaatactcaaccgtgtataaggactcatagtctgtagatattgtgtcagctttgcctatattgtctgagctaaaatatttatttgatgttcttggcagttgtgttaacatgtaattagtaatctcatcgactgtctcgtttcttggtgttaagatcgttctctctgtaatgtttgcataagtactttctgataaactcttatctgcatttgtggcttaaaatatatatcctgcaaatgatgtccagttaattgcattatgaacttaggatcaatgtcctttatctgaccttcatcttcatgtctttcttcacttgtggtggttgcatttccatctccaacgcttagtagccatgtagcaaaaaaatttttcttctgattcttgaagtctcaagttttgttttagggagtagactttgcaagagtcccacaagtacgattgtttaattgatgctaagattgtatcggctcgagaaccttgtggaataactggtagcgtttgtctgaagtccccacctagtagaacggtcttgcctccaaaatgttggtccttagcttctgttttttccatggacatcaaatctcgtaatgttttgtctagcgctttaaatgcgtacctatgtgtcatgggtgcctcatcccatatgataagatctattttttcaattaattctgcaagcatcgttcctggccttatatgccatattgaatcttcattgacatccaagggtatcttaaagcgtgaatgtgctgttcttcctgcatgtagtagtaatgttgcgatgcctgacaaagcgactgggaggacaattttcttttctgatcgcaacatagaaatgatggttgaatagaggtacgttttccctattccacgaggaccatatagaaaaaataattttcccaaaccattttcaactgactccataactgcatcataaacctccttttgttgaacattcaaagtgctgaaaagtttgatgtgatctttcttttccttgtgtacattgtattgtgactcttgggttaacaggctgttacctagttcattgataacgtctaaatctggtttaggcatatctttgaactcagttagtgagtgttcatattggtgcattaccttctctacctcaatcaaagtgtactgctgaagctcagattcttttagtcgtgatcttttaaagtaatattcgaggagctgaggaagaagtaatattaaagtgctgtttttccgaaatcttgggtggtgatgatagttgaccaaagcttgaagacgcatcgaaatctcaataaagatttcataggtaatcttaagagtatattaatctggagattaagaggaatgtaaatcggtttcatcggctagattgctgtcaaaatcggacagaagctttgtttctctataaaaccctaaaactatatttttttcctctggaataaacaatatcaacatatacatttttggtaggatttttggccaaaaatccctcacctatttactaatttcaatattaatccttacaaatttaatctcagacaaataatttataactaaaaacttacaattggttgaattgcattaattagttgaattaactctttcaaaattaattgctaatttcctaaaatctctccatcgacattaaatataaatatatgattttcattcatttttatttgttcttatatctaaattatttgattttacataaaatagatacagttaataaaatattagattttttctacatatgatgtaattcaaatttttaaaaacagacatatattactccatcgatgaagaaaaaatattagtataaaaggtcccacattgcttaagaaattgggcaatgtttcagagtcttattataaaaagaatcaatatgattttgaatatgaataagtcgaaagcttgatttatcagacatccaaaattaaaagtgttattcaggttactttgcttctttattttacataattgaatctttaaaaatttcaaaaattaataaatatttaaactttattaaaagttaaatattacaaattttaagaattttgaaatgttaaaatttataaaacattttaaatatttataattctaaaatgttaaacttaaaaaaacttttaatatcgaaaatgacaaaatgatgtttaattttacgagacggagttatatggtgggatgagtttgggtcaatattaagacatgatgatatatactatgggtgaaatactagaattaaaaaccaagatacaattatacaattttaaaaactaaccaaaactaacaatattaacagaataaatataacactaaatttcaaatcttttagttataaaaatcattccgagttctatcatacataaaacaaacaatagcatatatctatacatcatcttaaaaacaaaaatttatttttgataaaaaatatagacctgtgatatacttcttaatatattattcatatataaatatattaactgaaataatttttttaactttctaacaaaaatatcaagtcgcagtgtaccacgtgtcagtctctggtaggggcagaaaatacacttcgatttctcctttttctaattaaaccaaatataacaaatttattttacaatattaatttccacgttacacattcattagataatacaagttttaaatattttttacctctaaaaaaaacaaaaccacaaaaaaagtaccgaactttaataataaattaatatacaacaaatatgagaacataaaacataaattatccaagctttagataaataaaaaatttaagaatatattattcatataccaataataattcctataaaaaaatatctataacttttcagtgaatatatacacccgcaccgcgggtcaatatctagtgaataagtaaataggagaaataaatggcaatggaatataaaagtcttaagaaaaatatcacaagaattgattttatagtgttaacaaaaagaattgattttatagattttatttaagaaatttttttaaaaacaatcattatcattatttaacagattttttttaaatggaatcaaaatgatagaacttctacaatatatacttttcggaatgaaatttaaattaaattatgatattgatttggtgaaattcatctttaagaaattgtctttagagtaaatttggaaaaataacctctttatgagttactaggttatgaaaaattgttccaaagctttgatgcccgtaatatacgaatgtgaaatcgaatacttgaaaaagaggcaattgctataaaggatctgcaaataatcgattttttgaaggatgtcattttctgggaacgattactcaagattctggtcgcagcagcagcaacaacgtgtttcttcgcctctcagtgaagagaacaactcgacggttcatggtagaagccttccctcctcttctctgactccaaccaatcaaaactctcaagcgcatgggacttcttctacacatcaaaatcaatcgcctcaagcttctaataatcatcctaatcctatatctgggcgtttcaacaacctgacacttgatgagttgcttgatagtcccggtcgtgcatctctgacgagagtagaccttaatcgtcctttggaaactctttggtaggttgatgtccttcattcgaacaataattaggtttctattatggtttaagggttaattgtgtagatgttttgtttggtttagcataacaatctggtaaaatgttttggtttctattatggtttagggttagttgggtagatgttttgtttggtttagcataataatttggtaaaatattttggtttctattctggttttagggttagttgtgtagatgttttgtttggtttagcataacaatctggtaaaatgttttggttttagatgattatactaattagtccgattgaattatttttttaggtttaacgaagacccttctgttgctggcactgtccgcagcatatttaagagagatttcaaagaaccacatgttaattggacaatgacaccgcaactagtgatcactcgttggtttgaaacttttgcggtaagtgcaattggtgtcttgttatcttgtgctaatttagaaatttgagtgctttgtatttggctgttgtgtaaagatgatgtgactatgttttcttgtgttaattttttgacttgattgcactttttgatatatcttctgtctgttttgtagcaagtatacaactgggaccgtgcaataaactagagagttaggatatagtttgaagcaaagctgaaggataggatgtgcgatcaaatctctcactgtaagggaaactggaagcttgataacattgtattttactcattctagacatgtatttatcatcatttagcttagtgatcactcattatttcatatcattttgcatcacatttagcttattttgcacacctaggcatttaggatcatcttgcatacatattgcatgttttggtgtgttttcaggtgcagaaggagtttacaaggattatactcgaccctctactctatcaagccaggagggaagcagcagagcaaccactcgacctttttactcgatccaggcagccacagaggaggcagcagacactactcaaccctcctactcgatcccctactcgacccaatcactcgaccaaaggcgacctactctaaaagacttgttgatctatcaaagcgtcttctgatcctcctcattctccactcaaccagacatcttagcataagaataggagaggataagcatctactcgaccaattgatcactcggaacatggaggcaaaggtgcagactttacagcaccttgtttactcgatccccaagatcgagcaatcgtccaaaccgcctcaactctcttgtcttcaaatgaatctagggttttcaaaatttagtataaatagatcactttgggatttgtccaatggatctagcttttatctcttagtttttctttgtgttcttgaatcttcaaaacttaattactcttaatatattttgtttttgcacttagttccttgagtaaagttgtttagcttgtttagatctacattttgatatgatttttgtaatttctgggtttgagttcttagttatgttgcttgagtagtgattagggttcttgaggatggattagattagggtaatctctaggttagttaggtggttaagattaggttagatcccttctggattcgttggcccctatgcggttttcgctggctaatgtggaaattctaccataggtatccagcgtccaaaagacgttcaaatggatgcatgatctacgaattccggagatttgtagactctataccaagagattggctagactgcttattgactttggtagattgttgcttaaaccttgttctgctatgtttcatcaacgagagttgagattaagaagtggtagagttgtgggggtctctgtcacaagagtggattgacctggtttttgaatctatcgtctagggtatctgcctttcgcctgttagccacctgatgaaccctagagttgcccttatcaatgaatccatccctagaacttctattattcttagatttatttgtattcactccttgattgcacttttatttacctgttatttgtgtcacctgttgattgcattttagttcttaaatttgttgcctgttggttctactcgacccaatgatcgagtagggcttttaagttcttatttttgttgtttgaatcctgacctaggattgttactagaaaccaaccatttctataatctggcttgacttagttgcttttatacacatctcgattgctagcaataacagtagactggattgacaccccctatagctacattgacgtgttagtgttcaaggggaattgaactgaacacaccactcttcagcacataagtaggcctaaaaaacctacttatcaatttggcgtcgttgccaattcattgttgcattgttacattcaagatatcagaaaaagttaagatcaagttcttttacatttttcaagttactaactcatcttttcgtctgcatgtttttggggtataggtactaatctttgtgcatgcaaactcggtccaaaggttctgcacacatactaccattcagagacagaattgacagaatagctcgtgagtgacaagaaaccaaagcaaaggcagcctcagatcagcaaagaccagctgctatggatcaacaaaatagaccagatgatgttcaagacccacctaatgttgatcaaccaagaaacattggtgctggtgatgccccaatgaatcatcaccaaagacaagggatagtgccccccaccagttcagaacaacaactttgagatcaagagtggtctcatctccatgatccaaggaaacaagtttcatggcttacctatggaagatcccctggaccatcttgacagctttgataggctctatggcctaaccaagatcaatggtgtcactgaagatatgtttaagctcagactttttcccttctctttgggagacaaggcacaccactgggagaagactctgaccccagactccatcacctcatgggtcgattgtaagaaagcttttattgccaagttcttctctaatgctcgcacagctatattgaggaacgagatctcaggcttcacacagaaaaacaatgaaactttctgtgaagcttgagagagctttaaaagctacaccactcaatgcccccatcacggttttaagaaagcatcattattgagcacactctacagaggagctttaccaaagatcagaatgctactcgacactgcctcaaacgaaaacttcctgaataaggaagtagcagaaggatgggagttggtcgaaaatctggcacaatctgatgggtgctacaatgaagactatgatcgctcagtgagaggaactagaggcactgagaataaatagagcaaagatatcaaggatctgaatgaaaagctagacaagctgttagactcgaccccctggtagagtagatggttctatgacttcaacaaaccactcgaccccctggtcgagtagatggcctcatcactgcacatcaccgctcgacccccaggtcgagtaccaccaagacaaccactcgatcacatcactcgaccccctggtcgagtatcatcacgtccaccacatcaccttcactcgatcatactactcgaccacatggtcgagtacctacatcacctccagctcatcactcgaccactcactcgaccacctgggtcgggtaccattcttaatccgtcccaatactgcgtcgttttgagtattagggttttgaaatatttcgctattagtagcatgtactttatattttcgttattctaagttttattccgcatacactgtgttcttgacattttgtaatccggatttctcttaatctatttagtattcaggatttgcttttgatttcatttactaagttgttcatcttgttatcatcttgccattactctgttgctatcatgttttcattctattcatcgtttatgatttctactatgatgtctgagtagtgaataagtttttgaggatgggttaaagtagtttagaattctcagtatgctaggtggttgagtttgatttatagatccttctggattagttgttcttaatgcctattgctttctgatcaactggaatttgagcccagacatttccacgcccaaaaggtgttcgatgaaatatctgaaccactctagagattcgtggctctgtaccaaggtattggttgcagggagcgttttggctttaacttgttgatttgtaatgcctgttaggttagctctcgtcaatggtgattgagtctgggacaggtttaacttgagggtctctgttgcggtggcacttagatttggttatcgaacttgtcgtctaggaataatttattgagcatgtcaatcacctgtaaactgaggaaacaaaactactcaattaccccatcctcgggaattttgcatccaattgatttctttgttaactctgctattgtttactgcatcttgttacttgttacttagtttttgtatttttctcctgttactcgaccttatactcgatcacccagttgtctggcaacagactgtgcagtggagtatctctgttacattttctgtctattacttcacctgtcactcgaccacacccagtgcttggcaacaagctgtgttggtctagtgtttttactgttctgcttaaatttctgttttctaaatgttcacttagaactactagaacacacccaaacctattattggttggcttgactctgtgaactctgattgcatcttgattattagcatcacacccatttggattgacaacctaaaatactacaacgacatgattggtgttttaggataattgactaaaaacctattatcaatgtgctacattcagaaccaaggagggttcaacaagggctacaacaactacaagcccaacccaaacctctcctacagaaacactaatgtaggtaactaaaatctacaaggagagaactaagcttttccatgacaagaggatcatcaccaaggatttcgaagttgttgattagatgctgctattcaactctcgcttgaaactctttcctggaaagcttaagtctaagtggtctggtcctttctgtatcactgaagtctgtccttatggagcagtcactctagctagtaagagtggagatttcacagtaaatggtcaaaggctcaagaaatactaagcagatcaaatcctcccagaggtgacgtcggttcatctccaggaacttctaaatgattaaaggagtaaaggagtcgagctaatgactttaaacaagctcacttgggagaaagtcccatgactatctctgtaaataaattttttacttcttgttatttttcatttgttttcgttgtgtttatggttctcaggaacaaagaaacaacgtggagatggagtaaaaattcaaaacttttactctacagaaggcctggagatcgagtgtattgcccagtggagtgcaaaatttttaaaactttctgttgcacctggagaccatgaattcgagtatatcagtcaagtatatgtgaggtttaaaacccatattttttaaatcatcattatactcgaccaacaagagctacagagacttgtagggagtttatcaaatttacagaagatttcctaaagttttcccagtcaacagggaacaaagtccaaagacaagtcaacagagtgtggaccacgcgttttgttcctgaagaaaagatggagagagaatcacataatcaatctccaccacaccttttgaactcgaccacacattccctaaaagtaaaacctactcgacccatctctcttcgtctctccaccgacactccaatttctctactccaccacgaatcgccatccctcaccaaagagccagtcgactcaacttcactcgagttcgtcgctatactcgaccatttcacttcgccgttcgccgtcactttgttctcaccatactcgaccttctctcagtcgccatagtcgagttccccacctcgttcaccgtcgaagtctcatgaactactccattacaaccacaggactcgaccgtcgacttatggtttcgtccctaccaattctgactcaccgaagaagtactcgacctctggacttcaccggctgaactcgacctcaaaatttcactcgacctctggtgctagcaatcaacagagccactcaacttcagagactttactcgaccaccggtctctaatctactcgatccaattcgtgatagagtaactggggagcactttagtttactcgagtattatactatactcgaccaaattggtccatttcattgcttgttgattacaattttggtttcattgttatctttgagacagacctattgacatttgagttttgagttctaaatcttctgcaggacaatcatgagtaattatagtggcagttcttcagttgatcctgactacaacatggatgagacagagtcgtcgtcttcaaggccagagagagaacatagagaatatgatagtttcagaagaaaagctgagatagcccgagggaagagagcaatgacaaagagatatgagcttatagctgaggatctggaagacgagtacatgcctgagcatactcgaagagccaccaaacttctgcataaacctgatgtattgtttgttgaggaatatattaagctcttcaaattgaaagagttctgtagcacaaggtattcatgctcgaccacactcgcacaacttggattgctggaggatgttcagcacttgtactagagttgtcatctggacactttaatggcttatccgtatgtagcatatgaagaagaaacgattcagttcctctccacactgcaagtggagctttaccaaggtatgacctttgatgatttggaatgcgaaggattgggattcttgagattctctgtgtatggtcatgagtataggttatcaatcaagcgcttggaaggattgtttggtttccccagtggaacgggtactaagcccaagtatgatagagaagagttgaaagatttagggatcaccattggcaactctgtaccgctgaattcttccaggtcaaagagcaatcagatacgcagccctgtcatcaggtacttccagcgttctatagccaatgtcctctactcccgagagatcatagggattgttaccaattctgatatggagatgatcgatatggctctcaaaggcactctccgccaaaccaagaacaaaatgtctctccaaggtgaaatcaatgacacacctctctctatacttcttctgatccacatgtgtggatacaagagaagggctgtcagcaataaccacaagagagcacgaggcgctctttgcataggcggtgttgtgacaccgattctgatcgcttgtggagtcccaatcacatctgatggactcgagccacgggtaatggatattaagcatctacatcacttcgaattcctagagttcgcaatgcttggcgaaatgcaccgtttcaagtttgagcactctacggataagagagccaacatccttctccccagcccaaggttacacgcataatagagggagaaaacattaattttaggcctgagcttgggaacctatacaatgaggacgctccgccattgggtgaggatgatcttatagaagaagaagctgaggatgggatggatgaagacagagaagtggagcttgacactagcatatatcattgtagtgaatatgtacctccagcgagggagagcaagagcttgagtgtaacaacaacaagctacagaagtggtgcaagaaacaggacaagctactcgccaagtgcttcaaaactatcaagttcctaatagataagttgagctgctcctcttccactacagttatcccacagggacaccctcctctagacatgccattgaagagatttgatgagcctgagccaagtcaacacaggcctgagcctagtgagcagagagtctcacatgtccttgctaggcatttatcattcgagtcccgggagcacaagagaagaaggaaggctacactcgttcgctctagcagcaaatcacgccttatacacttgaggagatcactcgaccgtggtgctggccgcagtagaaggagagaggtcgagtatcctcagagcgatgttggccgccacatagttgatggggtcgagtacccacatgctggagctgacacagaacagggcggctcatctatggcctgggagaattcacaagcagccattgacgaccaactccgttcattcttcgactgaggtaagcgcctcacttcaccattgtattatatcatctcttgtgatttgttctttattttgtttctgtgattggatttatcctgaatactctcttccatgtttagtcacacagtggattgtgtgatttaagtttgggggagggttcaagaagtgagtgttgcattgtttatactcttgagtctgcactcatctaaggcatagaaaaacgaaaaaaattttaaaaaaattcaaaaaatgatttcacaaaaactgagtgttcatgtagttgcattacatttaggatcgagtctagaatgtttcatttaagattgttgcatatgcataggggataatgatgagatattcttgtaagcattttggttcaccgaataaactcagtgccctcgttgctagttatttgttgcgtagtcagtgaaattgaagtaaaactgaaccatgcctagattgctctactcgaccacactgtcatgatctgatgcattccctatcaatttgaaccttaatctaatctttaactatcatgtctgcatcaaatttgaactcatgtataccctaaaatacttggattttcttattcattttgatcactcttgttaatccaagtagctgactctccttattagagtagttaacccgagcccaaacctagactttctttcaagccctatatcacttgtgagtgtttgtgaggtcttattccgattaagcttggtagaaagtgttaggttcgtaacgaaagagatagtgtctcatgtagttctagttcgcattttccggactagataggactaggtgggcgcttatactttgggtttggatgtgtctaaaagaaaaaaaaaaagggttgattcattgatgaaaaaaggtaaaagactctaggtgaagtaagctaaagaagcagaaaaagtctagtaaaggttttgggatttgtaaagaaaagaaagagttcttgttagctattgaagaagggcaaaagccctcggttttaaaattctaaaaacaggaaccatagttgttaaagaaatccaaatccgctagatgtatcaaagtgttgagaaagcttctcctagagttaagagaaaataaaaaaatgattagaaaaagggcttaaaagattcatgaagcctattctgtaagggactatctttgtctcttgacctttaccttagccaaatgaggtcattgatgatgcattgtttgattcacgttccagaactaataaatgttaaagggattggtagatttgaaaacatgtgtaggtcgagcataagagtcggattgattgataacaaggcatggctaacgtttttgagtagaattcgatcatatcgcaacttagaactatcaacttggacattgatttcatctgatttatctggtgctttggctctgagtcccggccttcaaacctcacctccagcttgttcttaattgtttacttgagggcaagcaaagattaagtttgggggagttgataagtgtgcattttacatattgtgaacatccatttgttatcactattgcatcatatcaccactgatttataccatttctcatcatttgtcatcactttgcatgtttaggatagttttgcatgtatgatgcatatttgtgttgtttttaggtgatttggagctgttggcgagctaattggaagaagcggacctgatcactgcaaaacactcgaccccctggtagagtagatggttccacgacttcaacaaaccactcgaccccctggtcgagtagatggcctcatcacttcacatcaccactcgaccccctggtcgagtaccaccaagacaaccactcgatcacatcactcgaccccctggtcgagtatcatgacgtccaccacatcaacttcactcgatcacactactcgaccacatggtcgagtacctacatcacctccagctcatcactcgaccacctaggtcgagtaccattcttaattcgtcccaatactgcatcgttttgagtattagatcccttctgggttagttgttcttaatgcctattgctttctgatcaactggaatttgagcccagacatttccgcgcccaaaaggtgttcgatgaaatgtttgaaccactaattacagagatttgtggctctgtaccaaggtattggttgcagggagcgttttggctttaacttgttgattcgtaatgcctattaggttagctctcgtcaatggtgattgagtatgagattggtttaacttgagagtctctgttgcggtggcacttagatttggttatcgaacttgttgtctagggataatttattgagcatgtcaatcacctataaactgaggaaacgaaactactcaattaccccatcctcgggaattttgcatccaattgatttctttgttaactctgctattgtttactgcatcttgttacttgttgcttagtttttgtatttttctccttttactcgaccttatactcgaccacccagttgtctggcaacagactgtgcagtcgagtatctctgttacattttctgtctgttactccacctgtcactcgaccacacccagtgattggcaacaagctgtgttggtcgagtgtttttactgttctgcttaaacttctgttttctgaatgttcacttagggctgctagaacacacccaaacctattattggttggcttgactctgtgaactctgattgcatcttgattattagcatcacactcatttggattgacaacctaaaatactacaacgacatgattggtgttttaggataattgactaaaaacctattatcactgtgctacattcagaaccaaggagggttcaacaagggctacaacaactacaagcccaacccaaacctctcctacagaaacactaatgtaggtaactcccaagatcaagtgtatccaccacaacaaaatcactctaagccatttgttaagtacaaccaaggttatgtccctaaacaaaagtttaatggaggctaccaatagcagaatccaccaccatggttcactcaacaaccacaacaaaccccagcggctcaagatcctgaaattaagcaacttattcaacaaatcattcaaggacaagctactggagctatggcttttgacaagaagatagctgaattacacaactagatcgattgttcttataacgatctaaatgtcaagtttgaagctctgaattccaaagtcaagtatgtggagagtcagtttgcatccacctctgctctgaagcatcctcagcaacttcatgggaaagcagttcagaatcctaaggactatgctactgcaaatgctatcaccatccaccaagaagatgagtctccaccaagtcatcagattcccaatattgaggacagtatgattcaagaaggggggattcaactcaaattgttgcacctgccatccaacaattcatctggactatagagcacacacctttgctgaatactcaccactctgaaaaacatttcaaaagagaaaaactcaagaaggatcagaattaagagatgattagtagagtcatcactcaagaagcttacaagaagaaagtcatccaagaaaagcttagtgatcccgtttcattcactctgccatgctctctacgaccattgatattcaataggtgcctttgtgatttgggagcatctgttagccttatgcctctctctacagctaaaaggctagggatcatggaattcaagttctgcaacttagctttactcttagctgattgttctgttgcacatcctcatggtctaatagaaaatctgcctatcaagattggaaatattgagatacttacagattttgtggtattagacatagatgacgagggaaaggatcccctgatcctaggtagaccattattagcttcagctggagcagtcatagatgtcaggaatggaaaaattgatctaaaccttgaaaaaggtatcaagataagatttgacatcagcaaagcttcggggaaatcaacaacaagaggtcagaatttggggattcaggacatggatgctgatgaggaaacagaagctggaaccccaccaagagttaactatacttctcaacttagcaagctgaagagaacttttgaccacaagaaaagagcaatagaagggttagctcagactgaatatcctacaaaagataactggtatgagatgagaaaaaaaattaaatggcaaagcagagttatagagggattatcttcaagggtgatgaagctgaaagatcaactatggatgtttgaaaaaagagttaataagttttcaatgagtattgatccagagaagatggaaactgcactagctatcaaagaggacgaagatttcacggcagaatagtttgtgataagtaggtttttacgcttacttatgtgctgaatgtgaggttcagttcaattcctcttaaacactaacatgtcattgcagctatagggggtgtcaatccagtccactgttattgctagcaatcaagatgtgtacagaagcaactaagtcaagccagattataatgatggtgggtttctagtaacaatcctaggtcaggattcaaacaggtaaaaacgagaacttaagagccctactcgatcattgggtcgagtagaactaacatgtgacaatattaagaactaaaatgttatcaacaggggatacaaataacaggtaaataaaagtggatttattgataagggcaactctagggttcagcaggtggctaacatgtgaaaggtagataccctagacgatagattcaaaaaccgggtcaatccactctcgtgacagagacccccataactctatcacttcctaatctcaactgtcgttgatgaaacatagcagagcagagtttaagcaacaatctaccaaagccaataagcagactagccaatctcttggtcaagtatacaaatctctggaattcgtagatcaaacatccatttgaacgtcttttggacgctggacgtctatgatcgaatctccacattagccagcgaaaaccgcataggggccaagcgaatccagaagggatctaatctaatcttaaccacctgagtaacctagagattaccctaatctaattcatcctcaagaaccctaatcactactcaagcaacataactaagaacacaaacccaaaaaatactgaaattataccaaaatgtagatctaaacaagctaaacaactatacttaaagaactaaatgcaaaaacaaaataaattaagagtaattaagttttgaagattcaagaacacaaagaaaaactaaaggatcaaagctagatcctttggacaaatcccaaagtgatctgtttatacagaaatgttgaaaaccctagattcactagaagacaagagacttgaggcggtttgggcgagtgctcgatcttagggatcgaataaagagggtgctgcaaagtctgcgcctttgtgtctatgctccgagtgattaattggtcaagtagatgcttcttcctctcctatccatatgctcagatgtctggttgagtggggggatgaggaggatccgaagacgctttgatagatcaacaagtctggtagagttggtcacccttggtcgaataaatgggtctagtagaggatcgagtaagagggggcgagtagatcgatatgcttcttcttctaaggctaccttgatcgagtaagtgggtcgagtgaattaatgcctcctctatggctgcctggatcgagtgaatgggtcgagtagcatgccctgctgcttctctcctagttggatagagtagagggtcgagtagaatccttttaagctccttctgcacttgaaaacacaccaaaacatgcaatgtgtatgcaagatgatcctaaatgcctaagtgtgcaaaataagctaaaatggtgcaaaatgatatgatacaatgagcaaatgcacaactaaatgatgataaatacacacctaaaatgagtaaaatataatgttatcaactcccccaaacttatctcttgcttgccctcaagcaaacaaaaaattttaagttgaaggagaggtttgaaggtggggattcaaaaaccgaagaatgcatatagaacgggtaagctcaatgtccaggtagctaattctaggttgcaagatgatagacccttacttaaaaacgttagccatactcgtcacaatgcaacctgacaacctgccttaatatattcaagcattcacatcaaccaattccctttaacattcattaagcacgaacagtggatcaagcaatgctatggttatgaactcacttggtttcgggcttaggctaagagacaaaaatggtccctctaataatttggtcgagtaacaggggactctcagagaaaagattgagctttagcagaatgctaaaggtaaaacccaatggacacatacaagaatatactcccatctacccaatgatatatagtatgatagctcagaaaatgatccatgtcccatagatgtcctaactctacccttttcctcattctttctttctttttggttcaagttctaaggggttcttctttaaaaatgattcaagagtctagcgggtttggttttatactttgacaaacttaagacttttcttctaatcttagcatagagggcgctttacccttttctttgaatcacaatgcctaacttctttgaattccaaaccctttactagactaacactgttgtatccccctttagaactctaaactcttactctcttttttttcttttttttttcttttcattctcattctctttccaattcattccataaacaatcccaatcccaaatacaagtctccacctagtctacatgaaagactgctcttgttggctcatacctaacacattataccaagatcaatcgaaaaagacctcgcaatcacacacaaatgatctttggcttgaaataaggctaggctaagggtatgggaaactgctctaaaaatgagagtcagctacttggagtaacagagggtggtgaagtgaataagataatccaagtatgtatatggtagccatgagttcacaaacaatgcatagacatgataattgcaaattcagttcaggttgtaatagataggaaatggcatcagataagcgagtttcgaatcaaagcagtatagtcaagttacaaattcaaagcagggtgcagtcttacttcagagaaacaatcggttatgcaacagagaactaacaacctgcgcattgaacttacttcattgaatcaaaacatgcttaacggtttgaaatcatcattatcccatatgcaaatgagcaatcctaaatgcaaacacactatatacaatcctaaaatgaaatgcaatctacatgacactctatttttgtgaaatcattttctgaaattttttcaaattttatggttttttctattccttagatgatgcaaaatttgaaataagaaaagagaacacaatgttaaaaatgccttgaaccctccgccaaacttaaattatacagtcccttgtgtaataaaaatctgaaagagaattcaagaccaaaacacaaaacacaagaaaaaataaaaatgatatggttctttgtcttcttctttgatctgattcagttctccttctttttcgatctgatacagtacttctttgtcgttcatcttcgagccaattcaattaagttctcatctctcttcctctctttatttgattcatatctcttcctctttcttcttctctcgaatcttcgttccatctctcttcctctcttgaatcttcgatccatctctcgaatcttcgatgcctaacgccggtcatggaggatcccaaaagcggaagacaacccctaactttacccagagagccggaggatcaacgcctggtggaagacctgcttcgctacttcagcagtacgacttcactctagcaccagcggttcaagttcctgcgacgcaaccgcctcaagtagccgtcaaggaactgttccagagctccaccactaagcgtgtagatccaccaccgcgatctgaagaggtgcactataatccaccaccacaagagcctcttcacctagtccctccaatgtctccaaatccaaacactaaggctcacagttatccatcttctcaaggcaacaacttccaagagggagctcctccaatgttgtcgaagctccaagaagacttggcctgggctctcaatgacatacttatggtacctggcagggaaatgtggaccaccgtactatctcctattactcgaccaaagactgaatggtatgttctcttcctcaacctaattctcgttttctattgtcatctaagtttatatgttgtgttctcttgctctattgtgaaacgtagtaaactgttgtgctctgttgtgttggcttgctctcttgtgttcgcttgatatcttgtgtacacttggttagattatgttctgttgttttcgcttactctcatgtgttcgcttactatcttgtgtatgcttgctctcttgtgttgtcttgctctattgtgaaacatagttaagaattgtgttctttgtgttcgcttgctctcttgtgtgctcttcctctgttgtcatctcagttcatctgttgtgttctcttgctttattgtgcaaaaaaaagctaaaagagttgtgctctgttgtgtttacatattgctctcttgtgttctcttgctttgttgtcatcttagttcatatgttttgttctagactttctattgatttgtttcacttttgtgacatgtttttttctttcattatttcatgtgtttggaggtttactcgcgaaaggggatctcgattggttagaaagatcactagaatttttacacaaaaattcgatgctcccttctataactggtcatgtgtgccatttaataataataaaaagattatttctagagtttgcgataagctgtcattcatctccctaactttgttaactttgcagtttattctttcagattttcactataaatctctattttttttgtagaaaactcacatttggaatcccttaataacaaagacaatgcattattactttaatgagatctgtagacggtgcatgaaggacatggttagcaccacaaagacaagtcgagagcagcctccatggattggagaaactctatggaaaacaatgtgcgcttacaaggacacaaaataagcacaaaaaaggagtcggacctattccaaagctcgtctccctgattgtaacggtcttggtcctcacatccacttctctaggccaaagtcttatcaagaaatccaagacgaattggttagtgtttctgttacctctttcaattaccctcacatgtatgtttttgagattttgatatgtgtttaattggttacattgcaggaagagaaattgggaagagcagtcagtcttggtgaggtgttcatccagacacatactaagtcggatggtacttatgttgatcggaaggcggagaagattgctctaatttatgagcaaaatgtgaaagataggttgtccgaactagaggcagctgcttctgctgtctctgatggcttttcacgatctcgggatctcacaatagaggagtatacagtcatctctctcgaggtaagatgttgcagtctaagtcctagtctttgagtttacatattctatcactaatatcttcttctctatttcttttcagtccatagaaagtgattcaagaggcaatcattatggacttggaagtctgaaagacactttaggcagtgccaaccgcaagcaccctggagactcacccatcctttcaagctgtagaacggctgcaggaagcgcaatgcaaaattgaagagcaggctgcatataatgagaagcgagatgctgagattgctgctcgtgaagctgagtaagcccgagttgcggctgagcaaaaggactagctcgagcacttgtctttagtcgagagatatctgcgagaaacagatccgcaattcctaaacttcatgaccactcactcttctacatcgacaaagcctctagcagaaactcctccacataatgatccataggtttagattttccaacacttttcccttgaactttgaactaatctttcaagaagatgtttatgaacaagaataatgtgtgtttatgtatttgaattccaatgtttgattttccatttatgaatgtgttataatactttatagcatttcaaacaacaaacaagaacacaacccaattgcaaacaacaaacaagaacacaacaatcgatgaccaaattcttattcagacataaaacgtagtcgcaaaatagtactaaaacagtcgtaaaacagtcataaaattaacgtcaaatagtcacccaaattaccgactattaactcacaatggccataagtcgttcaataatcgtcacatagtcgtaaatgttttagtgactatgatacgactacaagaatcatacccacatacaatattatttacgtaacctagtcgctaaatagtcgcccaattatacaactataccacgactattatatactttttgtatagtagtcgtatatttgtcgtaaaatgacgactaatatacgactacacaacttagcgaatatgtattaacgactacggagtttagttgccttctagtatgatattttgttttacgactactgagcgactacctctgtagtcagtgatcgcctgttttcttgtagtgactagaacaaggttcggttactgtttcaagataatgtgttatattggttttcattgttcatgcatacaacatgaattgtgcttagaagttgttagatcgactagatacaagttcttgagaacatattattcatacaatctccacacaccactccttacgtagatgtgcatcgattaaccatatgcacaaatcgtagaatagaagaagaaaggaaaaatatagtaaattttggagacaaataaaatgaagatgactacaaatattgttgaatagggaagaagaaggaaaaacgagctgctagggtttagacgaaaatatttaaactacaatctttaaatcataataaaaactaaataaattacaattgaaacgtaatctataatacatatttagtttccttatttatttattcactttctatattcagagttttctaaaaagttcagaaactcatatctaaataatagtaaaatgtcagttctaaacgaaaaataacactttttaattaacattagcagacgatgaaataattcatagaatggctatttcaaagtatttagatcataaagtaaaaattttagaaatcagattttcggattctgaattattcaaaacgaaaaaaatctaaagttcatagaatctgtatagaaatgtaaaattcacagtctgaattttgtagaacgctagaaaacatgttttaaaaatttcagttaaactttatctatcaaattttttttttttaataaataaatagaattacacttcaaaacatttctattcttctgtatctaaatattaatgtgaatatttttttgaaaaaaacttaaaataagatgtataaatattttagtccaaattaaccttctcaccaaataagaatagatggacaatttttttttgtagatattcttttttaaaaaaatttcctaaaatttaattgagttttgaaatgaattatactttacggaacgaaaaaaaaaaagaaatgtcatgctttacggagttttgaaatgaattatactttacggaacgaaaaaaaaaaagaaatgtcatgctttacggtgtttaacgtaaaacgaaaacaaaaccgacggtgcggtaggtattgtggtaattattttgagtcatggagggtaatttcgtccaaacgtagttttaacatgcgtcggtgttcttcttcgtcttcactcgtcgtattaaaagcctcatgcgttccttcaccgagaaattctcacttcttcgctaccaaatctcctcttccccggaataggtgagttccgatctccttttcccgtttcgagaaccctaatctcatcatttctcaaaccacttatctgtctccttcctcgaattttctagatctgagcttcttctttgactattcaccgatccggatctaaaaaggtgtttcctcaatttgttaaaccagatatgaggtcaatggatcgatttgggatctgggttttggcgattttgttagtgattcaatcaagttttgggttttaccttcctggaagctatccacataagtatgaagttggtgattacttgaacgtgaaggtgaattcacttacttctatagaaacagaaatgccttttagctattatagtttacccttttgtaaacccagtgaaggaattaaggatagtgctgagaatttaggtgaacttcttatgggagatcggattgagaattcgccttataggtttagaatgtttaagaatgagagtgagatctttctttgtcagactgataaattgtctgctgatagtttgaagcttttgaagaagaggattgatgagatgtatcaagttaatcctatgcttgacaatttaccggcgattcggtatactaagagagatgggtatgttttgaggtggactggttatcctgttgggattaaggttcaggatgtttattatgtttttaatcatttgaagtttaaggttcttgttcataagtatgaagaagctgctaatgtggctcgtgtgatgggtactggtgatgccgctgaggtcattccgactattgggaagaaagattctgatgtccctggttatatggttgttgggtttgaggttgttccttgtagctttgctcataatggtgaatctacgaagaagttgaaaatgtatgagagatatactactccgattaaatgtgattccactagggtgtctatgtctgttaaggaaggtcagtctattgtcttctcttatgaagtcagttttgaggagagtgacatcaaatggccatctagatgggatgcgtacttgaagatggagggttcgaaggttcattggttctcaatcttgaactctcttatggtaatcactttcttggctggtattgttctggtgatattcttgagaactgttaggcgggatttgactcgttatgaggagcttgacaaggaggctcaagctcagatgaacgaagagttgtctggatggaagcttgttgtgggtgatgttttccgtgctccatcaaatgcctcgctattgtgtgtcatggttggtgacggagttcagattcttggcatggctgttgttaccattttgtttgctgctctagggttcatgtcaccggcttcacgtggaacacttattactggtatgctcttcttctacatgattcttggcattgcagctggttatgtttctgttcgtctttggaggacaattggttgtggcgaacaccgtggatggatgtctgtcgcatggaaagctgcttgctttttcccgggtattgcgtttctgatccttacaacgctgaacttccttctatggggtagccatagcactggagccattcctttctctctatttgtcatcctcctcctcctgtggttttgcatctcggttcctctaactcttatcggtggttactttggagccaaggctcctcacattgaattcccagttcgaacaaaccaaattccccgggaaatccccgctcagaaatacccatcctggcttctggttcttggcgctggaacacttccattcggtaccctcttcatcgagcttttctttatcatgtccagcatctggatgggccgtgtctactacgtctttggattcctttttgtagtcttgatccttcttgtcgtagtgtgtgccgaggtttccctagtgctaacatacatgcacctgtgcgttgaagactataagtggtggtggaaatccttctttgcatctggatccgttgcaatctacatcttcatatactccataaactatctcgtcttcgacctcaaaagcttgagtggacccgtttcagcgactctttatctcggctactctctctttatggtcctggctatcatgctcgcaacaggtaccgttggtttcctctcttccttctggttcgtacactacttgttttcttcggtgaaacttgactaaggaatcagaccagaggcttattggcttaaagagattgtataactttttggagagaactgagatatcgtttaagcaaaggcatcaatcaaatcattcaattgctccaacaaggaagtgtaagggttcattgtgtcatattggaagcttcaaattttccttttcatcgtgtaagaaaatttgtttcctctttcttgtttttctcatcttgttgcatcttttatggtaatgcctctgaacttgaaaatgtttatttttttccttaatgtttaagattaattttggttctgttcggttttgattactatagaatacacactctaccatgttggtgaccgttgccttttcatctcttgttttctagaactagaattgacattttggtagagatgttgtggtgggtaaaaaagctcagcccgacctgaatccaaaataaacccgtccaccaaaaacccaactttagaaaacccagatgggtttttgatatagtgggtaaagctccaaaaaacctgattgttacgagactacccgtgggtatccaacttagtttttatcatttttttagagtttatgtttaactgttaatatactattatatgtatgttatatctatattttgcttataaatatattttaaattatatttattttctgtattacatataaatttgatgggaaaaaggttgaattgcgtctttggcgggaaaatgttaaattgcgttttttggcggaaaaatgttaaattgcgtttttggcggaaaaatgttgaatatcatttttggcggaaaaatgttaaattgcgtttttgaccggaaaatgtgaaatctttttggcgggaaaatgttgaatgtcgttttggcgggaaaatgttaaattgagtttttggcgggaaaatgttgaattgcgttttggcgggaaaatgttgaattgcgttttggcgggaaaattttgaatgtcgtttttggcgcgaaaatgttgaattgcgttttggcgggaaaatgttgattgtcgtttttggcgagaaaatgttgaatgtcttttttgtcgggaaaatgttgaatgtcttttttagcgttaaactgttaaatcgcggttttggggaaaaaatgtgaaaaaaaaattgacaacaaaatgttgattcacttgaaaaatgacttaaaaaaaatccgtgggtacctataatccaatgaggtaaacccatatgggttttatttatttgggtacccagcccattttaaacctgtgttttttttccagaaaaagtagatgtatgggcttaaaattttatgtgggttttgggtacccagtgagttttaacccatcattaacatctctacattttggtaacaaattgaatcaccagtctatagaattgttgagtttgtgatacatttttgttatgaatttgagtaaagaagtaaacaaacgcgaaatagtagggaaaatggaaaatggaattttcatacccttacaatccgccaaatgtgtttttagacttaggcgctaaatgttttgtagctttttattggtttttagtttttgatttttttactttttattttgttgtagattttattttttgcaaaatcatgaatgaaaatttgtttaatttttagcttttacgtaaattgttaaaaaaaatccacaaatttgggttttagattctatgaagaaatagctaaaaacttctaaaatctggttttctatttcttaggaaatctacattttgtaaaatcatgaatgagtaattatttggtttttcaaaatctaaaaactattccaaaaattgcagtcattcaaggccttatccaaaaatatacggttaattttaactaaactccaacaaaatttgaatttcatacctaaactttatttagtatctaattcgatatcgtaattaaccgttacagttgcgaatcaactgacatatgtttaatagtatggcttaaaacgacatcgtgttgcttgtttaagttaacgtttgaatttttctacaaaaatcgggtctcgacaaatcgatatatttcgtaaacgagtgaaacgttgtgggtttaagatccgatttttgcagaataattcaaactttaaaacggttttttggccaaaacaaaaaatatgaaactaataataaaaaatgaaatctagcctctaggccacaaatatacatttgtccatcttttgcataatggataagagtacgacaaaacattgtggatatttattttctcccaaaagcattcttcttttaatttagtccattttatagttttttgtggtggccgttatttaaaatccagtccagaaagaaacaatgttgcattgattgatccaaggaaggagcaaagtagaggatttaacaatggcgtctctttctctcagttctgctcatttctcttcaacttcttcttcatctcgctcctctatatccacttcatcgctttctccgtcgtcaacttctctccctctcttacaatcaccgatccgccgccgttaccgctccctccgccgccgtctctccttctccgtcattccccgtcggacttctcgctccttctccacttccaattctcaggtacttcttcttacttaccttgttctcttcaaattactgatccaatccgtttcctcaaatgtgcttaattttacacaattcatgaccaattcggaatctgtagatggagaattactgtaatgtgttttgtatccgtttgtgaattgtgattgtatagattaggtgttcgataaatgagccgttgaaggtgatgatttcgggtgcaccggcttcaggaaaaggcactcaatgtgagctcattgttcacaaggtaatattttccactcttctctatcggtttcttgttttgagctcattgttcacaaggtaatttttttatactctttcatgatctcttttctggttgtcttatgggttctgactcatggtagattctctcttgagtgcggtgaagaatggatatgcatttaaaattatctagtatactgaacaatgcatataaaacgtttgctgtgactcataaaatcttatttgccatccaaaggttgctgaattttccttgatctttggactgttcattaaattattgcaataatcacagtttctagtacgtttgatgtaaggaagactatctatgttgccattgtttgtatgtcttgatttatatcaagtttctctttcttggtcatgcagtttggtttggtgcacatatcaacaggggatctattgagagcagaggtgtcatctgggacagatattggaaagagagcaaaagagttcatgaactcgggtagtttggttcctgatgagattgttatagcggtactgattttacttacctgtttcatgcattattttataatattactctgatatctactacctttctagatggtggctggaagattatcacgtgaagatgctaaagagcatggatggcttcttgatggatttccacggagttttgcccaggcacaaagtctggacaaactgaacgtgaaacctgacatttttatcttactagatgtacgtgcaaattactcttattgcgtttgttatccatttcagcaataggtgttgaaaccaattttcactatcagtggctatgtttctttgcttatatgtcattcttaatgacaggttcctgatgaaattctgatcgatagatgtgttggtcgaaggttggatccagtgactggaaaaatttatcatatcaaaaattaccctcctgaatcagatgaaattaaagcaagactggttacacgcccggatgatacagaggagaaggtgaccttttggacctattatttgcttttgaattttttaactaccgtcaattgtaatctcacaagtttacttcgttgaaggtaaaagcacggctgcaaatatacaaacaaaattctgaagcgattatttcagcatactcagatgttatggtcaaggtactaggcaatttttttttggtttcccttaacctttggttcttaaagtattgcaatgccatctttgatatttgtggtttggtatcatctcattcgaacacagattgatgcaaacaggccaaaagaagtggttttcgaggagacccagactctactgtctcagatacagttaaagagaatgataaagactggcaagtagtcacacatttatatatatatgtatattttcatggtgccgttcttgatagcagggtcagtgttttccagttcaagatgagtttccccaatctttgtaatcttaacttttatcttgttctattctaggttatttagaaaataccttgttcagtaatttgtctctttgcttccataggaaataccatcttttggttgttattagaattttgattctggtattctaaacaataatcttggttaaactttatggacacatgtaacatagaaagggagattcaggaactcccctagtgtgtttgaagattttattgtcaatcattatgttttaggactaaatttttccttttacttcttgtttaactttgatttgatgaccactgtatgcatgcgacgctaattctgaaacaggtccttgcagataaagcatctcctgttcaggtccttgaataatacttttctttgaagctatcaagtagctggaagtaaattgggagatattcttatctttgtcatgtaacatttctttcaggataaatggagaggaataccgacgagattgaataacattccacattcgagggatatcagggcttatttttatgaagatgtgctgcaagccacaattagatctatcaaggatggtaacacccgtcttcgggtgaggctaatccacacaatctatttgcaatgtcgcatgttatgtcatctttattttgcaattcctaaagcagctgcttgacgggactgatactgttacaaatgaataggtggacattaatatccctgagctaaatccggaaatggtcagttattcatttcactaactgttttatacgatttctaaagcttcataagttgtaccaaaaagcaagctattgtgataaataggatgtttaccggataggaaccttgatggaacttgttcaagctttagctttatcattcgctgacgatggaaaaagagtgaaggtatacatggtttggaagacttaagtgatgtcacatgaatacagtttcacaaatcttgttcattcagcttttttcctcttccaggtttgtgttcagggatcaatgggggaaggtgcacttgctgggatgccattgcagttggcaggcactcgaaagattttagaatatatggactggggtgatgatgaaactttgggaactttcgtcaagcttggtgcaattggtaaatatccaaaaccaaatacttttcaaagatgtattgacaaaaccatgtttaacactagaaatactcagatacctcttgactttggtgtcttctggctttagtaactagagaatctctcaacttacaaaaactgcaccatcaacagaatattgttgtgtcaataatcaaacttgtgatgcataataaagttggatacattgaattacacattattctgctctttgattatgtgtttgcaatgacaggtggtaaagaagttgatgaagaagatgacatgttcatcttagtggctccacaaaatgccgttggaaactgtattatagatgtgaggagctaggaatgcttgaattcgttattcatttgaacttatcgacctcattttatagaatataccggattcgtttgttaggatctacaagcgatgactactgctgctgggaaaaggccagttgtacttatcaatcctcgcctcaaggtacattttctgcttgcacttttttatatagagacaatgggtaacaatgtgatctatattgtgagttacatgtttcatataccttattatttcaggacttgcccgcttcgagtggcataatgcaagtaagcacacaaagtgattctttacccatccaataagaagattatgttgcttataatttccttggtgtctcagacaatgggcagggagcaaaggctggaatatgctttgacgtttgacaactgctatgtattccggcttctctattatttgggaacacaatacccgattatgggcgctctaaggtacagttgttgggttatgaagtagagaaacaactatcaatgtcaattcattctgaatgtttgacctgaatttggtcaggatgtcttatccataccggtatgagctttataagagagtgaacgaggaaaatggaaaggagaaatatgtcttgctagcaacgtacgctgaaagaccaacccctgaacaaatcgacgatgccttctctggaaaatcgcggtaaattgtttccatggtccttcttaacacattgggcttatgataattttgaacaaaaactgagaatgtcatttcacatcagggatcaaagcaagaaggcgtcaggaatctggtaatgagcactacatagttatttaaatgaggatttttgtgtgtgtgtgtaaagctaaatgtgagggatacttgcagggggttcttgagtagcgtgttttcgtaatggaactaggaagctgaagttgtggaacattcattaaatgctcatctatcagttaccaaacagagagagagtgatgctgctactttttgttcataattttctccttttattatgtctcagattgttgattatcttactttggggcaaataaaactgaaaactgtgattattttattacgtagtgtcacataaccaaaaagtaacctcactctcgtacattttaaagcctaagtcatgaatggccgagaatattgttcactagttactgcaacggcatttataggtcatctcataagtggccttctaataattttgtttttcatcagtttttttaaccacattattttgaatattttgaattattgtattgtgaattgtaactagataaaaattgtttctatgtctatggttggtcaatcaatttcttgcacttagaaatactgattaataggtccaaatagatcaaaattaatattgattgacccgtcttgcaatcagtttcttaaattttaatttttcttattaagataaaaatgtatagtcttagaagaaaaacaaaattagtaaaatgttttaattattttggggttttgctgagggctccgcctctcccatagattgatacacactttttttttttgggttaaatatacacaccctttacatactagaaagtaatttgattatgtcaaaggttacataatcaactaaagcgtattagtgaatttaataaattcttacttttagtaattaattatccctccgtgtcgacttgctcgaaaatgcatgttaaatggctaaatgtttattttaatgcagagtctgaaaatggcaaaacaaaaacattcacttgacgtggatggttttgattggagagcataaattcgtcgcagactaggctcagaatcaatgaacccaccaaactaacaaactccataattgaaacaaacaaagaaaaaagtggattctcaaaattgaatgaagcaacgaacgattcaacatcaaatctagctgaattattgtttcgcgttgattgattgatccggagaaaggcgatgacatcgcctggatcgaagaaagttgttaccaccgacgacggatcggagaagaaagtttccggcaatctcggaaaagtaagtttttccggagatcttaatcatagtggaagccatagtggaagccatagtcgtagcagcagcagcgccggaggtggtgaaggaggaacgtttgagtatttcggatgggtttatcatttgggtgtgaataagatcggtcatgagtactgtaatcttcgtttccttttcattagaggcaaatatgttgagatgtataaaagagatcctcatgagaacccagacattgtatgtcttttcatccttcttctccgctttttaattagagcttaaaagaatcattcctctgaaatgttgtttacataatgtgatgttttttttttgttttttttttttttttttttttgtagaaacctataaggcgtggtgtcatagggccgacaatggtgattgaagagctaggacgtcgaaaagttaatcatggggtaattctcttcaatatctacttctctaatgaatggaagtatgagagtaaatgaaaaacaggtacacttactagttttatttctattatatgttgtaggatgtctacgttataaggttctataaccggttggacgagtcaaggaaaggagaagtaagttataattcaatctttgctatagtcttgtcttgtggcaaatgcgcactagtagacttaaagcttgcctgctgttttgtgtatttgaacatttggatgaaccaaacagttaacgtatagagttaatatcgtgatgttctggtaagtctgtttgcataacccaggtgtattaagtaacttttttttctttctataaactgtattttagattgcttgtgctactgctggagaagccctgaaatgggttgaggcttttgaggaagcaaagcagcaggtattaaggagacggctcatgttttaaagtatcatgtaatgtattgaatttttctatagcatatgattggctacaatttttaagttcattgcttgttgttgaagcacttatttagtgaccagtttcttgtttcttaaattcggattactgctttttctgttttggaaggctgaatatgcactatcgagaggcggaagtacaagaacaaagttaagcatggaggccaagtatgatctaattatcatatgattagtgctttagatgatatttattagtagctaagtgtttcctgttttgggggaactgagaagatgaggctcttcctacagaaaatgcataaagttgtgatgttaaaatttctgttcttaatcagatcaaattgttttaaatagtagaagtccacttttactccacaattgctgaatcacactctattttcttttgaagcatcgatctggaaggacatcggcctagagtacggcgttatgcttatggattaaaaaagcttatccgaattgggcaaggtatacactgtatctcaagtttatgggcttgcttagcttcagaatcttacactgtgtgtgcagattgctaaaagttcatttgttggtgtatagcctataattattatcgtagttcatctccaaatcttacattggaaaaaaacattagaactcatttgcctattttccttgttacccctatctttgggttgggcacatgctaaatgacataactgggaaaagtggtcctgaagattctgattatgtctacatttaaatggatcgacaccagatttaaataaatgttctgtgtattagtgaaactgtagttcgaaatttataatcctacagcccttgactttattatgcattgataggtctggttccatagttaatttgatttcttaacgtttaatctagtggttattcatgattcaagacataaggttcacctgaaagttacttttctttcaaagcaaatatgtatgataatgttcttaaatgccaggtccagagtctcttttgaggcaatcatctaccctggttaatgatgtcaggggtgatggtttctatgagggtggtgacaatggagatgcaatcgaggcacacgaatggaaatgtgttcgtacaatcaatggtacatccccacttacttatatctcgaaaacatgcatcaaaatgcattattgtggtgtttccttttggctatttatacttctctatcagttataaagaggtaattgtagaagactcataatcacccaaaagatgcggacataattgtccagttttttttagattgactggttttcatctctatgaatctgaaggttgtttggaaagatagtagtacttaaacgttcaaaatttggagaatttaaggcctaaacacattgagattgttcttatgctttgcctactctttgatacataaccttcaattatctatttttctgtatattgtttgcaggtgttaggatttttgaagatgttgctaacttcaaggtattttgtcattcaggaattactttaaactatttccagatgaatggaaactgaaccaccttattttatgcctccattacaatatttgcaatcttgtgagttttaattgccatcacattaattcttatcggccaggtaacaaattgtaattagatcttgtaactaagtgttctcatctccagaatttatgcattcagaataactgcgataatttatgccaaggtggcaactattgtttttatttggttgttttgcaactggtagttcactgggaaaaactgtaattggttgtattcagttattggttgatgcttagaatccccctgaggttttgtcaaaatgatttcttctttaggctggtcgaggagttcttgtgaaagccgttgctgtagttgaagcaagtgcggataccgtgttcgaagtacttttgaacattgacaaacatcaaagatacgagtaagctcatttccttgaatatatagatgtcatttttacttagccctttctaactatctgcacaggtgggatgcagtaacaggtgattcggaaaagatagactcatacgagggtcactatgatgtcatttattgcatatacgatcctaaatatctttcgcggtatgttgtttatctgaaagtctggttttccttagtgacacactggtcaccctgtattttttagtgaaaagacgcatacgttaaaatgtcttgctatctttcctcattcgatcagatgtgtgttttctccagtttcgacatgttgtacaatttctccatatatcacttcattcagtggatagttttgcacttacattttcttcattgaactgattggttaaatagtatattttgcagatggcagtcaaagagagattttgtgttctctagacagtgggttcgtgggcaagatgggacatatagtaagtccagaggaatactattctaaataacgttttcttatatattctgatgtctgtattggctatgcataaaggtagtgattagtgttagtcatgccactaggtggttagtgaattgtctgggttatagttgtgttgaatgaagacaggattgaattgtcaagtgtatgaatgatacaaggacagattaagtaggttaatgttcgtttcttgaatttccgaactaaacgtaatacccaccaatgaacattattattaggttacaacatcaaatacaaaacagagaacagtacagaaaaagaaaattcagatttattgcttatctgttgttctatgagccctggagaagacatgtgaatcatgtatagaagctagagaaacctacatctaaatctgaacttcacagtaacagattttgtaaatttctgtcagctcactgccacctagaaatcttagtcatgcattcttctctctgatattagttttgaatgatatcttcttactcatgcgacctagacactcattaattcattattttttatttttttgaaaacgactatcgattgaatatctcaagctagtctctcatgatgtactttttatgcagcaatcttacagtttccagcagtgcataagaaacggcctgcaaagtctggatatcgacgtacagaaatcacgcgtaagatattttctttagataacctcgtccgtagtttttactttttttgctatgctgcatgtttgggtactatccttgttactatccaaagtgtttccaacaccgatctgattgggtacttcaatagccagaggttctcgtgtatacttacttgcttgtgattacttgcccatccgtctctgcaatagtgttgagttctgcagctagctcacaaaatctagagcagtatcataggctcttggggaaatattattggcttgataaccataggatgtgggattactgttctttttcattttactaactttactgtatatattacctttcttctttctggatccgtaatgtgcttacatatcgcctagaaaggcattttcgctctacgttttagacctttcatctctgtttcgttcttgttgatttcagcatcaacttgggaaatcaaaagcttaaaaaagcgcagcgatgcagaaactccaagttgtcttgtaacacacatgctagaaatccactctaaacgttggtgcaaatggaagaggaccagctactcaaagtttgaaaagactattccatatgcattactcctccaagtagcaggttagatgcatgcctcatctccttccagatcttactaagagtatgaacacaagaaatgagtaggaagtctagatgtgatatctgtggtatgtatgatatgtgttgaggaatgagaacttgtgagcacatatgaagattagcagtcactatatatccgcacatctttgggataataatacatgtagtatgcttcgcctttattacaattggaagcttctttttttgggcatagaagttaataaactttatttggcatgctgttgaaagtaaatgcctgacctctaggtacaatagatgtcacaagttccaaatggtttttgtttcatgttcttgttaatgatatatcaggtctgaaggagtacattggagcaaacccagccttcaagtatgaaacttccgccacggttgtccagtccaagttccaagatgtccccaatggtgaatatgtagatgaagaaatggaggagcagttttatgatgccacggactcatcatctggagaagaggatgaggaggaaagcgatgacgatgatgaaaatcaggacaataaggtaactatttggttttgatatcctcttgtcaatttataattttactttcatatttatagagtaaagaatcatgaacagaaataaaaaaacgaaaagctcctccttattgaaatcagaaaggcttaaaataaaacacccaaaacaaagaaactgtttcccttggtataaaacttcaaagcactctctagctttggatgagtctcacagactggatttcatccctagatatactaaaatgtaaagacaaagcacacttaggaaaaggaaatgaggaaaatatttcatgaactaggaaatagaaggaatacataccacacataatctaagatgttcaaagttcctattaactattcgtgtacagcccatgaggtgagcaactagtactgaaattatcaaaataatggagaattctgttgtttcaatgttaaaaacaggagataaaagttaaactgaagaatgtttcatgggcaatcgctagcttatctttgaagcgacctaaaggttttctctttactttttactagtacattaagttaccaatggctcacttaggcaatataatggatttatatctgttcttgataatttataaatgagtaacttgaggacctcttattggtatttgtttccaaagttaatcataagttccatagtatatgacactaatatgtatatgcaagcatttttatatgaaaaactactttatttagatgagaatgaaaaaatgtagatagcttttgtagttaccattttgtaactggtccattcttgagttctatgtttggagaaagggcccaatttataaatttacaaaatattggcgcagattagaagtcaaaaatacttttctatattgtttgaaatctcaatgtattaatatatcagctctatttttacattagctccaggcgcaagtaatgtattagacgctagtgttgatcctgtgagtatcgatccaagtcagttccaaggatctctgcgcaaaggaaatggtgataaggactcaaattgctggaattctcctagtggcatggggtttatgatcaggggaaagacctacctaaaagataatgcaaaggtagctttggaattcttgcatctactttaatattctacatttcatacataacgtgaaatggaatagaaaacaatgaagggtctgtttcgtagacgccactgcactcaggtcctccatgactgaaccattaacttcttctgatatactgattttggtttctttaatttatcatctttggatactaccgcatctattaattttctagactgatttctgattctgaactacttagctcttgaattggattatctgacaaagtgcatggttctctcatgttaatttgtgtgcaaattaataaaacctattgtgcaatctaaggtgatgggtgggcagccccttctaacacttatatcagtggattggttcaaagttgatagtgctgtagacaacatcgccctgcatccaaaatgtcttatccaggtactcccttgacctgtatttaactaaccatcagggccttctttcctattaaaagcaagtattaagtgcgacttgtcaccgtaactcgatttaccatgaggcattgtatttaccctcttcgccttgtggctaagtctggtgatactttgtaagttattgatgagttacagtgtgttggaaaagtaagaagaaaacatacaaacattatgtatttagtctcctatgattgaaagagcctgatttggaagttttctcaattgtagtcggaacctgggaaaaagctcccattcatcctagtcatcaatctacaggtatgaatgcaatctgcaacataaactctatacatatatcactcttcttacaaaagtttgtttgaataagtgagtccaattagaaagtacctcaacccatacatatcaatactaatatatgagtttttttgaagatagtgtcgctaaacctcttgttcgtctttgtttattcgtaactaacaatctgtcactcgtatatcactagtagtttataatattttggatttatgatagtacatactaccatcaccaatcatttttccctctacttaaagtctatctaactgtaatatttattagtaatcatgggttaagttagtctctggaagaagtcaaaatgtttttattcttctttttcaggtaccagcaaagcctaactattgtctggtactctactatgctgcggatcgacctgtaaacaagacttcatccctgggaaaattcgtggatgggagtgacagttaccgcgacgcaagatttaagctaattccaagtattgttcaggtaaagaaactctgctcttctcgtttccactgaaatatagtaaacttagtcacattgtaaccgtcatggtgaatcacagggatattggatggtcaagcgggctgttggaacaaaagcctgcttgctcggtaaagctgtgacctgtaagtacctgaggcaggataactttttggaggtataaatagtttctacttccctcgattctttcattgcaataaactaagtttacatgatagatatgagaattgtttttcacttatgatttacatgaagtatcaatatttctcgtaaaccataaaataaacagtacatgtccaacatacacacacatggttgctgagttcttatgaaatcgtggtgttgcagattgatgtagatattggatcatcggctgttgcgaggagcgttattggtctggtccttggttatgtcacaagcctcattgttgatctcgccatcttgattgaggtttgtttggggtctcactgctagacttatcatatctttagttaaaacatctttgtgaatgcgatcatcagttaaatgttcaactaccaaatgcaaatgcagggaaaggaggaaagcgatttgcccgagtatatccttgggacagttcgacttaaccgaatagagctggactcagccgtatcatttgaggtttgagatttgatcaaggattaaagattttatccgattgtaacaatgaaattgtcgtacttaatctcactgcaatcaataactgcaggaatgagaccatccagtgccgactataacatgtgacatatgtcttatggattgcgaccctttggccaaaacaaaaataacatatgaataatgaaagattgaaccgtacaatttttcttcttttctttcagagattgtaagctcagacgagtgaagaggtttagttttttcaaggtggaatggtttataagttaatgaactttgaagtcgttactgataaaagatttgactttttgctaagtgttgagaatgaatttaattgtttaacatgtcaagtttagtgatcagtctaagttgattaaacgagtactaatcaaaagtctacaaaagtaagatatataatcgtctctggcttgtgttctatttaagaaaatgttagaaagcctgagttaatatctctgagtagggaaagaacggacttcaatttcaaagaatggtggataaaaggctgatgtgggatcaattaactgaataatcagcttaaactgtagattagatggtcgttaaagaaatacagttaaagctctataagtgaataacgtcgagataaaaaaaaatatatttattttgagaagtattaatttacagaaagattttacaaattttgtaatttcttacaaagcttctatctaaaagtaattgttcttttctttaaaattaataatctttctgaaattttcaaaaaacttattatcttattaatttatcgatttgtatcattttttacactggtcccaactcgagaccaaaaaaatttattaatttttagaggttattattttctcgagtattaggttatacatgttttactgtatacggtaatttgagaatgcataatcaatttagggtatgtatctatatctctttcttgtataatcattattcaacaataacaaacataacccagtttgcacaaaaaaaaacagaaacataacccaaaactctatatggtataaatcaaggacaataaaatttaaataaaatctgatacataaaataaattttgtgtgtcacattaatgtttttaaacaaaaactatataactgtatcttctatatggctaaataatttttcaataagcaggtttattttttttttggaactaattaagtaaatataatcaaacaaaataatacgaaaacatctcaaaccaattgaaggttggtagagagaatctaataatttttcatacaccccacacattactattttcaaacaaacaacttagcacgtataaatgtatttgaaagtgctatacacgaacccaagatgggacaatactataatatttatatacatagaagaaagactatataaaggactttcattttcaagtaaatcataaccaaaacaaagaaacaaaaagagcagcgacgagtacaatgagatccccaagagtgatggagcgagtgcattgcatggtttatgtcgtggtcttaagtgccattgcagctacagtgacagcatacccttactcatcccatcaaacaccacaatacaattctccagtccacaaacacgaatcatcttattcacctaaaaagtattccccatactactcggcatcaccactacctccactacaatatagaagacaaggccctaagtacacgccacatccaaaaccgtatcttttcaactctccaccaccaccttattactctccttctccaaaggaagactacaagtctccaccaccaccatatgtctacaactctccaccaccaccgtattactccccttctcctaaagtagactacaaatctcctccaccaccatacgtctacaactctccaccaccaccttattactctccttctccaaaggtagaatacaagtctccaccaccaccatatgtctacaactctccaccaccaccttattactctctttctcctaaagtagactacaagtctccaccaccaccatacgtctacaactctccaccaccaccttattactctccttctccaaaggtagactacaagttttcaccaccaccatacgtctacaactctccatcaccaccatattactctccttctcctaaagtagactacaagtctccaccaccaccatacgtctacaactctccaccaccaccttatttctctccttctccaaaggtagactataaatctcctccaccaccatatgtctacagctccccaccacctccaccatactattctccttctccagaagtcagctacaagtctccaccacctccaccatactattctccttctctagaagtcagctacaagtctccaccaccacttttcgtctacaactttccaccacctccaccattctattctccttctccaaaagtcagctacaagtctccaccagcaccttatgtctcaaagacacccaactattgagtttgaattgtttcataatccataagaatgattgaaataatttgtttttatgattctgtccatttattcttgtaatattgtcccttgattcttttgattttgttccttgttcaactatttgttaagctttttatgtaaccaataaattttggttatttctgacatgcaattgtttatttaatatttgtttgaattggctaaaaatttgtaatatgttcgttctgctatcagatgataatttttctcttttaggatataactatttttgtttcaaatatatatatcaaatatcttcagtgatatatagttcttacaccaatgatggttcaaatctttaaacctaacaaaaccgattaagataaactaaatttggcggttgaatctaatttggaaaacctttcataccaatttgagataagaaagaatacacaaacataaatttgattttttgctaagtgttgaaaattattccgagtgtttaaacatgtcaagttcaatgatcagtataaaaagttagtataggttaattaaacgagtaatcaaaagtcttcaaaagtaagatatataatcttatgtggcttgtgttctatttaagaaaatgatagaaagcgtgagttacgatgtaagtagggaaagaatggattacatggtaaaaggacaataaattaatatttcctctcttcctttttatttgattgtctagaaaaaacacaagaaaacatattaaatattgattataaatgtattatttttagtgttttacagttttttataactctaaaccaatgataattaactatttttcttgaaaattataattcaccaatactaactaataaatattacatggaaaacataaaaaaatcaatcttttagaaacaatttttttttctaaacaatcaaacaaaaaggaacagatggagtataaaactagtaacccgcggtaaagcgtgagactattttgtttttttaaaaataagaatttaatttgtttaatcgattaaagatatatatgatttaacgttttttattttctgaatgtacaactcttttatctgtatattatttagtatacaattactatgtttgatttttactttttaaaaatataggaacaatagcatacagttcattaagttaaaatctagattataactaaataacttaaatttaaattatatttattttattaatattatttgttttgtttagtatttaagataatataattgtattttgattgttatatttaggatttcaccggtgatatatcgtctcgtattactatcgacccaaacccgtcctaccatctaatctcgttctgtgaaactaaacatatctaatggatttcacccgtggtataccgtctcgtattactgccccgttcagtgaaaataaaatttttgtatttgtttttttttaataatactttaatttaaaagatatataatttaaattaattttaaatttttctttcaaatggttatttatttgttataaaatccatacattgtaatattctaaacccgtctcactatctaatctagttcagtaaaattaaacattattttttcttttttgttctaataatatttttataaaaagatttataactcaaagcaatttaaaagttttcttttgaaatggttatttaactttatagatttcatatattatatatattctaaacgttttttcgccaaaaattctaaacatttgataaactttaaatagctatcatatttatatttaataaagtataatattaatatattcttaagatttcttattgttaaaagtaattagaattgatggaaatatattagataaggaaaaatggtaataatcaaaaatattaattaattgttaataattaatgtcattcgcattccttgtaaataattttgattttgaggatttatttgctaaaatggctcaaaaatgtatatgtagatgtgataaataaataaactttgcgtattctaattaatgtttcaaaacaaatatcttctttatggtacatagatctttcaataaacaaagttcatgcatgatactggatcagaattccgggttcgaaacccgacagcgaaaatatccttttggtgctttttatactgtatcttgtatgacaattgaagacactttctcatattgttctttcttctctgctcattgttatggtttttatactatattatatgattcttgaagaaaagcgtgcttgagttttagatatgagggggtcatatttatgagaacaaaaatagaaaagaaaacgaatgggagaaaagaagcaaatactatcttcaataaaaccttcacttaaaacatatataccgtataaattcaaaattctaacaaagatccgatgtagcacattgtctaaagtaaacattctaatttaatattggatcaaaattccgggttcgaagcccggcagcggaaaaatccttttggtgctttttatattgtatcttgtatgataattgaagatactttgtcatattgttctttcttctctcctcattgttatggtttttatacattattatatgattcttgaagtaaatcgtgcttgagttctagatatgagggggtcatattttcgagaactaaaacagaaaaggaaatgaatgggagaaaagaagcaaatactctcttcaataaaaccttcacataaaacttatataccgtataaattctaaattctaacaaaagagccgctataacacattgtctaaaacaaacattctaatttaataatggatcagaattccgggttcgaagcccgcaagcagtaaaatccttttgatgttttttatactgtatcatgtatgacaattgaagatactttctcatattgttttttttctctgctcattgttatgatttttatatttattatatgattcttgaagaaaatcgtgcttgagttttagatatgaggggatcatatttcgagaacaaaaacagaaaaggaaatgaatgggagaaaagaagcaaatactctcttcaataaaaccttcacataaaacttatatactgtataaattctaaattctaacaaaaaagccgctatagcatattgtctaaagcaaacattctaatttaatattggatcagaattccgggttcgatgcccgacagcgaaaaaatcctcttggtgctttttatattgtatcttgtatgacaattgaagatactttctcatattgttctttcttctctgctcattgttatggtttttatactatattatatgattcttgaagaaaatcgtgcttgagttttagatatgagggggtcatattttcgagaacaaaaacagaaaaggaaatgaaagggagaaaagcagcaaatactctcttcaataaaaccttcatataaaacatatataccgtagaaattctaaattctaacaaaagattcgttgtagcacattgtgtaaagcaaacattctagtttaatactggatcagaattacgggtttgaagctcggcagcggaaatatccttttggtgctttttatactttatcttgtatggcaattaaagatactttctcgtattgatctttcttctttactcattgttatagtttttatactatattatatgattcttgaagaaaatcgtgcttgagttttagatatgagaggggtcatatttttgagaacaaaaacagaaaaggaactgaatgggagaaaataagcaaatactcttttcaataaaaccttcaaataaaacatatataccgtacaaattctaaattctaacaaaagatccgcagtagcatattatctaaaacaagcattctaatttaatactggatcagaattccgggttcgaagcctggcagtggaaaaatccttttggttcttgttataaagtatcttgtttgacaattgaagatactttctcgtattgttctttcttctctgctcattgttattgtttttatactatattatatgattattgaagaaaattgtgcttgagtattagatatgagggggtcatattttcgagaacaaaaacaaaaaaggaaatgaatgggagaaaaaaagcaaatactcttatcaataaaaccttcacataaaatatatatatacagtataaattttaaattataacaaaagatccgctgtagcacattgtctaaagcaaacattctagtttaatactggatcagaattccgggttcgaagcccgcagcgaaaaaatctttctggtggtttttatgaagtatcttgtttgaaaattgaagatactttctcgtattgttctttcttctctgctcattgttatggtttttatactatattttatgattcttgaagaaaatcgtgcttgagttttagatatgaggggttcatattttcgagaacaaaaatagaaaaggaaatgaatgggagaaaagaagcaaatattcttttcaataaagccttcacataaaacatatattctgtataaattctaaattctaacaaaagatccgctgtaacacattgtcgaaagcaatcattctagtttaatactagataagaattcctttttcgaagcccggtagcggaaaaatccctttggtgctttttataatgtatcttgtatgacaattgaagatactttatcatattattctttcttctctgctcattgttatcgtttttatactatattatatgattcttgaagaaaatcgtgcttgagttttagatatgaggggttcatatcttcgagagcaaaactagaaaaggaaatgaatgggagaaaagaagcaaatactcttttcaataaaaccttcccataaaacatatattccgtataaattctaaattctaacaaaagatccgatgtagcacattgtcgaaagcaatcattctagtttaatactggatcagaattccgggttcgaagcctggcagcgaagaaatccttttgatgctttttatcatgtatcttgaatgacaattgaagatactttctcatattgttctttcttcttttctcattgttatggtttttatactatattatatgattcttgaagaaaaccgtgtttgagttttatatgagggggtcatattttcgagaacaaaaacagaaaaggaaatgaaagggagaaaagaagcaaatactctcttcaataaaaccttcacataaaacatatataccgtagaaattctaaattctaacaaaagatccgttgtagcacattgtctaaagcaaacattctagtttaatactggatcagaattacgcgtttgaagcccgatagcggaaaaatccttttggtgctttttataatatatcttgtatggcaattaaagatgtattgatctttcttctttgctcattgttatggtttttatattatattatatgattcttgaaaaaaatcgtgcttgagttttagatatgagaggagtcatatttttgagaacaaaaatagaaaaggaaatgaataggagaaaagaagcaattactcttttcaataaaaccttcaaataaaacatatataccgtacaaattctaaattctaacaaaagatccgcagtagcatattgtctaaagcaaacattctagtttaatactggatcagaattccgggttcgaagcccgacagcggaaaaatccttttggtgcttttttatattgtatcttgtatgacaattgaatatactttttcatattgttctttcttctctgctcattgttatggtttttatattatattatatgattcttgaagaaaatagtgcatgagttttagatatgagggggtcatattttcgagaacaaaaacagaaaaggaaatgaatgggagaaaagaagcaaatactctcttcaataaaaccttcaaataaaacatatataccgtataaattctaaattctaacaaaagatccgcagtagcatattgtctaaagcaaacattctagtttaatactggatctgaattccgggttcgaagcccgacagcggaaaaatccttttggtgcttttttatattgtatcttgtatgacaattgaatatactttttcatattgttctttcttctctgctcattgttatggtttttatattatattatatgattcttgaagaaaatagtgcatgagttttagatatgagggggtcatattttcgagaacaaaaacagaaaaggaaatgaatgggagaaaagaagcaaatactctcttcaataaaaccttcaaataaaacatatataccgtataaattctaaattctaacaaaagatccgcagtagcatattgtctaaagcaaacattctagtttaatactggatcagaattccgggttcgaagcccgacagcggaaaaatccttttggtgcttttttatattgtatcttgtatgacaattgaatatactttttcatattgaagataacgctcgtattgttcttttttctctgctcattattatggtttttatactatattatatgattcttgaagaaaattgggcttgagtattagatatgagggggacatattttcgagaacaaaaacaaaaaaggaaatgaatgtgagagaaaaagcaaatactcttttcaataaaaccttcacataaaatatatatacagtataaattctaaattctaacataagattctctgtcgcacattgtcaaaagcaatcattctagtttaatactggctcagaattccgggttcgaagcccagcagcggaaatatcttcttggtgctttttatactgtatcttgtatgacaattgaagatactttctaatattgttctttcttctctgctcattgttatggcttttatactatattatatgattcttgaagaaaattgtgcttgagttttagatatgaaggggtcataatttagagaacaaaaatagaaaagaaaatgaatggggaaaaagatgcaaatactctcttcaataaaccttcacataaaatatatataccttataagttctaaattcgaataaaatatccgctgcagcacattgtctaaaaccaaacattctaatttaatagtggatcagaattccgtgttcgaagcccggcagcggaaaaatccttttagtgctttttataatgtatcttgtatgacaattgaagatactttctcatattgttctttcttctctactcattgttatggtttttatactatattatatgattcttgaagaaaatcgtgcttgagttttagatatgagggggtcatattttcgacaacaaaaacagaaaaggaaatgaaagggagaaaagaagcaaatactctcttcaataaaaccttcacataaaacataaataccgtagaaattataaattttaacaaaagatctgttgtagcacattgtttaaagcaaacattctagtttaataccggatcagaatttcgggttcgaagccaggcagcggaaaaatctttttggtgctttttatattgtatcttgtatgacaattgaagatactttttcatattgttctttcttctctactccttgttatggtttttatactatataatataatttttgaagaaaatcgtgcttgagttttagatatgagggggtcatagtttcgagaacaaaaacaaaaaaagaaatgaatgggagaaaagaagcaaatactctattcaataaaactttcacataaaacatatataccgtataaattctaaattttaacaaaagatctactgtagcacattgtctaaagcaaacattctagtttaatactggatcagaattccaggttcgaagctcgacagcggaaaattctttttggtgctttttataaagtatcttgtttaacaattgaagatactttctcgtattgttctttcttctctgctgattgttatggtttttatactatattatatgattcttgaagaaaatggtgcttgagttttaaatatgaggggttcatatgttcgagaacaaaaaaagaaaaggaaatgaatgggagaaaagaagcaaataccctcttcaataaaacgttcacataaaacatttataccgtagaaattctaaattctaacaaaagatcctttgtagcacattgtgtaaagcaaacattctagtttaatactggatcagaattacgggtttgaagcccgacagcggaaaaatacttttggtgctttttataatgtatcttgtatggcaattgagatactatctcgtattgttctttcttctttgctcattgttatggtttttatactagattatatgattcttgaagaaaatcatgcttgagttttagatatgagggagtcatattttcaaaaacaaaaacagaaaaggaaataaatgggtgaaaagaagcaaatactcttttcaataaaaccttcacataaaacatatataccgtataaattctaaattctaacaaaaggtccgctgttgcacattgtctaaaacaaacattctagtttaatactagatcaaaattccgggttcgaagcccagcagcggaaatatctttttggtgcttttaatactgtatcttgtatgacaattgaagatactttctcatattaatctttcttctctgctcattgttatggcttttatactatattatatgattcttgaagaaaattgtgcttgagttttagatatgagggggtcgatatactctcgagaacaaaaacagaaaaggaaatgaatgggagaaaagaagcaaatactctcttcaataaaaccttcaaataaaacatatataccgtataaattctaaattctaacaaaagatccgcagtagcatattgtctaaagcaaacattctagtttaatactggatctgaattccgggttcgaagcccgacagcggaaaaatccttttggtgcatttttatattgtatcttgtatgacaattgaatatactttttcatattgttctttcttctctgctcattgttatggtttttatattatattatatgattcttgaagaaaatagtgcatgagttttagatatgagggggtcatattttcgagaacaaaaacagaaaaggaaatgaatgggagaaaagaagcaaatactctcttcaataaaaccttcaaataaaacatatataccgtataaattctaaattctaacaaaagatccgcagtagcatattgtctaaagcaaacattctagtttaatactggatctgaattccgggttcgaagcccgacagcggaaaaatccttttggtgcttttttatactgtatcttgtatgacaattgaagatactttttcatattgttctttcttctctgctcattgttatggtttttatactatattatatgattattgaagaaaattgtgcttgagtattagatatgagggggtcatattttcgagaacaaaaacagaaaaggaaatgaatgggagaaaaaaagcaaatactcttttcaataaaaccttcacataaaatatatatacagtataaattctaaattctaacaaaagattcgctgtagcacattgtctaaagcaaacattctagtttaatactggatcagaattccgggttcgaagcccgcagcggaaaaatctttttgttgctttttctaaagtatcttgtttgaaaattgaagatactttctcgtattgttctttcttctctgctcattgatatggtttttatactatattttatgattcttgaagaaaatcgtgcttgagttttagatatgaggggttcatattttcgagaacaaaaatagaaaaggaaaggaatgggataaaagaagcaaatacacttttcaataaagccttcacataaaacatatattccgtataaattctaaattctaacaaaagatccgctgtaacacatagtcgaaagcaatcattcttgtttaatactagataagaattcttttttcgaagcccggcagcggaaaaatccttttggtgctttttataatgtatcttgtatgacaattgaagatactttctcatattgttctttcttctttgctcattgttatggtttttatactatattatatgattcttgaagaaaaccgtgcttgagttttaaatgagggggtcatattttcgagaacaaaaactgaaaaggaaatgaatgggagaaaagaagcaaatactcttttcaataaaaccttcaaataaaacatatataccgtataaattctaaattctaacaaaagatccgcagtagcatattgtctaaagcaaacattttagtttaatactggatcagaattccgggttcgaagcccgacagcggaaaaatccttttggtgcttttttatattgtatcttgtatgacaattgaatatactttttcatattgttctttcttctctactcattgttatggtttttatattatattatatgattcttcaagaaaatagtgcatgagttttagatatgagggggtcatattttcgagaacaaaaagagaaaaggaaatgaatgggagaaaagaagcaaatactctcttcaataataccttcaaataaaacatatataccgtataaattctaaattctaacaaaagatccgcagtagcatattgtctaaagcaaacattctagtttaatactggatcagaattccgggttcgaagcccgatagcggaaaaatccttttggtgcatttttatattgtatcttgtatgacaattgaatatactttttcatattgttctttcttctctgctcattgttatggtttttatactatattatatgattcttgaagaaaatagtgcatgagttttagatatgagggggtcatattttcgagaacaaaaacagaaaaggaaatgaatgggagaaaagaagcaaatattctcttcaataaaactttcaaataaaacatatataccgtataaattctaacaaaagatctgcagtagcatattgtctaaagcataaattctagtttaatactggatcagaattacgggttcgaagcccacagaggaaaaatctttttggtgctttttataaagtatcttgtttgacaattgaagatactttctcgtattgttcttttttctctgctcattattatggtttttatactatattatatgattcttgaagaaaattgtgcttgagtattagatatgagggggtcatattttcgagaacaaaaacaaaaaaggaaatgaatgggagaaaaaaagcaaatactcttttcaataaaaccttcacataaaatatatatacagtataaattctaaattctaacaaaagattctctgtagcacattgtcaaaagcaatcattctagtttaatactggctcagaattccgggttcgaagcccgcagcggaaaaatctttttggtgctttttataaagtatcttgtttgaaaattgaagatactttctcgtattgttctttcttctctgctcattgatatggtttttatactatattttatgattcttgaagaaaatcgtgcttgagttttagatatgaggggttcatattttcaagaacaaaaatagaaaagcaaatgaatgggagaaaagaagcaaatactctattctataaagccttcacataaaacatatattccgtataaattataaattctaacaaaagatccgcggtaacacatagtcgaaagcaatcattcttgtttaatactagaaaagaattcatttttcgatgcccggcagcggaaaaatccttttggtgctttttataatgtatcttgtatgacaattgaagatactttctcatattgttctttcttctctgctcattgttatggtttttatactatattatatgattcttgaagaaaaccgcgcttgagttttatatgagggggtcatattttcgagaacaaaaacagaaaaggaaatgaatgggagaaaagaagcaaatactcttttcaataaaaccttcaaataaaacatatataccgtataaattctaaattctaacaaaagatccgcagtagcatattgtctaaagcaaacattctagtttaatactggatcagaattccggttcgaagcccgacagcggaaaaatccttttggtgcttttttatattgtatcttgtatgacaattgaatatactttttcatattcttctttcttctctactcattgttatggtttttatattatattatatgattcttgaagaaaatagtgcatgagttttagatataagggggtcatattttcaagaacaaaaacagaaaaggaaatgaatgggagaaaagaagcaaatactctcttcaataaaaccttcaaataaaacatatataccgtataaattctaaattctaacaaaagatccgcagtagcatattgtctaaagcaaacattctagtttaatactggatcagaattccggttcgaagcccgacagcggaaaaatccttttggtgcttttttatactgtatcttgtatgacaattgaagatactttttcatattgttctttcttctctgctcattgttatggtttttatattatattatatgattcttgaagaaaatagtgcatgagttttagatatgagtgggtcatattttcgagaacaaaaacagaaaaggaaatgaatgggagaaaagaagcaaatactctcttcaataaaaccttcaaataaaacatatataccgtataaattctaaattctaacaaaagatccgcagtagcatattgtctaaagcaaacattctagtttaatactggatcataattccgggttcgaagcccgacagcggaaaaatccttttggtgcttttttatattgtatcttgtatgacaattgaatatactttttcatattcttctttcttctctactcattgttatggtttttatattatattatatgattcttgaagaaaatagtgcatgagttttagatataagggggtcataatttcaagaacaaaaacagaaaaggaaatgaatgggagaaaagaagcaaatactctcttcaataaaaccttcaaataaaacatatataccgtataaattctaaattctaacaaaagatccgcagtagcatattgtctaaagcaaacattctagtttaatactggatcagaattccgggttcgaagcccgacagcggaaaaatccttttggtgcttttttatactgtatcttgtatgacaattgaagatactttttcatattgttctttcatctctgctcattgttatggtttttatattatattatatgattcttgaagaaaatagtgcatgagttttagatatgagtgggtcatattttcgagaacaaaaacagaaaaggaaatgaatgggagaaaagaagcaaatactctcttcaataaaaccttcaaataaaacatatataccgtataaattctaaattctaacaaaagatccgcagtagcatattgtctaaagcaaacattctagtttaatactggatcataattccgggttcgaagcccgacagcggaaaaatccttttggtgcttttttatattgtatcttgtatgacaattgaatatactttttcatattcttctttcttctctactcattgttatggtttttatattatattatatgattcttgaagaaaatagtgcatgagttttagatataagggggtcatattttcaagaacaaaaacagaaaaggaaatgaatgggagaaaagaagcaaatactctcttcaataaaaccttcaaataaaacatatataccgtataaattctaaattctaacaaaagatccgcagtagcatattgtctaaagcaaacattttagtttaatactggatcagaattccgggttcgaagcccgacagcggaaaaatccttttggtgcttttttatactgtatcttgtatgacaattgaagatactttttcatattgttctttcttctctcctcattgttatggtttttatactatattatatgattcttgaagaaaatagtgcatgagttttagatatgagggggtcatattttcgagaacaaaaacagaaaaggaaatgaatgggagaaaagaagcaaatactcttttcaataaaaccttcaaataaaacatatataccgtataaattctaaattctaacaaaagatccgcagtagcatattgtctaacgcaaatattctagtttaatactggatcagaattccgggttcgaagcccgacagcggaaaaatccttttggtgcttttttatattgtatcttgtatgacaattgaatatactttttcatattcttctttcttctctgctcattgttatggtttttatatatattatatgattcttgaagaaaatagtgcatgagtttagatatgaggggtcatatttcgagaacaaaaaattaacagcaaatgaatagaaggacatgagctcatactctcttcaatagggcctcccagtagtacttacagtccgtatgtagtataaagtcgaacagaagataggcagtagcatattatgtagagtatacagtatagcttaaatctggaacaaaaattcgggttcgaagcccgacagcggaaaaatccttttggtgcttttttatattgtatcttgtatgacaattgaatatactttttcatattcttctttcttctctactcattgttatggtttttatattatattatatgattcttgaagaaaatagtgcatgagttttagatatgaggaggtcatattttcgagaacaaaaacagtaaaagaaatgaatgggagaaaagaagcaaatactttcttcaatacaaccttcacaaacacatatataccgtataaattctaaattctaacaaaagatccgctggagcacattgtctaaagcaaacattctagattaatactggatctgaattccgggtacgatgccaggtagcaaaaaattccttttggtgcttttaatactgtattttgtatgactatggaagatactttctcatattgttctttcttctttgctcattgttatggtttttatactatattctatgattcttgaagaaaattgtgcttgagttttagatatgaaggggtcatattttagagaacaaaaacagaaaaggaaatgaatgggaaaaaagaagcaaatactctcttcaataaaactttcacataaaatatatatcgtataagttctaaattctaataaaagatccgctgcagcacattgtctaaagcaaacattctaatttaatattggatcagaattccaggttcgaagcccggcagcgaaaaaatccttttggtgcttttgataatgtatcttgtatgacaattgaagatactttctcatattattctttcttctctgctcattgttatggttattataatatattatctgattgttgaagaaaaccgtgcttgagttttagatatgagagggtcatattttcgagaacaaaaacagaaaaggaaatgacagggagaaaagaagcaaatactattttcaataaaaccttcacataaaacatatataccgtagaaattataaattctaacaaaagatccattgtagcgcattgtgtaaagcaaacattctagtttaatattggatcagaattacgggtttgaagcccggcagcggagaaatccttttggtgctttttatactgtatcttgtatggcaattgaagatactttctcgtattgttctttcttctttgctgattgttatagtttttatactatattatatgattcttgaataaaatcgtgcttgaattttagatatgagggggtcatattttcgagaacaaaaacagaaaatgaaacgaatggaagaaaagaagcaaatactcttttcaataaaatcttcacataaaacatatataccgtgtaaattctaaattctaacaatagaaccgctgtagcacattgtcgaaagcaaacattctagtttaatactggatcagaattccgggttcgaagctcggctacggaaaaatcttcttggtgctttttataaagtatcttgtttgacaattgaagatactttctcgtattgttctttcttctctgctcattgttatggtttttatactatattatatgattcttgaagaaaaccgtgcttgcgttttagatttgatggagtcatatttttgagaataaaaacagaaaaggaaatgaatgggagaagagaagcaaatactctcttcaataaaactttcacataaaacatatataccgtataaattctaaattctaacaaaagatccgttgtagcacattgtcgaaagcaaatattctagtttaatactggatcaaaattccacgttcgaagcccggcaacggaaatatccttttactgctttttatactgtatcttgtatgacaattgaatatactttttcatattcttctttcttctctgctcattgttatggtttttatactatattatatgattcttgaagaaaatcgtgcttaagttttagatatgagggggccatattttcgagaacaaaaacagaaaaagaaatgaatgggagaaaagaagcaaatactctcttcaatacaacaatcacataaaacatatataccgtagaaattataaattctaacaaaagatccattgtagcacattgtctaaagtaaacattctagtttaatactggatcagaattactggtttgaagcccgacagcggagaaatccttttggtgctttttatattgtatcttgtatggcaattgaagatactttctcgtattgttctttcttctttactcattgttatagttttatactatattatatgattcttgaagaaaattgtgcttgagttttagatatgaatggatcatattttagagaacaaaaacagaaaaggaaatgaatgggagaaaagaagcaaatactctcttcaataaaactttcacataaaatatatataccatataagttctaaattctaataaaagatccgctgcagcacattgtctaaagcaaacattctaatttaatattggatcagaattccgggttcgaagcccggcagcggaaaaatccttttggtgctttttaagatgtatcttgtatgacaattgaagatattttctcatattgttctttcttctctgctcaatgttatgtttttatactatattatatgattgttgaagaaaaccgtgcttcagttttatatgagggggtcatattttcgagaacaaaaacagaaaaggaaataaaaggagaaaagaagcaaatactctcttcaataaaaccttcacataaaacatatataccgtagaaattataaattccaacaaaagatccattgtagcacattgtctaaagcaaacattctaatttaatattggatcagaattccgggttcgaagcccggcagcggaaaaatccttttggtgcttttcaagatgtatcttgtatgacaattgaagatattttctcatattgttctttcttctctgctcattgttatgtttttatactatattatatgattgttgaagaaaaccgtgcttgagttttatatgagggggtcatattttcgagaacaaaaacagaaaaggaaatgaaaggagaaaagaagcaaatactctcttcaataaaaccttcacataaaacatatataccgtagaaattataaattccaacaaaagatccattgtagcacattgtctaaagcaaacattctagtttaatactggatcaaaattattggtttgaagcccggcaacggagaaatctttttggtgctttttatactgtatcttgtatgacaattgaagatactttctcgtattgttctttcttctttgctcattgttatagtttttatactatattatatgattcttgaataaaatcgtgcttgagttttagatatgagggggtcatattttcgagaacaaaaacagaaaaaaaaatgaatgggagaaaagaagcaaatactcttttcaataaaaccttcaaataaaacatatataccgtataaattctaatttttaacaaaagatctgctgtaccacattgtctaaagcaaacattatagtttaatactggatcaaatttccgggttcgaagcccgacagcggaaaaattcttttggtgctttttatactgtatcttgtatgacaattgaagatactttttcatatttttctttcttctctactcattgttatggtttttatactatataatatgattcttgaagaaaatcgtgcttgagttttagatatgaggggatcatagtttcgagaacaaaaacagaaaagaaaatgaatgggagaaaagaagcaaataccctcttcaataaaacgttcagataaaacatttataccgtagaaattctaaattctaacaaaagatcctttgtagcacattgtgtaaagcaaacattctagtttaatactagatcagaattacgggtttgaagcccggcagcggaaaaatacttttggtgctttttataatgtatcttgtatggcaattgagatactatctcgtattgttctttcttctttgctcattgttatgatttttatactagattatatgattcttgaagaaaatcgtgcttgagttttagatatgagggagtcatattttcaaaaacaaaaacagaaaaggaaatgaatgggtgaaaagaagcaaatactcttttcaataaaaccttcacataaaacatatataccgtataaattctaaattctaacaaaaggtccgctgtagcacattgtctaaaacaaacattctagtttaatagtggatcagaattccgggttcgaagctcggcagcggaaaaaaaattttggtgctttatagaaagtatcttgtttgacaattgaagattctttctcgtattattctttcttctctgctcattgttatggtttttctactatattatataattcttgaagaaaatcgtgcttgagttttagatatgaggggttcatattttcgagaacaaaaatagaaaaggaaatgaatgggagaaaagaagcaaatactcttttcaataaagccttcacataaaacatatattccgtataaattctaaattctaacaaaagatccgctgtagcacattgtcgaaagcaatcattctagtttaatactggatcagaattccgggttcgaagcccggcagcggaaaaatctttttggtgctttttatattgtatcttgtatgacaattgaagatactttttcatattgttctttcttctctactcattgttatggtttttatactatataatatgattcttgaaaaaaatcgtgcttgagttttagatatgagggagtcatattttcgagaacaaaaacagaaaaggaaatgaaagggagaaaataagcaaatactctcttcaataaaacgttcacatagaacatttataccgtagaaattctaagttctaacaaaaggtccgctgtaccacattgtctaaagcaaccattctagtttaatactagatcaaaattccgggttcgaagcccagcagtggaaatatctttttggtgcttttaatactgtatcttgtatgacaattgaagatactttctcatattgttctttcttctctgctcattgttatggcttttatactatattatatgatttttgaagaaaattgtgcttgagttttagatatgaaggggtcatattttagagaacaaaaacagaaaagaaaatgaatgggagaaaagaagcaaatagtctcttgaataaaaccttcacataaaatatatataccttataagttctaaattctaataaaatatccgctgcagcacattgtctaaagcaaacattctaatttaatagtggatcagaattctcggttcgaagcccggcagcggaaaaatccttttggtgctttttataatgtatcttgtatgacaatttaagatactttctcatattgttctttcttctctgctcattgttatggtttttatactatattatatgattcttgaaaaaaatcgtgcttgagttttagatatgagggggtcatattttcgacaacaaaaacagaaaagaaaatgaaagggagaaaagaagcaaatactctcttcaataaaaccttcacataaaacatatataccgtataaattctaaattctaacaaaaggtccgctgtagcacattgtctaaaacaaacattctagtttaatactagatcaaaattctgggttcgaagccctgcagcggaaatatctttttggtgcttttaatattgtatcttgtatgacaattgaagatactttttcatattgttctttcttctctgctcattgttatggtttttatactatattatatgattcttgaagaaaatcgtgcttgagttttagatatgagggagtcatattttcaaaaacaaaaacagaattggaaatgaatgggtgaaaagaagcaaatactcttttcaataaaaccttcacataaaacatatataccgtgtaaattctaaattttaacaaaagatctgttgtagcacattgtctaaagcaaacattctagtttaaaactgatcagaatttcgggttcgaagcccggcagcggaaaaatctttttggtgccttttatattgtatcttgtatgacaattgaagatactttttcatatttttctttcttctttactcattgttatggtttttatactatataatatgattcttgaagaaaatcgtgcttgagttttagatatgagtggatcatagtttcgagaacaaaaacagaaaaggaaatgaatgggagaaaagaagcaaataccctcttcaataaaacgttcagataaaacatttataccgtagaaattctaaattctaacaaaagatcctttgtagcacattgtgtaaagcaaacattctagtttaatactagatcagaattacgggtttgaagcccggcagcggaaaaatacttttggtgctttttataatgtatcttgtatggcaattgagatactatctcgtattgttctttcttctttgctcattgttatggtttttatactagattatatgattcttgaagaaaatcgtgcttgagttttagatatgagggagtcatattttcaaaaacaaaaacagaaaaggaaatgaatgggtgaaaagaagcaaatactcttttcaataaaaccttcacataaaacatatataccgtataaattctaaattctaacaaaaggtccgctgtagcacattgtctaaaacaaacattctagtttaatactagatcaaaatttcgggttcgaagcccaacagcggaaatatctttttggtgcttttaatactgtatcttgtatgacaattgaagatactttctaattttgttctttcttctctgctcattgttatggcttttatactatattatatgattcttgaagaaaattgtgcttgagttttagatatgaaggggtcataatttagagaacaaaaacagaaaagaaaatgaatgggaaaaaagaagcaaatactctcttcaataaaccttcacataaaatagatataccttataagttctaaattctaacaaaagatccgttgtagcacattgtcgaaagcaatcattctagtttaatactggatcagaattctgggatcgaagcccggcagcggaaaaatcttcttggtgctttttatattgtatcttgtatgacaattgaagatactttttgatattgttctttcttctctgctcattgtcatggtttttatactatattataggattcttgaagaaaatcgtgcttgagtattagatatgaaggggtcataatttagagaacaaaaacagaaaaggaaatgaatgggagaaaagaagcaaatactatttttagtaaaaccttcacataaaacatatattccgtataaattctaaattctaacaaaagatccgttgtagcacattgtcgaaagcaattattctagtttaatattggattagaattccgggtttgaagcccggcagcggaaaaatccttttggtgctttttataatgtatcttgtatgacaattgaagatactttctcatattgttctatcttctctactcattgttatggtttttatactatattatatgattcttgaagaaaatagttcatgagttttagatatgagggggtcatattttcgacaacaaaaacagaaaaggaaatgaaagggagaaaagaagcaaatactctcttcaataaaaccttcacataaagcataaataccgtagaaattataaattctaacaaaagatccattttagcacattgtctaaagcaaacattccagttcaatactggatcagaattacgggtttgaagcccggcagcagaaaaattcttttggtgctttttatactgtatcttgtatggcaattgaagatactttctcgtattgttctttcttctttgctcattgttatggtttttatactagattatatgattcttgaagaaaatcgtgcttgagttttagatatgagggagtcatattttcaaaaacaaaaacagaattggaaatgaatgggtgaaaagaagcaaatactcttttcaataaaaccttcacataaaacatatataccgtataaattctaaattctaacaaaaggtccgctgtagcacattgtcaaaaacaaacattctagtttaatactagatcaaaattctgggttcgaagccctgcagcggaaatatctttttggtgcttttaatattgtatcttgtatgacaattgaagatactttttcatattgttctttcttctctgctcattgttatggtttttatactatattatatgattcttgaagaaaatcgtgcttgagttttagatatgagggagtcatatttagagaacaaaaatagaaaagaaaatgaatggggaaaaagatgcaaatactctcttcaataaaccttcacataaaatatatataccttataagttctaaattcgaataaaatatccgctgcagcacattgtctaaaaccaaacattctaatttaatagtggatcagaattccgtgttcgaagcccggcagcggaaaaatccttttagtgctttttataatgtattttgtatgacaattgaagatactttctcatattgttctttcttctctactcattgttatggtttttatactatattatatgattcttgaagaaaatcgtgcttgagttttagatatgcgggggtcatattttcgagaacaaaaatagaaaaggaaatgaaagggagaaaagaagcaaatactctcttcaataaaaccttcacataaaacataaataccgtagaaattataaattttaacaaaagatctgttgtagcacattgtttaaagcaaacattctagtttaataccggatcagaatttcgggttcgaagccaggcagcggaaaaatctttttggtgctttttatattgtatcttgtatgacaattgaagatactttttcatatggtccttctctctactccttgttatggttttatactatataatataattttgaagaaaatcgtgcttgagttttagatatgagggggtcatagtttcgagaacaaaaacaaaaaaagaaatgaatgggagaaaagaagcaaatactctattcaataaaactttcacataaaacatatataccgtataaattctaaattttaacaaaagatctactgtagcacattgtctaaagcaaacattctagtttaatactggatcagaattccaggttcgaagctcggcagcggaaaattctttttggtgctttttataaagtatcttgtttaacaattgaagatactttctcgtattgttctttcttctctgctgattgttatggtttttatactatattatatgattcttgaagaaaatggtgcttgagttttaaatatgaggggttcatatgttcgagaacaaaaaaagaaaaggaaatgaatgggagaaaagaagcaaataccctcttcaataaaacgttcacataaaacatttataccgtagaaattctaaattctaacaaaagatcctttgtagcacattgtgtaaagcaaacattctagtttaatactggatcagaattacgggtttgaagcccggcagcggaaaaaattcttttggtgctttttatactgtatcttgtatggcaattgaagatactttctcgtattgttctttcttctttgctcattgttatggtttttataatagattatatgattcttgaagaaaatcgtgcttgagttttagatatgagggagtcatattttcaaaaacaaaaacagaattggaaatgaatgggtgaaaagaagcaaatactcttttcaataaaaccttcacataaaacatatataccgtataaattctaaattctaacaaacggtccgctgtaccacattgtctaaaacaaacattctagtttaatactagatcaaaattccgggttcgaagcccagcagcggaaatatctttttggtgcttttaatactgtatcttgaatgacaattgaagatactttctcatattgttctttcttctctgctcattgttatggtttttatactatattatatgattcttgaagaaaatcttgcttgagttttagatatgaggggatcatattttcgacaaaaaaaaaaaaaaggaaatgaaagggagaaaagaagcaaatactctcttcaataaaaccttcacataaagcataaataccgtaaaaattataaattctaacaaaagattcattttagcacattgtctaaagcaaacattccacttcaatactggatcagaattacgggtttgaagcccggtagcggaaaaaattcttttggtgctttttatactgtatcttgtatggcaatagaagatactttctcgtattgttctttcttctttgctcattgttatggtttttatactagattatatgattcttgaagaaaatcgtgcttgagttttagatatgagggagtcatattttcaaaaacaaaaacagaattggaaatgaatgggtgaaaagaagcaaatactcttttcaataaaaccttcacataaaacatatataccgtataaattctaaattctaacaaaaggtccgctgtaccacattgtctaaaacaaacattctagtttaatactagatcaaaattccgggttcgaagcccagcagcggaaatatctttttggtgcttttaatattgtatcttgtatgacaattgaagatactttctaatattgttctttcttctctgctcattgttatggcttttatactatattatatgattcttgaagaaaattgtgcttgagttttagatatgaaggggtcttagtttcgagaacaaaaatagaaaaagaaatgaatgggagaaaagaagcaaatactctattcaataaaactttcacataaaacatatataccttataagttctaaattcgaataaaatatccgctgcagcacattgtctaaaaccaaacattctaatttaatagtggatcagaattccgtgttcgaagcccggcagcggaaaaatccttttagtgctttttataatgtatcttgtatgacaattgaagatactttctcatattgttctttcttctctactcattgttatggtttttatactatattatatgattcttgaagaaaatcgtgcttgagttttagatatgagggggtcatattttcgacaacaaaaacagaaaaggaaatgaaagggagaaaagaagcaaatactctcttcaataaaaccttcacataaaacataaataccgtagaaattataaattttaacaaaagatctgttgtagcacattgtttaaagcaaacattctagtttaataccggatcagaatttcgggttcgaagccaggcagcggaaatatccttttggtgctttttatattgtatcttgtatgacaattgaagatattttttcatattgttctttcttctctactcattgttatggtttttatactatataatataatttttgaagaaaatcgtgcttgagttttagatatgagggggtcttagtttcgagaacaaaaacaaaaaaagaaatgaatgggagaaaagaagcaaatactctattcaataaaactttcacataaaacatatataccgtataaattctaaattttaacaaaagatctactgtagcacattgtctaaagcaaacattctagtttaatactggatcagaattccaggttcgaagctcgacagcggaaaattctttttggtgctttttataaagtatcttgtttaacaattgaagatactttctcgtattgttctttcttctctgctgattgttatggtttttatactatattatatgattcttgaagaaaatggtgcttgagttttagatatgaggggttcatatgttcgagaacaaaaaaagaaaaggaaatgaatgggagaaaagaagcaaatactattttcagtaaaaccttcacataaaacatatattccgtataaattctaaattctaacaaaagatccgttgtagcacattgtcgaaagcaatcattctagtttaatactggatcagaattccgggtttgaagcccggtagcggaaaaatccttttggtgctttttatattgtatcttgtatgacaattgaagatactttttcatattgttctttcttctcttctccttattatggtttttatactatatcatatgaatcttgaaggaaatcgtgcttgagttttagatattaggggatcatattttcgagaacaaaaacagaaaaataaacgaatgggagaaaagaagcaaatactctcttcaatacaaccttcacataaaacatatataccttataaattctaaattataacaaaagattcgatgtagcacattatttaaagcaaacattttagtttgatactaaatcagaatgccgggttcgaagcccggcagcgaaaaaatgtttttggtgcttattgtttatgggttatggctttgcatagtactattcatcacttcttttcaactgttagtactattcatcacttcttttcaacttttaaaagtgcattaaattgacaacaaatgatgtcctcaaaaactcaactttctctcactgatacatccacacacagacacagacgtaatgtacaatttacttgacgtaatgtacaatttacttaacaaaaagaacctcgctagctacaataacctcacaacatatacttgtatacatttatatataacagacatctgccacctgactggcttgaatatggatcttatcctgctttctcatgtcagatcatatcacacccctttccttacatataccttggatatgggttgtaaccttgcggttgttgcggattaccattggatacaaatgggttgccaaagggattgttcatgttctgctgctgttgttgataaggttgttgtacaggtcccatcatcattcctgcattctgatgctgatacccgaatgtttgatgattttggttcgccatttgaaaaggttgaggagctgcgactccattagatgcatagaaaggttggtgcatcatgtgaccattatgaactggattttgttcccatggattatagctcctgttttgctgttgactcactctgattgcatcctcatataggctgtcaagtgtgagcttgtccagtccacccgcctttttattcaaatgacacaggaagacatctaatgtcataaaacacacttctgcggctaaacataagaaatagagagagggagagatgctatctaccaatttgctatctgcagcggcaccttcatttgagcttggggcagtcacaagtgccaattcccagccagtcgaattaccatttgtaaaatcagttgtcgaatgtggctgttcaactggagaaaaaaaacatcagattaatttcaatttatacgtttaccgggaagataggatctaaggaaggatatatcaataatgccatgcgaaataaactgtataccgctaacagggacaatagccaaagccaaagcatttttctcttcaagttcagagaccattggagctggatcatccatagactaccaggtgaaagtcaaattagtcagtagcagttccacgaaaaagaaacgctaggatgggaatagttaagcaactagacaaataccagaaggtcaggttgtttctctacaggcttctctgcttctgctttaactggttcaggtgatgctggtttctcttcaacaaccttcgggggaatttcgtactctatggccaaaatctctttgggagcagtaagtttctccactacctgccattatcgtaaaagttaagtgttaatgcttaacagcaacttggatcacagtgaaggaaatggcaatgagtttgttcatgcagaacgaataagaaacgcctagaatatttggatttacaaaaccaagtacaaacgaacaaataaagaaacgaagaaaagatgctcttgtacctgctctttcttgacccctgctgctaatggtgcttctttcacatactcttccattgcttgtagaaaagaagtgggaggcttcatacaaaacaagatatggtgaggaaaaagctcagacaaataaccgaataaatattcacatttgtaagaaaatccaacctgctcaatctttataaatctctctccacgtccaacattaacacttttgcaaacttcgaaaaattcagaaagcctccctgcctgaacgaccaatgaaaccaaacttaagggggttcttatgccacacaaacgtgaaagaagaaaccaacataccagtcagaggttgtatgtacctgttttaccgctcgtctgtacatatccaaagccttcacagcatcattccgttgcatatcaaagaactgtcatcaaggaaaaattgtgtttgaataagtcaggaaaggtagaaaatatatacagaaaaagagcttttgcgtaccttatcaaccaaattgtctatgccatctgtcagtgcttgatatattttagtgctctcagatataacctaatcggtgagaagtagattgaaaatcataaatgctgttaaccatatttaatcgaggagctattaactccagttaattgtatatagcataccattgagagtgccaattggataatgtggttttgaacagctgccccttcaggctgcaaagatgcaccaatgttgaatgagtgtaaaagagatacaaatcttatccattgctaagaaaatcaacatcaaacacaacagaagaagtagatgctgagttggattatcacctgacagtcaagaacacggaaaagaagttcttgcagagcaggaagttgctcgagcaaatcaggagtgtccaaatctttggttctctgtatttatagcacgttcttgtgatttcaagagtgaaagaaaactctgagagctcataacaaaagagatgtaaccagacacttactggggggtcaacctcaacatcgtacttcaaaacacggaaacactctaatcgctcctctaagaatagagcatagaaacggacccaagcagaataagcccaagctgaaaataggggtgaaagaaagataagtgaaccaaagagcttcttgtataaaaaagattcaacgaaagtaaaaagcagtctactaccatttggaccagaatcatctttaaaatgagacatattcagcatatgacttctgcttctgctataattaataacttcttcatgaaatgtctggtccacttctctcaaggcacggtgaataacaataagagttttcagtgcaacctgtaaaactaaggagaatcagtggcaagtactaaatagaaaacagccaccttttctttacaacgatagataatcaaccgaaaatgaagctgtagacagatcatacacacctaacaaactaagaattcccaactactggtacatatctagcaattccagttgtttccagagttctaataagtaaacctataggaaggccatagaaaaagccattaccgcccagttatgtgttcttgataaccgcctagcaagagcatggatacaataagccacatctgcacgaggccttgttgctgaaatagccataaaaatagctgcaaagagacacacacaacttgtaatacgccatttggtatatcgaaatcaatggcgcaaaagaacatttgcaaccaaggcactaaccatctatgatctatgatacccacctctgatgtatctttctttagaaggacgttccacatgattagtagccttcacaatagcaatatccaattcctgcaaaacaaaccgttgttagcttaagcaaaaacagaattcacttgggaacaaagttagttttttaccttgtaatcactattgaccttagctaatgaaactgtggtggtatctttaatagctccaagatacctccttaaactactctgtgatccaccaccacctgacatttcgtttctccctccttaaacaatagaaaccctgaaaatatttaaccttgtaaacagtcttcgactttcacaaactcatcaacaaaacctaaagatgaaaacttttctcttgaatcacaaaacccttatgtcagctaagaacataaacatcaaaatctacccaaaaacacaaacttttcattgtttgatcaatacccataagccctagattcatcaataaccaaatcagtccgagaaacatgagaaaacaacgaatcgagatccgtaaaggagaagactttaaatcacctgatcaaggtttcttgaagacaagaagggaaatctcaggaagaaagaagacaaaattcaacaacaaaggatttggaaattggacaaggacataagagagagaagacgaagaagaagaagaagaaggagagaggtataaagtcagagtctttctgatatgtacgttggaggaaaaagggaacaaagtctttgttagcgaaaatgagctaagagctaacgtgatttggtttggtttggccgccgacgaaaattattattctttttataaaaagaaagtctatcgctttaattttaaaagtctgaaaataggtcaaatcttgacaattattccacgttactatttgtattagccaattaccttccagaattctgtatactaattattacaataatgttgaactgtcaagacgtcagtaaattaaataagaaaaaacaaaaatcattgagattgatcattaagtagatctaatttgtaacatattactagatatatatatttcagactattatgtagtaacaattatttttttatcatctaattttaattagagttcaaaaaatcaaatttaaagaatgttgtttaaataaatgatatgaatcggtgtggtacgaatcatcgcagcaaattatctattttgatattatgtagtcataatctatatatattaacaaataaaaactttgtctttcttctttcactccttatcttttagagagaggacgatttgccgtataccggaatattgttataaatattgtttttcccattctaatcgaatatttttttcgctttgttggtttattttctctcccttatctgaatctaataaaattgcgacttaattctttgctaagatcatttctctctatttctacaagatctgaatttgaatcctgcttgccatatttgatcttctcgtcccaccgttggcttaattccaatctttagctagaataatatatttgtcgattattatgacgaggacctcaactaggtcttaggcgtagcttctgctaggaatcaaggttaagatgatgaaggattaacgatatcttcttgcaacgacgaaagcggtggaagtcaatcgaatttgcaacgacaaactttgtagaaggagtttggtggtggatttgtgaagttaggggcagaatttgcactgaatcgtggatcttgggcggtaccgactgtatctctctctccttctcgcgtatcaacacgtgttgtacatgtggcaccttagagcaaccacagtgattagtttataaagtttctaagtattttttattaaaaagttttgatagttttgtagttttgagattttgtacagtttttgaaaattttatggtccattggtggaatccttaagtgggtttctaaaaaaaaaaaaattgtcaatatttttatttgagcaaacatgattattattattaggatttttttttttttttgaatttaatgttaaattatattcaagaaaaaataaacatgtttacatcaaagtgtatactgtttttaatttaaatcttgataggaaaaaacccatagattaaaactgtatacgccatatcaactttaatacacttactttgtttgcttcttcaatcgaccacagccctagtccaccttcattctttggtgtgcagacctcagtccatgccacttttacctttcgagggttcatagatggtcctgaccacaaaaagcttgaacacagtttatcaatttcttgaatgcatgctttgggcagccggaaagcagctatccaaaaatttgtaagactgaagatcaccgagcgtattaattggagtctccccgcaaatgagagtgctttaactgtccaagaactaatctgtgatttgattttttcgatgagaggtagataatatgacgatgtcatcctccttgttagtagcggaagtcccaaatatctaaccggtaatgttccatgttcaaaaggaaattgttggagtatctcttccctttgaatttccggaataccagccatatataatgtagacttctctagactaatctttaatcccgaatgtatagcaaaatcatcgaagaccgcaagtgtaccttggatagatttcttgtttccttcaacaaacaccatcaaatcatctgcaaaacatagatgtgttagcttcaatagcttacatttcgggtggaagcctatctgcttgtcagttgctgccttgtcgatcttgcgggatagaacattcatacatatgacaaacagatatggacttaaagagcagccttgtcttaatcctctttcacttccaaaatatcccgctagttctccattaacttgaactgagaaagaagccgttgttacacaggtttggatccacttaatgtattgttcaggaatgtctagagctcgcagcgtgttaagaagaaacccccattgaactgagtcaaaagcctttgagatatctattttcattgcgcaccgaggggagatcgattctttgtggtagtctttgattacttctgtggcaaggagtaaattttccattagcaatctatccttgatgaatgctgattgatttggtgtaatgaattttggcaaaatgatcttgagcctatttgccagaatcttcgatataaccttgtaaagaacattgcagcaggagattggtctgtaatccttcatataaatggcttttttttcttcggtatcaaggctaagatagttaagttaactcctttcggtaaaaatcctgtcttaaagaaagactggatagctaccacgaaatcacgtccaacgattgaccaagtttctttgaagaactcacaagtaaacccattcgggcctggagatttgttggtaggcattgtgaaaagcacttttttatctcatcttccgatacctcatgcgtaagcattatcgtatcctccttagcacatttgaattccagtagctctgccaactcctctcttgaccattcaacataatccggaggtttgacagtgaggaaatccttaaaatacctctccgcttcagccttgatctgttcttggtttgatgcagtagctccattttcacactgaatctccttaatattgtttctaacctccctgctttttgctgcattatagaacattttattgttctggtcccctgctgccatccagtgaagctttgctttctgtcgaagatatttttcttcgatttcagacatcctctgccatctcgcatatgccactgcctctgcatgcacagattgagttgttggagccatcattgttgcagtttgtaattcgcagagcttcttgtacgcctcttttgtttttatcgatatgtctccaagtagttttttccccatatgcctaagctgaggcttcatactctttaacttctttgataacataaacattgctgctgttgagtggtgtagctgaggcgtctgtgcccatatctcctcgatcgtttctttataatctgccatgctagttaaagcattcgtgaatttgaatggcctcttgacttttttctcttgttcctttatatagaacctgcattttagatgatccgaacagccccctggttcgaatacagagtatgattggtcatattgttgtagccattgcctactcaccaacactctatcaagttttttgtagattactccatcctgcctcttattactccacatgaatcttggaccttggtagctcaggtctgttaattcacaggaatgaaccaaattttgaaaatctctcatacccggcgagatggagggagctgattcatacaaagaatgatcttctccatccaacacttcattaaaatccccacagattagccatgctttaccttgaaacagaggtgaatcatgatgatatttaatgtcttcccaaagtattcttctatctgcaacaaagtttgatgcataaataaaagatacaaagaattcttctcttctcccttcaatgtagattgaacaagtaatcatctgtgaggtcttatataaaggcgttaccctaacattatttttccacaccaaccataatcttccaagtcgatgttcctcataatttgatagaaaagaccactcgttgaaaaccgactgtaaaattctatgtgctcttctttccttgacttttgtttcaattaagcagccaaaatcaaactttcctacacgcatccattctctgagaacatcatgcttacttttttttattaaaacccctgatgttccaaaagaatcccgacattagaatttttttggtctacttttcttcaaaataataggattgttagtcctattactttgcgttgcatttgtagataagaacttgtgttcctccttcgaagctcgtggaagtgattgtcgaatcattacctcctcaacttctctttgtacactgtttttaatttctgcaacttcttttggagtagtgtcttgtgtgtctaatccctgctcttcttttccctcaggttgcgattcatgaagtttttcatcaccagaaatagttatctccccttcttcctctccttcttctttgtcactaagacatgagaaagtattagttagaagtgatacttcaccaaaccgtaattcctttttgttgactgggcttcttcctacttttgttggtgtgctccactcattattgcttcctttcaccacttccaactcatttccattgttctctgtgtccttagattctaacacttgttgtttctttccttcctctgctacatttttcttttctcctgatttttcctctgtaacctctttttctgctgattttgtttctatattcttcttcttccctatcaagcagtctgatgtttggtgaccccacttgttacaatccgtacatctcggaggtagccaaggataaacgaactccacaattgtgtccccacatgtttctgatttaaacgaaaacaactttggtagtttgtttgttaaatccacttccactaacacttttgcctcttcaaatgacttgcatgcttctgtatctggatggagtttctgtggcactcccaatggacttgttatagcctttaaaactttccaagagaaatactttggtggtacgtttttcactatcacccaaaggggtatagttttcacctcttcttgttccatgtcagcaatgggagtccattttgacagcaccaccggaacaccacgcaaattccacatacctcttctgagaacacgtgatcgcatacggtcatccttgatacgaaatcttactgttgtattgttcatgacaataacgtcaatcttcacagttttgtctcctaatgtccatatttgttcactaacgcatgtattcctccaacgaacggagcttttgctagaaactttccaactaggaaatcttcccagaggggttttgcatccgcaaacacactgtttggtattctcgtcgttggcatcccatcaatttcctctactaccaactctacttttgtttcaacttcgtttttcaccactgctacccaggaatcttgtgttgtagttgtgttagtgattacaacatttttattcacatcttgagttattcctgcaattttctcctcccctacattctgtttctcatctccttcaagcctccctgcaatctgtttctcatcttcagatctgatcaaaccacccgtcttatcatcatccacagttaacacagtcccttctgatattcccggactcaaatccccaacttccagcggcggagatacctccggcggcatggaacttgctgaagaagctttgaaaccctagatcgcccttttttcgcctcagagcaaaacgcagcgttttctataataaattagtgttttattaggaattttaaacatacctgatataacaaaaaaaaaaaatattaaaaagcgaaaaaaaataacgattacattttaagattgattatgataataatgttttcatacatgttcaacaaatcagctttcaattcttcatgtttaatccgatcacgaactcgggctctaatggccatcatattaccgagatttggaggcatatctatagcataggtgaaatctacttgtgaagagatggctgattctggatgtacgaattcagatacatcaaactgagtgtacccatctcgttcgtcttctactatcatattgtgaagtattatatatgctcgcataatatttctaattttcaccttatcatgaaaaagagctggatgtttgacaatggcaaaccgagcttgcaaaactccaaaagcacgctcaacatctttacgacaagcttcttgagttatagcaaataaagaagctttatcaccttgtggaattgaaattgattggataaatgtaaaccatttaggataaattccatctgtgaggtagtaagccaaattatagtcttctcgttgactacgtatttcactttcggagctcgaccttgtaatatatcatcaaaaactggtgagcgatcaagaatattgatatagtttaaggtacctggaggtccaaaaaacgcgtgccatatccagagatcttgggaagcaacgacctctaaaacgattgttggttttcctgatccacgtgtatattgtcctttccaaacagtgagagagaacaaaaatcaaatcaagccgccattgttgaagaagaagaagtttcttagataagtgaatctcaaatttatgtcaaaacaaatatttaaattgcaaaataaatcacaatcttaaagaaatcaagacctcgtactccccaattagtctagagagaagagaaagctatcgtgtagagtggatttggagattaattgcagatttggaattgaagatattctgagaaaagtttttttcttcgataaagtgagaaaaaaataaaaaaaagagaaaagagatgggataatgagagagaagagatgggaaaaggagagagaagagatggccgatgaaaaaaatgtaattaaaaggtaaataagtaaaataatttatctaaagtgtcttctccatttaaagtgcctaattaggaactaactttcaaaaaagtgtctaatcacgtaatattctcttctaattattatgaggagaagaaaaacaaaagtttttaattattatttattttaaagttttattatttgtttgaaagcctcatatttgagactttagaaaattgaacgtaaaaaataaaaaagtgggcagttagactttaaaaattttaagaaaaaactaaagtcttaaaattgtgattagtaaatatttgacttttaagacttccaaaaaattaaagtccttaaactttcttagtccaatcaaattaagcaacttttaactttaatcaaggttgtaaatgttagagtttgggcttttcttttcatcacttgtatagcccattgggctcaatattaataaaaatgttggatgacaaaaaaaaaaaaatagtatagattaacaaaatagcgactgacttattaaaccaaaaaaatactgcatacaagaaaaatagtataattttaaatttattagatagttttaggacatgttattcttaaaaaccttatgagttttcatcattggtttaagtatttatctaattattataaataatatctcgaaattaaaattatttgaaaatttaaatagttttgctaaacatatatatagtatgattttatggttcatatatatttatctaattattataaataatatctcgaatatttaaaattatctgaaaatttacatagttttgctaaacatatagatagtatgattttatggttcatatattaatttatttttagatatatatatttagtatattttaaaacatatatattttaaatatattttaatatatattaaaacatatatattttaaatatatttatatatactttaaaacatatatattttaaaaatatttttaattagtttactctaaaactattttattggtccgccattatataataaaattataagattatggagacaagacaagatcagatagtcgagctctaagattacaatttacaagactgatttgcaattagctcaaacactaaaagaatacgacaaaggttcttaaaggaagtctaaaagaccaaaattaaactttctaattcgatatgcagtaaaatgtaccaatatcaaactctttgcatgtgttggaaagttctcttatactagtcctaccggccaattcggtcaatgatctcgaaacattgactaaatcacttgaaagatattttccgatatgttcaaaaaagaattcaatagaaaatatagtttgactaaattgaaatatgccattttaaaaagtaattagtatatgctattttggagtcaacaagaagtgtaacaattgaagaatgaattgaagtaattacatatgaatacttttctattagcttacagtgtacctacatggctcattatatctggcaatctaaatattgccaaaacaaaaaatttgtttcggattggccctaactacaacatctgctcaaagaaggaagataacatcaaaatgtggttacaagccctatgcctacttctgcgagttcgtcccatacaggcaggagtgtcaaaaccactaggattagtgcaatccctacaagggccttcctccaagttccaacctcggtcacgtcgtttagacacagtttttcaggtgttctatgtccaaaacatactgcttagaaacatcttttaaagctgactcgtatttttgaagtagcagagtttagaaattttgtgtacccggcagattagtacgtagagtccccaaggaagtgccaaagggccaccgagctgaaaagtaggaaaatgccagagcaataaactagcaggttcgagaagtataaatcaacactacaacattaacagttgaacataccactctgagtccaagcattacataggttgacaaaccaaatgtaaccagtgcatttttcccaaatgcgccctgcacaagatccatgcccatatgtctcagacgtgattgataatatcaacaatttgatctcttatatgaatatctcagacccttttcagttcatacttcatctaaagtacactacttttcaagattatataatagtatacacttgaatcaactgcaacactttccatccctgatacgagtcaggaatgcaccattaagtttctagttttcaaatagagtatgcaccattccttatatacgagcaagtacctgtacagctcttcctccatccaaacatcccactggaagcatattaaatgctgttgttgttaaaccacacctaacaatcaaatttcaatgtaagagaaaactgtcaaaattgctgatgaataatataagcatgagccaaggcataagacgctaccatccggcaattacaagcgggtggattgaaactgtcgcagcatgcaaagctctgcaatcaataggaaaacggaaatggagattggagttaggttttttcgtttagggtgaacagtcgctagctgtggagagcttacgcatatcccagagttgctctgctgatgagtccaagaagtaatgaaccttgaaataacatgctgggaacctggaccaggtcgttagctgcatctggttctgtagataggaacagaccaacagcaaacatggaaactgagagtgcagctccagcaaatggaccagctagcgaaatgtcaacttttgtactccggtcaggaagaatcgacttgaactgcacaaatcaactaaaaggattactaaaggctaacactactatatcaggcttatcagccaatattattgtcttcgaaaaacttcaaaatgttcatcagagaaaaaagtagattgatgcatttaatagagaaatagatggatgcattttcgagcatagtaccgtttcctagtttcctcaaaaaagtttgaaagatgactgcttctagatattaattacataagagttcaacaggagataagtcccctaaacttgaaagacttgcaatagaaatgctaaggaataccacctgtgtgattgcaccaaagcttcctagtgtaatgcttcctagtgccctaattcctgcaaataaacaagtcatagatataactctctaaacgaagcactgagagcaaaataagaaaatcagatatcaccaatacatgaaagttaatcattccaccaagtaagcatccctgcttggtatgaatttgaaagcaaacatgtatccactctataaacgaagataaataaaatagacgaagacaaacctaaaaaaaaactagaaattacagctcatttgccattataagccaaacaaaggaggatacaattttccctcaaattcattgtcaaagaatgtggaagttaaaatttgggaaggggcttgaaatcaaagggtccagctactgccactcacggcattgaccacagctccagctacttccgggtaaggctgaccatggagaacagtgagaatgtataagcaatccacaaaccgtgcacaaaagatcaggcgctggatccatttgcaaacatctctgacatggacccatatcatcttcacactcttctttttctgttggttcgaactgagggtttcctgaaacaaccatatcaccattttcctggtactgaccaccaccactatcatcggctgtcagtagctcggtcaacgagaaataagtttgcggttcaaattccatgtcctcgtagtcgaaaagtagctcaccagacaaatcccattctgttagaacaggtaaagcttgctcctctgcctcgggtttcacaataggatgcagttcaggataggctgcatcagaatcttctcgtttcacttgccttctaactggtagcttttggggtccaggcgcaaaagcagtggtgctccattcaagatcgaaactactgggtgtgatttgtttgactttggaaactgataccaggagaggatcatcttctggaataaatacatcgtcaggaggatataaaggagtggcaggtaacggagtagaaggtttcgagtctttttgttcagacattctttcagaatcagaatccaacccagaatttccttgcctctgtttctggttcgtgaagactattcttttgatctgcttctgttccttgagtttgggatccatgtaagggcaatcaggggatcgtatacgtcgacatttgcaacatttgaacccaacaacttcaggaatttgtgaatctttgagcttaacagcttcagtgtggaaccactctgcatttgagattcagatattagataatataacatttaagacgccttcaagaaattacacttggaaacagttgtcgttgagtgaataattccttactttcgcattttgtacagtgaatatacgttaacccaggattatacggcagtaggcagatcccacaaaccggttccaggctcggtttatctgatctaccggccaagagaatgttttgattccggaaatcaacacctgtgtcctctacgttctttttcctccatatgactccacaggacagtgtcttctgtttactcttagatacactagaatcaggagtgacttgtttaactcccgaagtgttctcccgtggcttctgggatgataattgttgactaggaggcttaaccttgatgactggaatgactgcattttgatgtcgtacgttgatcgtgaactggggtgctgttgactgtctgtgattgatatttgttggaactcgagtttttgaaaggtaacaccgtttgcaggtgaccagaacttcaacatttccatttgtgtgttgagacatcgaagtgcaatccttgtgacaaaatcctaaaaaaagaaacaaaatatgacaatccaacgctgatgcacaaacatactgatatactacaacgaaaaatttgcagtccaaaaggagcagtgagattaatccttctttgtcaagttagcaaatgagatgctaaaatagaataagataacgcagggctgcattcccaatccattaggtggattcgaactttctagtttttatacaaaatgcacatattgaaacagtacgaggatggtattttaccatggcaagaactgcatgttgttgtatccctgtcgacatgtatacagaacgaagacaaaattaataaagtacaccataaagtttagcaggcacctcaaaagataaagaaaccaaaggattaccgtaatagaacatcatgatcacatgatgcacaagaacatttctccatcttgtccctccttgaggctatatatgaaaatatgtccatgagggaagctttcagctgctttctctgaagctttgataatttcttggatggcttcttggttgaagaaggcatttgtactctatgcaagctctcttcaaattctttgatcaagtataggggaacatgggcttcttgtaaccaatacttttcatttctatcttgggttttctcgacctccattatattcttcatgacgcgtgatggcagatgcttttgatttccaaagaaaactccgtagctaaccttgttatcactaagctttttgtcacatatccgagcgtttctaaaaatggcaacatctgtctctgggcctttgacattctggagattttggtctggccgcacaagttctctccatcttaaactcatatccagatatcttacctgacataaacggttgactgggtctcagaaatacagttaatatacctacacaaactaaaaactataaacatagaacatagacacaggcctgaagagcaagctgagatatattcttgctactttcaacagcagctttccaaaaagaccgtctgcttctcctagggatgtaagaagcatcaccataatttaatccaggaatctttttagaaccccctaataagtaagtaaaaaataattagtgatccgaaaaaccatttagtggcatggaatacgaattgtagagtgctagcatctaaagggattagaaaaccaaaaccaaatttagtcgcacataaaacataaacaaacaagtaatagttataccttgccaagctgctttctttgttgccggttgtgacaaaactgctttcaacaaaataacttttgataacttccctcctcgccaccatgtaaagctatcagcgtcggaaccttcagctgtaacttcagcctgggtattttgcttcgtcctaccaggtccacgtctctgtggaaccccaagtgtaactggagcactttggaaaatagaatgttctatcaaccaatcatccatctgtttaaaccaatcgcatgacagagcaatactgcagatattttcctcaagctgcaaccaggataaacaaaccacattgcggagatgagaacaagagtgatcagatgtacaacaaaacaaatatgattcatatatcacactatagtgtagactatcaaatttctagtctagagagaaatcgaccaagagtgttctaatgttttaagaaacaaaaaaatggagtagataagatatggaaaaaaatttagatttcaaccaagaaatcttattataaagaagatctacttacttcaaggaggggtgcttttagggctttgcatgtcgaggcttcctctacctgcttacgccactgttttcttggactttcactgagaaatggcccagctatcagaccacgcaagctttcctctagatatagaatatatgctgcaatactcgaaaggactccctccccattctttagaggaaaaagaccactgaagatcttcattgcacccttagtggcacccgctacagctgcatttaacatgcatcctctcctgcttgcagatgtgagtcggcaagaatgacaccaaccacatctttctctggtaatctccttcttatcaggacttggccagaagaaacggggggctactaatgaaaaagctttcatctgctctaagatgttacttgatgcagctttcttggcactattatacttgcgaaggtcaggttcatgggtttcctctgacgataggacagccaaactggcagcagcagatacagccaattctccatttgtgtaatgattattgtatgtgttgggtttaaacgataaacccaggtaggtaacacgagcagccaattttttcccctgtattccacatgaacctcctgtaacagcactgttggtattacccaaagtagatgtagggaggtcaaacacagtctgggtatgacttctattggaaatatttgcactatctgacttagtgatctctgaaaccttgccatcctctctatcctttgcttgagttaaaccaatctccccttccctcaaggagataccttcaggaagatcccagtattgggtgatcgctttgcaaatctctacatattctagtgtatggcttgatgcagatataagcactagtacaacttttgatatgtcattaacattgtagtacttgacaactgcatctccattgacagatatgttaagcctgtgatttaagagaaaagaaggagaatgctcatcagtgtcacaacaagcaaattcaaatgttccagagtaatgctggctaaaacctgttagcaactatttgcctaggaagtaatgaatcttaaactatgtagcaggggaatagattgaaagatcaggttgctaattccaacaaatgcaaaacaaattatgtatgaatggaggcaacgaaaacatacaccagtaagtgattgcaagtacccaagaagagtcgcccatgtggatccattccaaactgtacagctcctctaagtgaggttccatgagcaatcttcggcccctttttgttaatagtgcactctggacaaaaccatggcccatctggtatatacattttgaccacaccaatgcatcttgagtggtatgctaaaggacatccatcacaacaaagcaaggttccatccattccacaaatcctacattcatcactgtttccatctagatctgagctaacttcatttgaaccgccattagtacatcttgagtccaaatctttagactcgtttgttgagctatcagtaacctctttttccttgtaagctgaggttttagcgaatctggggtggacccgtctaggtacattttcaagaagacctgtggcaactctatcaggatcaaatccaatttcagattcttcgcgagcatctatttcatctcttagatcagctacatcaaagatgtcatcacagagaatttgtagaatcttcaatttcatcccaatgggtaacgagtagtattctatttccacaacaaatttgttaaaaatgttccactgaggcccactagcatgccccatcgcagtaaagtactgaaccaaataaacaggccaagttagcacatcgagcaagctccaatcaatgcacctgcagatagcaaagcaacaaaatctgtgaagtcctctcagctaaagaggtaaagcatcctaaaataagctctttcgaccattttcactggcagaagacaaattttgcattaactagaattcatgtagttcagaaacctaacccaatgaccaaatctgctagttcgtaatatgatttatacactatgaaaccagaaaaggctcaagaaatgagaacatatgctgtgaacatccggaaagcaaaacagaaacttccaaaataaaatttatctgcacttacctcaagcattttgaggctaggacagacttggaggaggaaagtctctctagatgacccttcaatgcccgcaacaaggccacatgaacagcatccaacaaagaatttggtcccgagaaatacaacgctcccacaaaatcattgagttcaaatgggcagatataaagctgaaaactaaatgaccttaagaacccatatacagataagagatgtgccacagcctcctctgggataccaattgtccctgatgaaggaggtaaatccactggtggaacaagaggagcctcaatttcaagatctgaacctctcttatctccactctcagacgactctgagtcactatatgaatcaccatcttcggagttcgtaactgctcgtgcctgcactccatttacttgatttggcaactcaactgctttgttctccggcgaatttcgtttctttttctcctccttcttcagtataagtttatctaatttcttccttctaacacgtaactcatcgtctaagtaactatccgaaataattaaacgacgaagatcaccactctccaattcctcacaatcaccatcctcatatatcactctatataacccagtatcataagacactatcttccctagaaaaacttcattgtcatcaaaatctttcagcatataacaaccaagtaaagatatcggcactgcaggctcaacctccagaacttgctttttccctcgattgttcaattttcgattatcatcctctaatctctgacgtttcctcggtcttcccctaggtctaggaaccttcgcttccatcaaaacaacctttgggggaatttcatactctatggccaaaatctctttgggagcagtaagtttctccactacctagattcatcaaaatctcattgtttcatcgaaacccataagccctagattcatcaataatcaaaaggtttaaaacccaattcacatggaacaacagcgaatcgagatctgtaaaggagaagacttaaaatcacctgatcaaggtttcttgaagagaagaagggaaaactcaggaagaaagaagacaaaattcaacaacgaaggatttgggaattggacaaggacataagagagagaagacgaagaagaagaagaaggagagtgctttttcctttaagcctgcgtgcagctgtggctgtggttcttctccctacagcttttccctttaagcctgcgtgctttttctggtcttggcctgtttgggccttgtacttgttttttattttcagttggacatgtgtgccttcatggcagtatgttgccttaaacgcttgggcctgcgtgtctttttgggcctttgggccttgtaactttgttttcttttcgggaaatttaagaattaccttccagaattctgtatactaattattacaataatgttgaactgtcaagacgtcagtaaattaaataagaaaaacaaaaatcattgagattgatcattaagtagatataactagatatattattttaagactattatgtagtaataaatatttttttgtcatcttattttagttagaattcaaaaaaattaaatctaaaaaaccaaattatttgttttgatattatgtagtaataatttgtatagattaacaaaaaaaacttaggacgatttccgaaataccggaatattgttataaatattgcttttctcattctaatcgaatatttttcagctttgttggtttgttttctctcggttatctgaatctaataaaattccgatttacttctttgctaagatcaattctctctatttctacaatatctcacttggaatttcgcttgccatagttgatcttcccgtcccactgttggcttaactccaatcttgagctaaaataatatatttgttaattattatgatgaggacctcaactaggtcttaggcgtagcttttgctagaatcatggttaagatgatgaaggattgacgatatcttcttgcagtttcttcgagacggaaatagtggaagtcaatcgaatttgcaacaacgaactttgtagaaggagttcggtggtggatttgtgaagccagcggcagagtttgcaccgaatcgtggatcttgggcggtaccgactatatctctctctccttctcgcgtatcaacatgtgttgttgatgcggcatcttagtttcttaatctaatcaaattaaagagtttttaactgtaatcaaggttgtaaatgttggagtttggacttctcttttcatcacttgtatagcccgttgggctcaatatcaataaaaacgttggatgacaaaaaaataaaaaatcaatatagattaataaaatagcgactgactttttaaacccaaaaaatactgcagacgagaaaaatagtataattttaaatttattagatagttttaggacatgttattttaaaaaatcttatgagttttcatcattggtttaagtatttatctaattattataaataatatctccaatattttaaaatatttgaaaatttaaatagttttgctaaacatatatatagtatgattttatggttcatatattaattaacttttagatatactatttatctaaaaaatatgtttttggtccgccattatatagtaaaattataagattatggagacgagacaagatcagatagccgagctctaagattacaagactggtttgcacttagctcaaactctcaaagaatacgagaaaggttcttaaaggaagtgtaaaagaccaaaattaaactttctaattctatatgcagtaaaatgttccaatatcaaaaactctttgaatttgttggaaagttctcttatactagtcccaccggccaattcggtcaatgatctcgaagcatcgactaaaccacttgaaaggtattttccgatatgttcaaaagaaatttcaatgtaaattgtagtttgctaataattattttgtacactatcgcattggtaactaaattgtaatatgccattttaaaaagtaattagtgtaataattgaagaatgaatttaagtaattacatataaatactttttcactagtgtacatacatggctcattatatctggcaatctaaatattgccaaaacaaaaaaatgtgtctcggattggccctaactacaacgtctgctcaaagacggaagatgacatcaaaatgtggttacaagccctatgcctacttcttctgcgagttcgtcccatacaggcaggagtgtcaaaaccaccaggattagtgcaatccctacaagggccttcctccacgttccaacctcggtcacgtcgtttagacacggtttttcaggtgttctctgtacaaaacatactgcttagaaacatcttttgaagctgactcgtattgttgaagttgcagagttaagaaattttgtgtacctggcagattaatacgtagagtccccaaggaagtgccaaagggccaccgagctgaaaagtaggaaaatgcaagagcaataaactagcaggttcgagagcactaattaaaggagggtatatttcaacagttgaacataccactctgagtccaagcattacataggttgacaaaccaaatgtaaccaatgcatttttcccgaatgctccctgcacaagaaccatgcccatatgtctcagacgtgattgatagtattaataatttgatctcttatatgaatatctcagacccttttcagttcatacttcatctaaagtacactacttttcaagattataaaatagtatacacttgaatcaactgcaacactttccatacttgatactagttggattgttttaatgacaagatagacttggaagaagcgtttttcttggtatgagtcaaattttcactaagcaacattaagtttctagttttcgaatagagtatgcaccattccttatatacaaggaagtacctgtacagctcttcctccatccaaacatcccactggaagcatattaaatgctgttgttgttaaaccacacctaacaatcaaatttcaaagtaagattgctgatgaaagacagaagcatgagccaaggcataagacactaccatccagcaattacaagtgggtggattgaaactgttgcagcatgcaaagctctgcaatcaataggaaaatggaaatggagattggagttagattttttcgtttagggtgaacagacgttagctgtggagagcttacgcatatcccagagttgctctgctgatgagtccaagaagtaatgaaccttgaaataacatgctgggaacctggaccaggtcgttagctgcatctggttctgtagataggaacagaccaacagcaaacatggaaactgagagtgcagctccagcaaatggaccagctagcgaaatgtcaacttttgtactccggtcaggaagaatcgacttaaactgtacaaatcaaataaaatgatttactaacgctactacactagccaatactctcgttatcgaaacacttcattagaggaagacgaatgcattgagaaagagaagtaaatggatgcattttgaaccatagtagcgtagaaagatgtcttcttctagatgtgacttacctagagttcaacaggagataagtcccataaacttaaaagaaatgagtaggattattacctgtgtgattgccccaaagctgccgagtgtaatgtttggaatgaagtatggaatgctaagcttaactttctttggaactgcagcaagaaagtgccctaattcctgcaaataaacaagtctaaacgaattactgaaagtttatcattctaccaaggaacatgtctgcaacatcataaaaagaaaagcattacgatagagacacataagtttttacttacatgaaacaaaagaattcccaatacaccataagctaaaggcaatgcagcatctacaaatggatacagcagctccatatcaggtggttcaacagcatttggatcggtgaaatactttaccacctcaggaggtaagcggttaatctgttaaatcaagtaacttccattattgcattaaagaataacagatcaacgacatcatgatgttcgtgctttagcgaaaaacatgtacctgagaagcaattcctaactccacagaggaaccaatagtcaaaagaaacaatattaaagcaatcacatactgccagagtgtagttggtccaggctccgaaacttctttacgaagcaaaccaaagctaacacgagcaccaccgcgaggatcaggtccttctgagttaggctcctcaatcatgaataaattatatttatcactagcaacttcaactagttttctctgaagttttgcaaaaacatcttctttctttcctctcaagttcccaagaaagagaattccttccccaaggtccccaaatggctcttctttcgtcacccaaaatgtcgaataaccgaaaagtttgtcctttattaacttgacatctgcaggatctactttctctggtccaagaagctccattagcttaaacgaatctatttggaagctactatatgttggatcaatagttgatggctgaggaaaaagacacaaacttgtactcttagtaacacagtgtttaagagattgatactaataaccaaaatacaacctacgaaatcgagcaatttcataaaatgtgttacagtcccttccttgaactcaacgttttcaattttccattaaaaagatttgcttttgattttggtaaccaccaaacaggacaaaacagaacataagtcagagataattgtgtgtgtgtgtaccattgaagtcttgtcggaaccgaactcgttgctgctgctagtagtagagctactcttacttgtctcttcatcttcttcttcaaacgttgccgttttaacaaccgaagacttgtgggtttctccgttttctccgatactgtcgtctctgttactgttttcgtcattgcctaaacactttgcaatcctaaatctatgagaatcctctgtagaagagaaacagagtctcttttgccatttgggcagagttgtaattgttgtcttaatgttttcccggtgaaatgatcggaatctaatgttaacggcagcggcaaaagcgacgctggtgagagtccccattggagtggagagagagagagagataagggaaacgtttatgtgggagcgctttaaagattggattatcttctaccggttttgtaccggtttcattggccattttgatttcggtttactatctttggcttcaaatatcggtttatctttaccggtttcatacaattgacacatatattccacgatatcgataccggtctattgaatcatcaatcacctcaaataaatggttaagtgatttagttcgaatcggttgaatgacgaaggataagtcatgagtcatgactaagtgaaataatcaagaaacttagccaagcgaggatggatggtcaagtggttaagtcataaagggaatgttttatgtatgatcagactgtcatgttggttttggactttcttttaagagctgtacgtaaagattcgtgcacagaccataccggttagggtataagatgaaaaagtatattgtaggcaaaatctccatttatttgatgaaaaagtaatttgttcaagtatccagtatttgaggtctacatcgagttatctttaccggtttcatacaatttatttgaggttaaaatctcactttgagaaattgttcaagtatccagtactttaataagatgaaaaagtatattgtaggcaaaaatatcttgatttttagcaatgtagcattactacatatttctttggaaaaaaaactatctttttctagcatagatttcttcatatgtggtatggtttacttttattataaataaaaaaatcggaatattcgatatttatctttgtatatacacaaatacaactatattttaaaggttttaactatacggtttgaaactgttactgttaattaaaagttacagtaagtatatctttttaatcctactaatctattttacagttacggtttagaaacggttcggttacgatcctaaatagtgattttgatgatgcctaaaaaacatgtttggttctttgttttcaataagccgggacttgtttggtttaattatatttagctttctttaattcttaaccggaatttagttttgttttcaattagccgggacttgttttattaattaattctatttatttattaatttcagatttattaaagagtaaatttggaaaaatgccctatttttgagttttcatttgaaaaataccttctcttttttttctttttaaacaattaatttttaatatacaaaattactaaaatagtctcattaaaatttaagaataactgaaaaacgtttttaacttaaaacagaaaaaaaaatcataaattaaaatttgatgtatttaataattttaagaataattattatcttaaatatttttaaacaaaattttgtctaaaaagtaaaaaataaactttactaagtgatactttttaaatatttaaaaatattattttattaaattttaataaataaattttttatctcagaaatagttgaaaaaatatttaagaagtcaaatttaattcttatcttaaatagttttaaacaaaattttgtccaaaaaagcaaataagttttattaaatgatagacttcagaatatttttcgacactattttggttaaatttttaaatatctaaaataaataaatctttatctcaaaaaatagttgaaaacataattatgaattcaaatttattttattttaatttttttcttctaaatttcgaattttgttttaatttattaagaaaatagcttttattttaaatctggataaaattgtcatctaacatattaaaaattacaatttattttattaaaaatagagagagatgtatttttcaaatgaaaactcaaaagcagggtagttttcataatctctctttattcaatatggattaactaataattaattgtttaaatacgactaagaaatgggttaaaattaaggatttgatctctttaaaccgtaaatcggaaattgttgtcttgttaactgatgttagaatctagtggaatattataaagctataaagcatggacatacgactaattgccgcctcatgaaaatgggccaaagtatgattttaggttttttaacagatgatcaaaatgaggaaaaaatcatgccaatcatgccaacaatacaaaacaaacatttgttccagaagcttaaaactctctaaagagcatttaccaatcgatcggtggccctgcttagccaatcctgccaccaattcacaaatgaatggaaaagatgagaagaataaaatacaatgaacgtgaataggtaaaaatagttaagaggatgaattaccaaattcaaacagtaatgtgccaacttgtttgttccatcgcagatcttgacggactgttagattttcttctgtatctgttgttccaatctacaaagaaacaatggccaatgttgtcaaattgaagtgatcaaatagattttaggatgaatcagcttgtccaagagctatagaagacaatgacgtattacgacttgcaactggagaccacaaacgaacataagaagaaacagagaaaagtttgttcaatactagtaatctactcagaagaacaagaaaaacaataatcataagaaaaaatctgaatacaaaatcaagcatttattaaacctaaagaaggtgatccacaaaccttacacagaagggtctgcgaattcttgctgagagttaagaggtgttccagattaccaccgtctcggatcaatgtgtattgcaagtaagaatttgatggtatcatgcaactcctgaccaataaaagataatacgtaaagttataaagcgcccacagaaaaccagacaagggaaagggataaagtcataacatgttctcccaaattaccttagcgtcttctcatactgagtctttaattcttcgtattgcatagtttccattccacttgaaatagctacacttagccaaccctaccaattcacaaagatgatcataaacaatgagtacaatgcaacaaatgtgcacgtagaaacaagtatactaggtgacagttagaaaattttacctttagagagatatctttagagacagtcattggctgcagttgactcagatcatcattttcatctaatcctcctccgcctacgcatttcagttcccatgatttaagacttcgttcactagcagtacatataaacattggcatccacagaaaagtgatctctacccgagctggctggagttatcttcttacacagaagggtctgcgatttcttgctgagagttaagaggtgttccagattaccaccgtctcggatcaatgtgtattgcaagtaagaatttgatggtatcatgcaactcctgaccaatgaaagataatacgtaaagttataaagcgcccacaggaaaccagacaaggggaagggataaagtcataacatgttctcccaaattaccttagcgtcttctcatactgagtctttaattcttcgtattgcaaagtttccattccacttgaaatagctacacttagccaaccctaccaattcacaaagatgaccataaacaatgagtacaatgcaataaatgtgcacgtagaaacaagtatactaggtgacagttagaaacttttacctttagagagatatctttagagtcagccattagatgcagttgaagcagttcttggctgaggttattgaaatttggttgactcagatcaagtagttcaaatcccacagcatcatcatcttcaactcgtcctctgccagcatcagcaccaaagccttcaccttcaacttcatccacaaggccttcatgactaggttgttctcggcctcggccacggcctggagcagctcgtcctcggcctcggccacggctagcaccctctcggcgtcggcgtcggccagccccaaatacagcctcagtttcaacaacgcctgcaggcctttcataagataggatatagagtgctctttctggagtgttgaccaatgtgtaacgatgcaacttataatgtacagccattggatgctgtgaccttggtctgtggatagtgcggttcaaaattccaagaataatattcccatctctccaaacaacaggatccaggaggaatctgccaatgaacaaccataatcttgaggtttccctcacagtcatgttaatggtgcgaaacatacatgcacaacaatttcacgaaattaatagtgtcactaacttagcgagaaatgttacaaaactacataaaattttaacaatattattgcacctggttgctcccaaggaaatgttgataacaactgaacgactagagtaagatctgagattccaggattcactggcggttgttgccgtaacgctatgttgagcttaggcaacacgaaatgctcaaaactattgagggtgtagttacatccaagagaatgtgccacattataatgactctctgcaaaagtttttgttgtttttttaatttttttttggtttaatggttgagtttttaagtgagtttcttaaaaaaaaactattattaaaataaaaattgttaatcttttatttcaaaaaaaaattaataattaatacaaatactaaaattttaaacatacaagacaaaaatcggaataactatagcttcatttccgccaaatttgtgccagatatactaaaaaggatcgacaaactgttgaacaaaatcgctatcggagtaaccgaggaagagaaaaaaacgaaatcacgaaaatgaaacaaaatacagaaaacaatttggtttattttacttcacgggccaattagaaaacgccacatatgagtctcttcctactccaaaaatccctaagcttgggaacgtcccttaataatagtgacattttttatttattttggttttttttttaaggggctcatacattagaaccctttaaaagactaccattggaagtggtctcctaacaaataatatgttatgtttcgtcaagtattaggttaaaaatgttaaaaataaatttcgtgatgtggcatataatattttgataactttaacaccgggaggaatgaccatgggagtgtttaattcatctttttttggtaaacattataacctagtgagaattgagagtgggttgcttaaaaaccattagaacgaaaaaaagaaaaacgaataacatagaaagatatatgggtgaatttgctctataaccaaaatccattgtaaaattaagaatattgacacgagacaaggggaaaatatgaaatgggacatgagtgaaggacacgcgtagtaggaggaaaaagaagacatggtaacgtgtgtataaaaagagagattattgatgacatgaccaaactaatattatccccaaatgattttaaatgttgaattagtctcataaaaataactgattaaattttacaatagtttttttttttaaaaacatagatttttttctttgtataacatgatttaaatgtttaaaatgaaatataaattatttaaaataatgaatgtttgtctaaaatacacaaataaaacagtatagaatgaaactaaatagtatagaactaaacactataatatcttgaaccggtccgatctaaaaacactatatcctatgagatacacaacatttgcaatccaaacaaacgaagtaaccagtagttgtgacattgagagtggcaatgagagtggcaatggtggtggttgtgacacaagacaattttggtgtgaagtagttgttggaaaatgtctattgtaagtttggttaaatgaaacgagcgatcaaacaggaaaagagaaatgagtgatgctatgaaagaggatttagtaacacttaatttaatattagcctatttgtacttttttgttatatatattttccaaaaaataaattttaaatatcaaatttaatagacaaaaatgcatattttttgggttttgtgcaaaaaaacctcaaaatgatttttgtttgcaaattaacctttcaattcaaaataaaatgcaggtcaatgccatcaactcgaaaatcacccgcattataaccgtgagcgtgtatagattttgcaaactatgaaaatctatgcattgattttcaaactacgtcgttttgtatattaaaaaatatatattactgtgaagacttgtacccgaaaccttaaagaccataataaacatctacaaacaataaggccactataacacttgtttacctatccttactaataactatatatacaatatcttgtcgtatatgtgctatgtcttcttcctcttcatcaacaacattgcaggaaaagaacataacatgtttagagagcaccatcaactctcttctttatatgttcataaattgagaataatagtaacatctaaccgtgggttcaacaatggatcgagaatctcagatctaaagtcaaatctagaatctaactctgcttcaatctttgtattttcaaggagacatattctccggcaagattcctttgcttctcttcactttaacaaaattattcaaattaatccttcctagaataattatctactcagatctgggtaatgtcaattcggcaaattttcgtctaagaagtccttttttatcatatagaaaccccaaaactccccgttctaaacagattttttttatttattaatttttatattcaaaaaatgagtcaattataagtatattataataaagcacacaaataacataaaatacctggattttatccatccaaccaaaacaaattcggatcaaacctagaaacccaccaaaatccctaattaatcgaccaaacttcgcatcatctcttctcttctaaattcaagaccgtttcaattttttaattcgctctcataattctcttttgttatttgtgatactaaggtaacacccgagatctccaattctcacttgattgtgagattttgttcgagttcatcaatgttttctctaattgttgataatggctcctcctaaagcaaaaagggatgataaaaaaataagaagagaagaacataaggtagagagttaactttggttgttgttgatgatgaagatgagaatgaagaagatgggaatgaagaaaaagcagagagtcttgggtaaccctttcaatgaaagatccgaagagatatcaaacaaaaatctcatggatatgtaagtagtaggattcgatttgttgatatttggattataagtagtacttgttgaattggataatagaagtttgatatctggttaatactgctacatttgagaaataatattttgatttttcggtaacacaagtagaactagggaatactattataattttaggataatacgaatagaattgggtaatactggtagatttgagaaataatatttttatttatgagtaacagtagtagaactagggaatactattataatttcagggtaatacgagtagaattaagtaatactgtattgaatttttgataatatgagtagaattgggatatattattagttaggggtggacccaccttaccacataaaggggcagttgccacagtcaaaattttggaatataatgctattttataaggaaaattatttatgctcttgtcaaaataaaatataatgcctctttccttctttatacgcacatatacattgacttttatggtttataatatttaaatgaaagtctatgtaagaaagttaaagcctaattcattttttaatatgataagcccaattatgttttaattgcgttagggttgtttcttctttcataaaagcagaaactaaaagtgtgagtctgagacaccagacatcgatattgagttttttattcttctctttcaattttggtcaaactttactttcgttaactcaatcaaacaaaaatctcttgatcatgtgattttcttctatgctcctagaatttaatataaacttttttataagattttttttttgttttattcctccagcatctttttttttcttattttgattttagaagtattgtttcaatcggttttatgttgtttagttgaatgtttttaaacaattgatttaaattaatataatttactttttatagataaagcaatgaaacgatattatcaacaaataacatcccaaccaacaacatccacttcaaattcttatcataatttggatgatttgccatcagatcttgctcaaagaaaaagaatattggattatcatccaaatgaaagggacaaggtaaggcacaaatacataactagaggtccatgtcaacattatgatcatatttttcctaagaaaagaataggaactgcattgaggcgatttaatgcaagttggtttggtaaatatcctagttggctagagtatagtacatcgaccaataaagcatattgcttgtattgttatttatttaaagacgacataccaaaaagaggcaataattatgcgtttgtggaagaaggtttttctctgtggaataaccctgagacactaagagagcatgtgggtgtgacgcccaacacatttcataatatttctgctaagaaatgtgatgatttgatgaatcaagctcagtctattgtgcattctctgcataagcaagatgatgtggtaaaaaaagaatatcgtgtccggttgaatgcttctattgatgcttcaaggtatttgttgagacaagggttaccttttcgtggtcacgatgagtcaaaagagtctactaatagaggaaattttttagaactcattaaatacactagtgaacagaatgatgctacaagtaaggttattttggagaatgctccaaaaaataaacaagtgatttctccagtgattcaaaaggatactgtgaattctcttccataagaagttgtgaaatctatcatagaagaaatcgatcatgatgtgtttgctttgttggttgatgagtccgctgatatttctgacaaagaacatatggctattgttttttgatttgttgataagagtagagcagttaaagagagatttgttacagttattcatataaaagatagatattctttatctctgaaatctgcagttgatgggctattggcaaaatatgggttaagtttgacaaaggtgagaggacaaggttatgacggagcaaataacatgaagagtgagttcagtggacttagatcattgatttctagggaaaatatttttgcatattacgtccattgttttgctcatcaacttcagttggtcgtcgttgcagttgcaaaaaaacactttgatgttggtggtttttttacatgatttctaccttgttgaatgtggttggagcttcttgcaagagaaaagataaaattcgagaaattcagcggaacaaagtgcaggagggaattattagtggtgacattagcactggaaaaagattgagagctttctcttcaaaagcctggaaatactcgttggaattctcatcataaaacgttattgcgtatggttgagttgtttccttctatcattgaagttcttgagtatatccaagatgaaggagtcgatgactcaaaaagacgtcaagcgtttggtcttctcaagtactttcatacatttgattgtgtattctatatgcaattaatgttagtcatcttgagactgaccaaaaatttatcgatggctttgcaaaggaaggatcaagatattttgaataccatgtcacttgttgaatcaactaagcagtaattacagaagctacgtgatgatggatatgactcattttttattgatgtttcgtccttttgtgagaaacatattgttgaactgctaaagatggaagaagactttgttgattcgaggaagccaagaagaagaagcaacataaccaatatgaatcattataagattaattgtttctatactgttctggatatgcagctacatgagtttaatgatcgctttaccgagataaacactaaactgcttacttgtatggcttctttaagtcctattaactcgtttcatgagtttgacaaggcatagttgattagattggctgaatttcatccataggactttagtattggggatcgattatgtcttgaacatcaactcaggatctatattgacaatatgcaggcaaataaacgattcaagaatttgaagagtcttggagatctttctcgtcttatggtggaaacgcaaaagcatcttgcgcatcctttgtttatagacttctgaagttagttttaactttgcatgttgctactgcaagtgtcgaaaggtttttcgttgaaatgaaactagtgaagacatgttcacgcaacggaattggagatcaattattaagtgattgtctagtatgttatattgagagagattttttggatatgtcaccaatgaaacagtgataggaagatttcagtctatgaatgagcgtagggtacttttataaagtattactgtgttttgttcgtattttatatgtgttttgttcgacattatttttaattatatagttgatttttttcaagcttaatattgttgccacgggtaaaattattttttagatccgccactgctcgtagtgtgatatattggtaatacaagtagaattgggtaatattattgtagttttttggtaatacatgtaaaattgggtaatacaagagtgaattctcggtaatactgccataaatgaatatattataagtatgatttctgggtaatactggtaaaatcgggtaatactgataaaatagggtaatactattctcatttgagtaatatatgaatgaatattttttcagaatatcgagaagcgagcgatagcactacaaccaatctgtatgtacttaccgccgttggagtataccaagaaaattaagttattgacaagatgttatatccacaaagtgttgaagagaaggaagtttggttcatcgtaattggcgttcacatccgctatggtatttatgaacacgcctcgatatgaggattaaacttcaagaactatccacttgagtattagaaagattttacgtgtaccaaacttccatataattctacttttgatgtttttcatttaaattagtactagagcttgacccgcacctacgtgcggggtttcatatttttagttcaatatagataattttgttattttgtgatatatattatagtataatgtattagatttgaattcgcatatacgttcaaataaaaaattgtttaattgattttaaaaatatataatattttgttatgagtaaactttctaataatatagatattataaagttaagagtaatgatcgaaattcaattgcgttcgtgtatagttatattttaaggtccgaactcacatgacgaaattttattagtaagataaaattaagatataacttaattgtaaagttaagtgattgtacgtttttattttctaaactaatcaaaacattataacagttttattaccgatgtaaaataggatatgaatttggttttattttgggttatttcatgtatatttgctaggcgtgactatcttcgaacggaaaacccataatgtgatgtatctatcataaatttttcgttccataacccgtctgtatatgtgaaataaaaatactatcaacccgtatccatcacaaatagaatttgtgtcacaaaatacgtacatgcatggttatgtgtgaaaataatttttttatatatagtgctcgtaacccaaactcatacttgttggatatttaatttgatgttcagtttggtttcaatttgttttttatactgcttccgtctcttttcatgtcgttcgtgtctcataattcctattttcatttcactccattaaaagtatgttctaaaattcttatttgcttacctttaaatacatattatatatgagtagttttgcggattaacatatatgatgttaaattttacaaatatatcataaattaaaacacacaaataccctttcttgattttttttccttcttcaaattcaaaaaatataaatagcattttaacaaataattgtttaaaaaattaataatgtttatttctttcaatcataattaattggatttttggaatataattaaataatttgaaatacacctataaaatcaatcaattattgatggataatttgttttgaataaaaatgtataattatttacattatttcaaaaagtttgtgcaataatatattatggatttatttaaagaaagacccggttgaaaaaaaaaaaccctaaatattctgaaatcagtatgtacaatttattgtttagatatttctaaataaatgtacaatttataatttaattaattattttagtttaattcgtagtaaatctaaatctttgtaatatctaatatcgtttttttagaaattgtgaaataaattttcgttttatatttcaaaatacgtaaccttaaattctaacttgaatttatttacctatcccaaattatgattttttatgaatggtatcaagcaagttttatgattttgaaaaaattttaaaataaaaattaacttccaaaatgttagtttaataatatagtatataattggatatcaaatcttagtttttcaatttttattggttaacatattttaagaataaattttaattttttgtccttaatttaataggaaagagaaagtgagtttaattttggaaaactaataagtactcaaaaggatattaccatttgtttatttaagtctattaattttgtgattactattgtatccttaatgaatttatttaaaaatactaaaatcaatggcattttatgtaatattctaccatttataaggttgtttatttttaatgattcccaatctactctattatttgagacgtacgttaagtgattctcggttaaaaattttttttacctttaaatcatatgtttaaaatgttaatgtcatgaaaaagtttaccttttactgagaataacttaagttacgttataatcttggtcgttcgcttgaattgttttgacagtccgatctcgagccttcacttaaaaaacacgcggatccttatgacccgggtttacaattattgggtcatacgttataatcttggccattcgattgaagtgtttgtgtccgtttgatctctcgccttcacttaaaaaacacgcggatccttatgacccggatttacaatttttgggtcatacgttattatcttggccattcgattgaagtgtttgtgtccgttcgatctctcgccttcacttaaagaacacgcggatccttttgacccgggtttacaacttttgggttatacgttataatcttggccattcaattgaattgtttttatccgttcgatttcgcagcttcgcttaaagaaacacgcgcttctttttttttccttttttaaaaatatgggattctccttttaatcctggccgttgaatagatttatttcaagccgtccgattttgtagttacatgcaaaaattcatctgactatatttcaggaaaataatcgtattaatttcattaaatatttggcgtatcttcgttgataacgatgaaacagtaattcgtgtggatctgctttgagaattatattacattttctccataattatagcagatataatatttcgtttggatcttcttttggaattatcttacatttctccataattatagcacatataatatttctttgtgatcttctttttgaattattttacatttttccataattctaacacatctaatatttcgtttcgattctcttttgcacttatcttacatttttttcaaatattccctatattcatacctacttttacggaaatgaaaaatattttcctataatcatcggattcttgatatcgaataaacttgaactccaaggataatatcttttgcgcatctttttttgacctaaccactcattcttataaatatcggacgccccatttcaatctactcactaagcttacactcacacaatttcatttccaaatttatttttaaaaatgattctcgccaatcctcttccattcactcccttgaaatcggtaaaaccttacaagaacgcttggcgtattcaggttaaattgcttcatgtttggaggcaatattctgtaaaggctggtgaatccattgaaatgattttggttgatgaagctgtacgtattatagttacaactttatgttttcgttaaccttatagtgtgttcaagcatcatttttctctactacttattatttaaattatttttgtcatatagggtgataagatgtatgctgctgtgagaagagagcagatcaaaaagtttgaaaggtgcttaaccgagggtgtttggaagatcattacgacaatcactctaaatcctacaagtggccagtatcgtatttctgacttgaaatacaagattggttttgttttcaaaaccacggtctctccatgtgataacgtttctgatgctttgttcctctcacttgctaagtttgatgtgatcctctctggattcgctaactcaaatatcttgcacgattagattgaattttcatattattttagaacatacatgcattatttcttatgtagtcattatattcacatatttattgtatttgtctttacagatgttatgggtcaggttgtcgatcggtctgaaatccaagatcttaacgctaacaacaagcccacagaaaaaatcgatttccatttgagagatcagcagtacaaacaatctatattcatatacattcttatttaaagtttttttttttaactttttattaataaatttattctttccatttttagtgacaatcgcttggcatgtacactttgggggaagtatgctgagattgttgacaaagcttgccaggagtcaaccgatggtattgttgtttgcttaatccgatttgcgaagatcaatctctacaacggtaattatattttaaaaacacgatcttatatttttaaaacagatactaggagtgtttccaattcttttgatgtttcacaagtcttcttggatcccacgtcggctgagttgggtctttttaagcaaaggtaattgtatttatttgtcactaaatatatttgttaatacataatattaagcaaactatattttcttgatgtataacataccaactgatgggttaactttgggaagttctggatcttttcacaagaggctctatgcaccaagaattggagatgacgatggtgattatccaaggcaaacaatcaaggaagtcctcacatcttctgatgtattattcattaatttatttatcctactaacatttttattacatttttatatttttagcttagtttgttaattcctctttatattcatttgaaggtgggtaagtgcaaaacagtttgcactgtttcggcaattgatacagattggccgtagtactatttttgttgtcgtgctcacaacaagaaggttgtcaaagaagaagctatcaaacttgaagatgtcaagcaacctcaaaagccaagattttggtgtgaaatatgcaatggttttgcaaaatctgttgttgccaagttagtctttatgaaatctttatattgaatgtattattaattataattttgtgtttagaagctaataatcctatttaacttttaggttttggctacatctccatattatggaccaaaccggtgaagctagatgcatgttattcgatagtcatgcaaaggaaattcttggcactactgctgcccctaaattgcttgatgggtcatttgatgaggtataatgcctttttttttttaaactctttcattaaaatgaccaagttcatgttataataatctgtattttctgtagatcgaatatccaactgttttgcctgatgtgatcaatggtttgaaaggcaagacttttcagtttctattgtgcattcaaagggaaaacatatttggtggatatgattcattcactgttgcccgagtctacaccggtaacattgtcgatgaaatcgttcaagaagactctaatgcatacgttgatccattatctttatttcgatcgaacaggtttgacaaataacattaaactattctaattatttctcaaaattttttagggttttcttattaaaatgtttttgtattttcatatagggttcccttatgctcactaatggtgttgacctttctgatgtcgatttgtcgtcaacctctactccatcatcaaaacgaaaagattcagatgatgttgatggaaatgatcaggctaagtgttctacgatgaccatgtctgaggaacgctccggcgaatgatgctcaatgactactccagctttgatcgttttcttctttcttatttatttgcttaaagttatcagagttgttttattttttaagatctaaactatctttattttatttgcgaaatttttttgggaattaataaagttatttcaattatatgtcgtttagttttgttaaatctaaatttttgcaatacaaagagctgagatttgattactctcttagtctcaccaaatattatgttgtagaattttgacacaaagtaagaataacaacttttcattaaattttattattttgttagtttaactatagtattagttatatttctctcttgttttattggttaacaataaaaatagtaatgatgttgttgtacaacatcaatcttgattaaagaagaaaaaaactcaaaacatcaattttcagaaaacaaatctacactatttttaagaaacacatcatttggtttttataatgttaatcatactaataactataaacaattttttaattttgtattaaatattctacaaaatcaaaaatagcaaagattttgtacactaaataattcgtcttattaaatatgattaatcatgataactcaaacaaaacaacctatttctattttttcattgattctcatttttttaattataatatttagtaacacgataagaaataaatgtcatcattattgttctatcctataagaaatcctattggttctagacgattcgtttcctttttacacttcaacttttcatcattgtatcttttcctaattatatgaaatcaaaaaccttaagtctagaacatttaggtttaactctttatctttctaaacaaaaaaaaacttccttcgatacacaagatgtctgtttataaactcaccgatttgagggataactcaacaaactggaagattaacgtcaagatcctatcaatttggaatcatcctccaaacagtcatggtgaaattatgaccatgattcttcatgatgacaaggtttgtattttcacttttttttcttttaatcccaatttactttgttattattgaaacagatcatcacaaactatttaatctttgacttgtttggactttttcagaataaccgtgttgatgcaacaattcctcaaggaaactatcacaatcccttccgtccgtttctcaagccaggcacatggattcacatctctgactttcgggtcattgttcctcaatcaagggttaggtattcgtccttttgttttcacatcaaattcatttgggaaacaagtgtttaccctctcccggaacttgtgaaaagagacttctttgacttcatttttcccattgatcttaagtatccatgtcttgaggattgggattatgtcacgggtaagtttttagtcaatctatgttcttctcattttaagaattaatttatgatagtaatttatgttattatttttgaaatatggtatctactctattattttatacttagatgcaatgagtgaggtgacaaatatctcggctattaagaaatttccatttgtttgtcgccaaggtgaaaccgactatgaatcaagatatgtctcattcgaacttttggacaatatgtaagttgtagtgtttttaagtaagtttagtaatgcaatgcttagtttaatattagcttaataatgtgtgagtagatgtgtcatctgtctgaaaaattagcttaataatgcattgcttagttatattggttaggggagagaaaatgaaatgctatgctgttggaagatgctgtgaactttttgttataaatttctcaaaatgtatcagttcagcctcttataactatcagcccattgttgccattgtgagattttggagaattgctgagattgagggttagttattttgtttctattgtaattctatttacttatgattattatttgtattatataattttaaatgaaactaatggaacaggtgagaatgttttgaagagtgaatttggatgttcaagaatttacctcaatccaaccaattttcctgagatagatattcaaagctacatgtaagaattttatcatttttttattgtattcgttaaccataacatcaattaatcaatatcgattttttattttctcttttacagccgcggtttcgaagattatgatgaacttccagagaacccaaggatggaagtgattgaagagaattaggagtttgacctcccatctcctattcttatttaaattatgttttgaacttattttaatttcctgcaaactttgtcattttatgttattttttttataaatatgcttatgttttgaacttatttaagtaatgtattccctttttattttcatatatcttatgttttgttaaactcctaagaaagtttacaagtaaaacataaaaatctacaaacaaactcatatataaatttgcaacgattacatataaatacaattgtagaatttgtttatttctttaaaaatactatctttttttttttttcacatatcattatttatgattcttttcaaaaggaaataaaaaaattattgggtatcaagaataaaacattaaaaactttgagataaatcattcttggaaacatcaggatcatttattattaagttcattttttttcaactcatgtcattgtcttatacaaaaagtaatcttaaatatttagactctttatatttataaccctacaaaagcattatcttccagtatcatgtctctcatattaaaataatattgattttgaaaacctaggtactgcttttaaagtttctttttggatatagatgaaaatcacatcattacctttgtggcttaaaaataatcgatacatatataaaagttagaatttaatttctaaggaatgtaatatatatatatatatatatgatatcagtttattctaaatatattttgctctcatatatattttttggaataataaagtagattttattgagtagatacaaatattaacatctatattctcttcaatctatttatgagacttgctttctcaattaaatctattgttcacatcttttctttccatcttttccaagattgataacaagattagacaactcatccaagagatatgacaacttatgttacattttgtttcttacaaaatttattaaaattcgcaagtaaccataaaaagcactataatttaccatcgagattccaaattcgattgacaagatttgcatggcatttaactttttctatttaatatacgcgcttattcttttgggcaaaaaaaataaaatacaagtaatattcctaaactgtcaaaggacacataacctgaaaaaaggtaacctcccctcttattttcatctattacttatcttcgccatattccttctaccctattagtttcaaaaaaaaaaaagatgttgagagatgatagagatggttatttcaaaggtatctcatatctgtctcaactttctcaaaaaaaaaaagattggaaggtttttgtgaagctgctatgttggtgggtaacacttcctcatgagggtgggaagtgttaccaaatgatcttgtgcgacgagatagtaatttgtttttttgatctaatctattaataattaaatagtattccttggatctaatctattaataattcataagtcaattttgttttttagggcacaatgattgatgctatttgtgcttatttctacactggatatgatgtccctagagttctcaatgaaggaggttggtttttcttggaaaacatacttctgatcaaatcagtcgtcggtagaaaaccttccttaactgataataagttgagaatcaagttccttcagactaccaaaatgactcctctgcctaatagagaaccaagtagctttttccgatttgctgccttctctatgatcgaaaacaagactattaattcttcagctgttcatggtaaatttcttatttagatttttcactaatacaaagtctatttttttaaaaatattaatctttcatattatagtttttttttgtttgtagatgcttatggtattgtcgtgagagttgggaatataacaagaccggactttgtccctcaagcttcagaaaatactatactttctcattttctcgaatttgagattaaaaattcttggttagtattttccaatatatagttcgtcatctatttgcttatatatttgaatgcacaaacatagtaaatattgttatctttatagttggtttaattcatagaacttagatgttttggtgtaataatttgatattgttattaggggtaaatctctcatatgtgttgcaaccggatatacttgtgagttgtttgtgcaattatggaggggacttggtctagaacttggttatcactggaactttggtatgaatcctacaatctgtgtgctacgattttggaatgttgatgatcatgaaggtatatttaagactcattttatgttatctataatttatatagctacttcatataataaaaaagttaatattttaggtcgtcaatgtctaatctcacataatggtgcttcaagaattacattcaatcaaagttacccacaaattaacatggatcgcgtcaggtaagaacgtttatatttacattatcccttaactgtttattgtattttttaaaattttggtcttggttatttttattttttctattttcctactgtttcagaactcaattccttcaacgaatgcaaacacctgagctagatgaagttgtggacgagaactgaaaatgcaacc

SEQ ID NO: 761 - DNA, 18272 bp, Arabidopsis thaliana
acactcacacaatttcatttccaaatttatttttaaaaatgattctcgccaatcctcttccattcactcccttgaaatcggtaaaaccttacaagaacgcttggcgtattcaggttaaattgcttcatgtttggaggcaatattctgtaaaggctggtgaatccattgaaatgattttggttgatgaagctgtacgtattatagttacaactttatgttttcgttaaccttatagtgtgttcaagcatcatttttctctactacttattatttaaattatttttgtcatatagggtgataagatgtatgctgctgtgagaagagagcagatcaaaaagtttgaaaggtgcttaaccgagggtgtttggaagatcattacgacaatcactctaaatcctacaagtggccagtatcgtatttctgacttgaaatacaagattggttttgttttcaaaaccacggtctctccatgtgataacgtttctgatgctttgttcctctcacttgctaagtttgatgtgatcctctctggattcgctaactcaaatatcttgcacgattagattgaattttcatattattttagaacatacatgcattatttcttatgtagtcattatattcacatatttattgtatttgtctttacagatgttatgggtcaggttgtcgatcggtctgaaatccaagatcttaacgctaacaacaagcccacagaaaaaatcgatttccatttgagagatcagcagtacaaacaatctatattcatatacattcttatttaaagtttttttttttaactttttattaataaatttattctttccatttttagtgacaatcgcttggcatgtacactttgggggaagtatgctgagattgttgacaaagcttgccaggagtcaaccgatggtattgttgtttgcttaatccgatttgcgaagatcaatctctacaacggtaattatattttaaaaacacgatcttatatttttaaaacagatactaggagtgtttccaattcttttgatgtttcacaagtcttcttggatcccacgtcggctgagttgggtctttttaagcaaaggtaattgtatttatttgtcactaaatatatttgttaatacataatattaagcaaactatattttcttgatgtataacataccaactgatgggttaactttgggaagttctggatcttttcacaagaggctctatgcaccaagaattggagatgacgatggtgattatccaaggcaaacaatcaaggaagtcctcacatcttctgatgtattattcattaatttatttatcctactaacatttttattacatttttatatttttagcttagtttgttaattcctctttatattcatttgaaggtgggtaagtgcaaaacagtttgcactgtttcggcaattgatacagattggccgtagtactatttttgttgtcgtgctcacaacaagaaggttgtcaaagaagaagctatcaaacttgaagatgtcaagcaacctcaaaagccaagattttggtgtgaaatatgcaatggttttgcaaaatctgttgttgccaagttagtctttatgaaatctttatattgaatgtattattaattataattttgtgtttagaagctaataatcctatttaacttttaggttttggctacatctccatattatggaccaaaccggtgaagctagatgcatgttattcgatagtcatgcaaaggaaattcttggcactactgctgcccctaaattgcttgatgggtcatttgatgaggtataatgcctttttttttttaaactctttcattaaaatgaccaagttcatgttataataatctgtattttctgtagatcgaatatccaactgttttgcctgatgtgatcaatggtttgaaaggcaagacttttcagtttctattgtgcattcaaagggaaaacatatttggtggatatgattcattcactgttgcccgagtctacaccggtaacattgtcgatgaaatcgttcaagaagactctaatgcatacgttgatccattatctttatttcgatcgaacaggtttgacaaataacattaaactattctaattatttctcaaaattttttagggttttcttattaaaatgtttttgtattttcatatagggttcccttatgctcactaatggtgttgacctttctgatgtcgatttgtcgtcaacctctactccatcatcaaaacgaaaagattcagatgatgttgatggaaatgatcaggctaagtgttctacgatgaccatgtctgaggaacgctccggcgaatgatgctcaatgactactccagctttgatcgttttcttctttcttatttatttgcttaaagttatcagagttgttttattttttaagatctaaactatctttattttatttgcgaaatttttttgggaattaataaagttatttcaattatatgtcgtttagttttgttaaatctaaatttttgcaatacaaagagctgagatttgattactctcttagtctcaccaaatattatgttgtagaattttgacacaaagtaagaataacaacttttcattaaattttattattttgttagtttaactatagtattagttatatttctctcttgttttattggttaacaataaaaatagtaatgatgttgttgtacaacatcaatcttgattaaagaagaaaaaaactcaaaacatcaattttcagaaaacaaatctacactatttttaagaaacacatcatttggtttttataatgttaatcatactaataactataaacaattttttaattttgtattaaatattctacaaaatcaaaaatagcaaagattttgtacactaaataattcgtcttattaaatatgattaatcatgataactcaaacaaaacaacctatttctattttttcattgattctcatttttttaattataatatttagtaacacgataagaaataaatgtcatcattattgttctatcctataagaaatcctattggttctagacgattcgtttcctttttacacttcaacttttcatcattgtatcttttcctaattatatgaaatcaaaaaccttaagtctagaacatttaggtttaactctttatctttctaaacaaaaaaaaacttccttcgatacacaagatgtctgtttataaactcaccgatttgagggataactcaacaaactggaagattaacgtcaagatcctatcaatttggaatcatcctccaaacagtcatggtgaaattatgaccatgattcttcatgatgacaaggtttgtattttcacttttttttcttttaatcccaatttactttgttattattgaaacagatcatcacaaactatttaatctttgacttgtttggactttttcagaataaccgtgttgatgcaacaattcctcaaggaaactatcacaatcccttccgtccgtttctcaagccaggcacatggattcacatctctgactttcgggtcattgttcctcaatcaagggttaggtattcgtccttttgttttcacatcaaattcatttgggaaacaagtgtttaccctctcccggaacttgtgaaaagagacttctttgacttcatttttcccattgatcttaagtatccatgtcttgaggattgggattatgtcacgggtaagtttttagtcaatctatgttcttctcattttaagaattaatttatgatagtaatttatgttattatttttgaaatatggtatctactctattattttatacttagatgcaatgagtgaggtgacaaatatctcggctattaagaaatttccatttgtttgtcgccaaggtgaaaccgactatgaatcaagatatgtctcattcgaacttttggacaatatgtaagttgtagtgtttttaagtaagtttagtaatgcaatgcttagtttaatattagcttaataatgtgtgagtagatgtgtcatctgtctgaaaaattagcttaataatgcattgcttagttatattggttaggggagagaaaatgaaatgctatgctgttggaagatgctgtgaactttttgttataaatttctcaaaatgtatcagttcagcctcttataactatcagcccattgttgccattgtgagattttggagaattgctgagattgagggttagttattttgtttctattgtaattctatttacttatgattattatttgtattatataattttaaatgaaactaatggaacaggtgagaatgttttgaagagtgaatttggatgttcaagaatttacctcaatccaaccaattttcctgagatagatattcaaagctacatgtaagaattttatcatttttttattgtattcgttaaccataacatcaattaatcaatatcgattttttattttctcttttacagccgcggtttcgaagattatgatgaacttccagagaacccaaggatggaagtgattgaagagaattaggagtttgacctcccatctcctattcttatttaaattatgttttgaacttattttaatttcctgcaaactttgtcattttatgttattttttttataaatatgcttatgttttgaacttatttaagtaatgtattccctttttattttcatatatcttatgttttgttaaactcctaagaaagtttacaagtaaaacataaaaatctacaaacaaactcatatataaatttgcaacgattacatataaatacaattgtagaatttgtttatttctttaaaaatactatctttttttttttttcacatatcattatttatgattcttttcaaaaggaaataaaaaaattattgggtatcaagaataaaacattaaaaactttgagataaatcattcttggaaacatcaggatcatttattattaagttcattttttttcaactcatgtcattgtcttatacaaaaagtaatcttaaatatttagactctttatatttataaccctacaaaagcattatcttccagtatcatgtctctcatattaaaataatattgattttgaaaacctaggtactgcttttaaagtttctttttggatatagatgaaaatcacatcattacctttgtggcttaaaaataatcgatacatatataaaagttagaatttaatttctaaggaatgtaatatatatatatatatatatgatatcagtttattctaaatatattttgctctcatatatattttttggaataataaagtagattttattgagtagatacaaatattaacatctatattctcttcaatctatttatgagacttgctttctcaattaaatctattgttcacatcttttctttccatcttttccaagattgataacaagattagacaactcatccaagagatatgacaacttatgttacattttgtttcttacaaaatttattaaaattcgcaagtaaccataaaaagcactataatttaccatcgagattccaaattcgattgacaagatttgcatggcatttaactttttctatttaatatacgcgcttattcttttgggcaaaaaaaataaaatacaagtaatattcctaaactgtcaaaggacacataacctgaaaaaaggtaacctcccctcttattttcatctattacttatcttcgccatattccttctaccctattagtttcaaaaaaaaaaaagatgttgagagatgatagagatggttatttcaaaggtatctcatatctgtctcaactttctcaaaaaaaaaaagattggaaggtttttgtgaagctgctatgttggtgggtaacacttcctcatgagggtgggaagtgttaccaaatgatcttgtgcgacgagatagtaatttgtttttttgatctaatctattaataattaaatagtattccttggatctaatctattaataattcataagtcaattttgttttttagggcacaatgattgatgctatttgtgcttatttctacactggatatgatgtccctagagttctcaatgaaggaggttggtttttcttggaaaacatacttctgatcaaatcagtcgtcggtagaaaaccttccttaactgataataagttgagaatcaagttccttcagactaccaaaatgactcctctgcctaatagagaaccaagtagctttttccgatttgctgccttctctatgatcgaaaacaagactattaattcttcagctgttcatggtaaatttcttatttagatttttcactaatacaaagtctatttttttaaaaatattaatctttcatattatagtttttttttgtttgtagatgcttatggtattgtcgtgagagttgggaatataacaagaccggactttgtccctcaagcttcagaaaatactatactttctcattttctcgaatttgagattaaaaattcttggttagtattttccaatatatagttcgtcatctatttgcttatatatttgaatgcacaaacatagtaaatattgttatctttatagttggtttaattcatagaacttagatgttttggtgtaataatttgatattgttattaggggtaaatctctcatatgtgttgcaaccggatatacttgtgagttgtttgtgcaattatggaggggacttggtctagaacttggttatcactggaactttggtatgaatcctacaatctgtgtgctacgattttggaatgttgatgatcatgaaggtatatttaagactcattttatgttatctataatttatatagctacttcatataataaaaaagttaatattttaggtcgtcaatgtctaatctcacataatggtgcttcaagaattacattcaatcaaagttacccacaaattaacatggatcgcgtcaggtaagaacgtttatatttacattatcccttaactgtttattgtattttttaaaattttggtcttggttatttttattttttctattttcctactgtttcagaactcaattccttcaacgaatgcaaacacctgagctagatgaagttgtggacgagaactgaaaatgcaaccccagacccctatctatcgttttatttaaaaacttatctacatatgttttaaagttgtacttttaaagactttgtttttttttattgactttcttatgattatttctgttaaactttaactttattataactccttttatttaatgcttactaaataacaatataaccgtaaacttagatcaaattataactgcttttagattgaccaattattaggttattttgatttaaataattttgatattttattgattttaataaaatgtatttggattgcaaattttgattacaatgtaatctaaaatatgagttagatatctacactattaaacaaagaaaaataaaaccaaaccttagagtttattagaagatttttccaaagaaatatgtcgttaaaatcaacatcgttagagaatcttctattatttcaactcttatatataagtgccataatagaattaaattatagattctgttgttaacaatatatttgcatatatattatttcctaatttttaatcacttccattattaaaaatattttaaaattttgttacttatttctatccattattattaacttttatggaaattttgttattatatgtctcaaacattataggatcctgtgattattagtaatttatccaaaaagttaagacaattggtatttatataagaactccaattaataataaggatacaatatttatattatttcctaaaatataagactcgccaaatttttaattttattaataattgatttattcaaaatatattacagaatcttcaagattgatgtttgacttgaaatgtcatgactgttactactttttaaaaaagttgcgtctaaaacatgcctctacggtgtattgtctctcttatatatatatatatcggtattattagcatctcataaaacgaatacaaaaaaataacaaaaacatttctgccaaaagatggaatcgtttcatcctctttcactgttgaaaccgtctattagatgatggtgtattcgtggtagagttgtgaggacattcttagtttcgctggttccatcttcaaaggttatgggtttgattctcgccgacgaacatgtaagtattgactgttttgtaatgataattctaggtttgcatgttttagaattttgattagtatgtttgatccgtagggtatgactattgaagctactgttgggtataagatgtcggatcactataaagattttattaatgaaggagaatgggtaacgataacaaattttggagttgttgagaactcgggttctgtcagggcaacaactcatagcttcaaaattggattttctgttgacactgtcgtcaaattaacaagtccggtacacgctattcctcactatcgtctagcatccttctcttcgattattgatgatgaaatcgataaatctgttttagtcagtgagatctttatgaatttgtttgttccttattttatatcattcatcttagggttcattggttttgtcattttcaatatcaattatatatatttgactctgatttattttaattaatttatgtaattttttggagatttggtgggagcgatctatgatgttggagaatttattaacacaagacctaagcaaaacatcgttgatgatttgacgctaacattcaaaataagtgataatgagtaagtttccttctttgatagtttaattcgaattacctaaattatactattctaataatatttttgattttatgtttagaaaccgtgttttggaatgtctagctactaagaaggaagctcttgactttgatcataattatcgtcaatatggtggtggagttattgtcgctgttcttggttggtggaagattgagcgttattttgatggtacaaagaacatacgtgtttgcaccgcatgcccgatatcaaccgtctttccggatcctgatattcccgaatctaacgagatccatgagatgtaattatataaacggaatatctatactattatttataattgcataccacatttgtttgttttgttggctccgtgatgaaggtgcaaggaatggcggttgaacatctacttaaaaaatgtttttacatgtagcctattgaactcggtctattattattttaatttctgtatgaacatatttccatttttatttctgtatgaacaagtttacatatttctaatttagaatacgttctaaatcttgatatcttacaatctcgcatcgctattattgacaaaatttaatatgattcatcctaaaataaatcttagaaggtatgacaaaatttaatatcgtagattattgctttttttttaaacatcttaatattgctttatatatctaattctactatttattaattcgtctgtctatatcagaattgcaaaatttagaaaaatatatttattattgctttggcttatgtctcatataacataattattttatcaacaaatgttagtttcacattctgtaaatataaacatatataaaattagaaattttctgattatgagatactgttaaacttgtataacacttacatacacgaaagtgtacaaagctactatgtgtaaacctacgtatacaaaatataaaattacgttcccaaacgtacatattaacttagacattgttttcatgctacaactctaggaaactatatatacttaccaaaatattgtttgacgagactaaatatatttattttattccaatgatacataatatacaactatatgtttacatataatgaaaataaagtagagtttatgttgaatacacataacttatatttgatgattgatttaaacaaagataccgtgcgtagcacgggtactgacctagttaatagtatagattacgtacccttaaaattcgcttttatagttgtaccattgactgaagtcgatacacatataactttgagtgtttaatgcattgatttttacaaatatataatttttacaaatctcaagttgtttataagatacaaagtgagattaaaagtataaagaatagattgtgtagattctttcataacaatctaatatgatataattttgtattttcttactttatcaatattgtatgatttataagagttttactaagtagacattgtaaaatttggttttggaggaaaaaattaatatcaaattatttcgtaagttatactagttctaccagtattatcgcagttttgtcataagttctattagttttaccaatattactgtgttaccacataaacaatgcattgtattacatcatgaaaacccagtgttacatagttatccaagtcgaaactgttttgtaaaacaaaaattgtctttgtctcgaccgcctttttaaatacacatatcctcatcctaatcctcataaatagtctagtgttcctcagttcccaccagcaatgcattgaaactcaattgcaatttaaccttacttttgtatacgcctaatttgtgtatatcataccttctattattgaaagtgtttttttcccctaatgtcattatcattaactatacttgcgacattcacattttaaaatgtatgataacgttctcgctcattgtctgctgcaaaaaaaaaatacaaaaactcggtcagtaatactagttatactatatgtatcagtaagactagttttattagttatactacaaacatcaataatactagattggatggtttcagattcaaatctacaattcacaacgattcaacatttgatatccatttatcacccatttaaagagttatttgacccaaacactatgcataaactttcaatttataaatctaattgaattgaatccctaaatttataaacctaaaacttcaatttcaagctttctagatttgttacatttagcttgtttggtttatttttttataaattgtaaagatgaaaataccttttctttaatgaaacttgtttcttatttgtttttctcggttgtaactttaaaacaattataaattaaaaatagaaaagaaaaagaaagggtattttcatctttacaagtttcattaaagaggaatgggatatgaagattagtttaggatataggaatttgatgtttataaaaaatgagataagagatgatttctccaatttggtgacattacccataatcggagaacacaagattggagaaagttcataacgaagatgtctttgcacctatagattcggatgcaaaatcaaagaaggcgagattggaaaattcagatgattggagaaaaaaattaaatcagcgaatatctaggggtgtgattctgataaaatcgttgattgcattggtgagattgaacacaaagactatatatatgttagattctgacccgcacatacgtgcgggatttcatattttaagaaatgtattagaatatatttttagtgaaagatattgtaatgtataaattagaatgtgcatagaaaagtgtatagtgttatttatgatacaatagctaaatttttattaatttatattatttatatttcatttgtattttgcatagcaaatcgaatgttagatttatttcgaattgcggaataatatagagattttggaaaatcagtgtatttttcttagtttgatgtatatacaaattaattgtttttgtttgaaatttgatcaattagatgatataatgtgaaatttactccgcggtacaccgttgttcgatttttttgtaactaaaaatttgaattttaagttatagttgttttgtatatattgttttttttgtttagtagattatcactagtagattatcgtcccgtatgattatcaatccaaactcgttccaccagataatttcattccgtaaaattaaatattatttttgttatttttaaatatttctatgtaatatattaagaaaatcgagggattgacctgtggtaaatcttggattaatatatttaaaaataatttgtgatttataaatttatgatattgtagtatataaaaccgatttttagtgtatacctttcaataattgtataaactatatattaaaaatcaaaaatttgtataaattgatattgcaacctcatgaaatcttagtgatttacccgtagggtaccacgagataaattttattttatttttttataaactgaaaaaattgttaattttagttaaaaataaaaaaataaattaagttatatttgttctgtttattgtttcagattgtataactatattttgattgttaattccatgattttatctgtggtataatattgaccaacacccgactagtttcttgtaatctaatgttgaccctggaagaaaaatccataagaatacgcataaatggatactaaaattaggagataaacatcattaaaacgtgaagtaatttacttatgaatctctatctatttttttaaaagaattaatattatagattgattgtgaggcaaaatgtgaatgtatgcataacatttataagagatagattgtacgcaaaattagattttattttggattcaatcttaacttttctgaaaaaaactaatctgaattacatattttaaatttaggatgacgaaagtatttttttttaaaaagctaaaatttactatgatatcaacgattttggtattttttaaattaaacttatccttatgcattatcgcaaaagtcattattgttcgaatacaattaatgatctggcaaaaaaatcatattactctttgttccaaagaaaaatcattcaaatttcaaagaaaaaaataagaatattggtgtgaatcaatattttctctttttgaatatttgcattaaaaaatttaatcattggtatttaaactttgttttactgtttaaaaaaaaaagaaataatcgaatctagaagaatgaatattccaaaagcttgtaactattataatacgtttaaaagtaatttttcttttatataattcaaattaagcttagtgatatatttttaaaataatgaaaattacctttttttaaaaaaatactttaaaagtttatatcatttaaattctaattaaaatgttaaatattttaatctatactgaaactattttctagataattacaaatctaaaatccaaaagttatcttttgaatatgctaaatcataatttaaaatcatttttatgtgtactaatcagaaacaattaatatagttttgttaagcgaattgtataaaatctaaactaaatgataatttgttattaaattagattgaagtttccgaattatctaataacatattaccaaaataaataagtttacatatatataattcgaattaaaatagcatgatatgttatggaaacgttttaaaataatttccgaaaatattgggtagttattaatttattgatttaattcgatttttttagaaaacaaaatccaagatatttatttagttgtaataattgttaatttattaaattacccatgcaaaaaattatttagttagttttaaactacccttacaatgttgtagttcacataatgcttcccaattaatagtatagatatgtatatatatatatatatacatatctattattttctagattttataaagctatgtggtacaaatggttgtgtaaggttttagacctttgagaggtcaagagttcaaaatacatttgaaacatgtttttattattttaaaatatccaaaacgacgtaatttatattgtgaataactttctagttggtagtattgacctgcatttttttaattgaagggttaagttgcaaaaaatcattttgaaggttttgtttttgtacaaaccccataatatttctacatactacacaatttgaattttcaaaactcgatgtaaatttgtaaaatgatgaatagtatttgtaagtaataatatgttgtactatttaggatgtataggaatagaatgtttgtaaggaatatactttactatttttcataactcattcgtaaaccatttttaattttaatatactaatcaatagagttaaaactatttaactatagatttgttttagttacaatcatctactagtttgttttacttaataaatttagttacaaactttttttcttgataaaacagagttacaataatctatcggtttgttttagttaatcaatttatttttgcatatgcattattgtttctttgactattcggaaattttcattagtttatgcatgtgaaaagatgaccataataaccttttgaaatggaatgctcttgaaactaatataacctaattaagaattactctctgtggataattatacctaactttactatattatagtttcagttcgcattgcactgaactgtttagattgatctcaaaattaagtttttttcctaaatattgtcgtttatcgaatataatcatttaaagggtaaattgattaagttgctttgcttgaataaaagaccaccattgctccttacaaaaatgttgattaaagttttctcttttttgatcctgatgataacaatggttattaacgttagcaaagaatgtgatgaacaatcatgtctaaaccttttgttggaggttaagacagttttctcatcactctcggagatgagacgtcgtgacatattgatcatcgttttgaagaattccgtgcgaatgatcgacatggctatgattggtgtgatggaagattcaaaactatatgaggagatgaaaaatgatatgcttagtgtgaaggaggacacaaaactattgatgttgcattcgtcagaaccgctaaataacaattcaaaataatttatcttttattaccacacaacttgtttcccatcaaaccaacttcaacctctaaaactagaatcattgtcaattttctcgtaacatttgtgcaatttaagaccaacatagccacaacctgcattcaatcttatacttggtttaagattgatacgaatttaaattattcaaaccaaaatctttaatgctacaaaattgaaaattatttgcggagtgtataggtaatagaacatgtgtgtttgtcgtcgatccttcttctttaaacccaaaattttatctcaatcaaggtcttacgattcataactattatgaaaaagcaaaaactattacgcagacaacatcatacaaaaacacatgttttatgcctcatcgaaaatataaagcagaaataactcccacgaagagagaagtgcccataatagcaaaaacgatgaaaaatagaaagaacaactattaagagtagtaaccaaccctaattgttactgacgactcaaaatttacaacttaaattatgatagaatgagatttatcacgttattatttatattgaaaagatatatgattaatcaactataatttttgttatttttttttgttggaaaataaaaagattatcaaaattaatatagaagtttaatgtattcacatattgtttttcaaaaacttacattttttaatttttatatatagtttttcttactcatatgttatttttcaaaagtttacatttctattcttcacatatataattcttttttttcttttcatagatatcttaatatatataatattataatttaaaaatattaatgaaagtgatggcaaaagtatcaattagtgatatgacttatcgagattggtcatttataagaatatgatagtataataaaaattgtgagactaatatgtattatttaaagaagatatggacaccttcataagcaaatagcctcaacttttttatagtatagattgataacttaaaattagaattagtaaatgattttataataaaatatgtatagcttccgtataattatctttctatatttatattctttatagaaaatgtaggtatagtttccttataattatatttatactttattaagtttttttttctttgatcaaacatatttttaagattgtttaagtttataatttcttacagttatctttttatgattttaaaattatcagaaaatattgttttacacttgtcaaaatatgagatcgataaatgtgccttcttaaaacaatcatataagttattagtcttaaaaaccaagctttatatgataaattatatatagatatattaaattatatattgattaattaatactgttatcaattttcaatattgataagactatacatttataaatttctttttcaaatattattttttatttgtattattttttataatgataccgtgtaatttattaatttataaatattatcagtttatcaagattagtttatagatgttttactgtaccacttgaactatatggagaacaaatatgggaagttatcctcctctgttggttcgtcctagaaaactctctcgggcacaaaagccaaggagccgcaaaccactgttgagatgtgttttcctcaccgatattgctcctccgacgatttccctcactgaccaacacttgcttcctaggtgatatatctcaagtgaactccttccggcgacgttgttatttcccgatgagtttcccctgatatgactttcttctgcatgtcacttacctcgatttgaggctcctttcgttgttgccaccagagtctccgccagaaccgccagacccaccaaacctaccagatcctcttcctcatatcaatagtttttccgacgtatctcatgctcaaccgcatctttccacctttctaatctcgttttcctccaacgaagctctttctccttcccagcatccaccatgttttgttcaatggctctcatcctcccctaccgactaagagaaccaggcgctcttctcaagctgttcttaggggcggaggtatatggctagcaaggggtcaattgacccctatggattttaaaaaattgtttatttacttatattttttgaagcaaaacttacaaaaatagtttaaaatatgtttattgacccccataaaaatttgtttgaaatagattttaatctttagataaaaattgacctctacaaaagtaatggctacctccgccacgactgttcttcaccatggttgctcccgctgttgctacccaggcagtagagtgtaacggggcttgtttggttgtcatcacctcaagctctcttcctctttcatgtggccaggttatgctttcgtcatgttccttggactatattcagatgtctttggttggtaggtctctcgcgcttgtgcgatctcttacggcttattgaagttttttcccttgttctatttcgggtattgattatatgaagatggtctttcttcctttgtgacagattggaatgacttctttaatgtctattcctccgttgaatctggttgatttctcctttatggaatatgtctttccagtggcggatctagaaaatgaatatgggtagggcacaaattattttatatatataattttattttgaatatgtaatatttatatattattaaaaatatatatattggatttttattagttaatataataatgaagagaaaaaaataaaatttaaatttaaaaagaaagaggtcaaacaaaataacaaatgaaaaaataatatatttagaaaattaatagaaaaaaggaaaaaaggcaaaatagataaaactcgaacctaagaattggtgtgctactttacaagactcattcaaacatgctaagtgacttaattatgtacatactacaaagaaaaacctataaatcagtgtggggcacgtgccccagctcctcttaacctccattcgcccctgtgtctttctcccaaaaattccacttcgtttgagtggtactgttgcaaagaacttgttgtcgattgtttcaaacactaatgctttaagttggtcatatgtctttgaatttggcatggatctggaatggcatttgaatctcttggatcacttcaatggtgactcatgtttaccttgtattgaggtttgtgttagacttgtacatgctaaccttttatgttgctaagggctttgtcctgatttttagcattggcagatgttgttttgtaaatgtggtgtgggaagtgcaatctctgtttagggctaagcttcctcatcttggtatccgctgccaaattctctttccaaaagtcccacttgtttgagtggtttggatgatcaatcgtttccggtattcaaaggactttcctt

SEQ ID NO: 762 - DNA, 113567 bp, Arabidopsis thaliana
aagcttcagaaaatactatactttctcattttctcgaatttgagattaaaaattcttggttagtattttccaatatatagttcgtcatctatttgcttatatatttgaatgcacaaacatagtaaatattgttatctttatagttggtttaattcatagaacttagatgttttggtgtaataatttgatattgttattaggggtaaatctctcatatgtgttgcaaccggatatacttgtgagttgtttgtgcaattatggaggggacttggtctagaacttggttatcactggaactttggtatgaatcctacaatctgtgtgctacgattttggaatgttgatgatcatgaaggtatatttaagactcattttatgttatctataatttatatagctacttcatataataaaaaagttaatattttaggtcgtcaatgtctaatctcacataatggtgcttcaagaattacattcaatcaaagttacccacaaattaacatggatcgcgtcaggtaagaacgtttatatttacattatcccttaactgtttattgtattttttaaaattttggtcttggttatttttattttttctattttcctactgtttcagaactcaattccttcaacgaatgcaaacacctgagctagatgaagttgtggacgagaactgaaaatgcaaccccagacccctatctatcgttttatttaaaaacttatctacatatgttttaaagttgtacttttaaagactttgtttttttttattgactttcttatgattatttctgttaaactttaactttattataactccttttatttaatgcttactaaataacaatataaccgtaaacttagatcaaattataactgcttttagattgaccaattattaggttattttgatttaaataattttgatattttattgattttaataaaatgtatttggattgcaaattttgattacaatgtaatctaaaatatgagttagatatctacactattaaacaaagaaaaataaaaccaaaccttagagtttattagaagatttttccaaagaaatatgtcgttaaaatcaacatcgttagagaatcttctattatttcaactcttatatataagtgccataatagaattaaattatagattctgttgttaacaatatatttgcatatatattatttcctaatttttaatcacttccattattaaaaatattttaaaattttgttacttatttctatccattattattaacttttatggaaattttgttattatatgtctcaaacattataggatcctgtgattattagtaatttatccaaaaagttaagacaattggtatttatataagaactccaattaataataaggatacaatatttatattatttcctaaaatataagactcgccaaatttttaattttattaataattgatttattcaaaatatattacagaatcttcaagattgatgtttgacttgaaatgtcatgactgttactactttttaaaaaagttgcgtctaaaacatgcctctacggtgtattgtctctcttatatatatatatatcggtattattagcatctcataaaacgaatacaaaaaaataacaaaaacatttctgccaaaagatggaatcgtttcatcctctttcactgttgaaaccgtctattagatgatggtgtattcgtggtagagttgtgaggacattcttagtttcgctggttccatcttcaaaggttatgggtttgattctcgccgacgaacatgtaagtattgactgttttgtaatgataattctaggtttgcatgttttagaattttgattagtatgtttgatccgtagggtatgactattgaagctactgttgggtataagatgtcggatcactataaagattttattaatgaaggagaatgggtaacgataacaaattttggagttgttgagaactcgggttctgtcagggcaacaactcatagcttcaaaattggattttctgttgacactgtcgtcaaattaacaagtccggtacacgctattcctcactatcgtctagcatccttctcttcgattattgatgatgaaatcgataaatctgttttagtcagtgagatctttatgaatttgtttgttccttattttatatcattcatcttagggttcattggttttgtcattttcaatatcaattatatatatttgactctgatttattttaattaatttatgtaattttttggagatttggtgggagcgatctatgatgttggagaatttattaacacaagacctaagcaaaacatcgttgatgatttgacgctaacattcaaaataagtgataatgagtaagtttccttctttgatagtttaattcgaattacctaaattatactattctaataatatttttgattttatgtttagaaaccgtgttttggaatgtctagctactaagaaggaagctcttgactttgatcataattatcgtcaatatggtggtggagttattgtcgctgttcttggttggtggaagattgagcgttattttgatggtacaaagaacatacgtgtttgcaccgcatgcccgatatcaaccgtctttccggatcctgatattcccgaatctaacgagatccatgagatgtaattatataaacggaatatctatactattatttataattgcataccacatttgtttgttttgttggctccgtgatgaaggtgcaaggaatggcggttgaacatctacttaaaaaatgtttttacatgtagcctattgaactcggtctattattattttaatttctgtatgaacatatttccatttttatttctgtatgaacaagtttacatatttctaatttagaatacgttctaaatcttgatatcttacaatctcgcatcgctattattgacaaaatttaatatgattcatcctaaaataaatcttagaaggtatgacaaaatttaatatcgtagattattgctttttttttaaacatcttaatattgctttatatatctaattctactatttattaattcgtctgtctatatcagaattgcaaaatttagaaaaatatatttattattgctttggcttatgtctcatataacataattattttatcaacaaatgttagtttcacattctgtaaatataaacatatataaaattagaaattttctgattatgagatactgttaaacttgtataacacttacatacacgaaagtgtacaaagctactatgtgtaaacctacgtatacaaaatataaaattacgttcccaaacgtacatattaacttagacattgttttcatgctacaactctaggaaactatatatacttaccaaaatattgtttgacgagactaaatatatttattttattccaatgatacataatatacaactatatgtttacatataatgaaaataaagtagagtttatgttgaatacacataacttatatttgatgattgatttaaacaaagataccgtgcgtagcacgggtactgacctagttaatagtatagattacgtacccttaaaattcgcttttatagttgtaccattgactgaagtcgatacacatataactttgagtgtttaatgcattgatttttacaaatatataatttttacaaatctcaagttgtttataagatacaaagtgagattaaaagtataaagaatagattgtgtagattctttcataacaatctaatatgatataattttgtattttcttactttatcaatattgtatgatttataagagttttactaagtagacattgtaaaatttggttttggaggaaaaaattaatatcaaattatttcgtaagttatactagttctaccagtattatcgcagttttgtcataagttctattagttttaccaatattactgtgttaccacataaacaatgcattgtattacatcatgaaaacccagtgttacatagttatccaagtcgaaactgttttgtaaaacaaaaattgtctttgtctcgaccgcctttttaaatacacatatcctcatcctaatcctcataaatagtctagtgttcctcagttcccaccagcaatgcattgaaactcaattgcaatttaaccttacttttgtatacgcctaatttgtgtatatcataccttctattattgaaagtgtttttttcccctaatgtcattatcattaactatacttgcgacattcacattttaaaatgtatgataacgttctcgctcattgtctgctgcaaaaaaaaaatacaaaaactcggtcagtaatactagttatactatatgtatcagtaagactagttttattagttatactacaaacatcaataatactagattggatggtttcagattcaaatctacaattcacaacgattcaacatttgatatccatttatcacccatttaaagagttatttgacccaaacactatgcataaactttcaatttataaatctaattgaattgaatccctaaatttataaacctaaaacttcaatttcaagctttctagatttgttacatttagcttgtttggtttatttttttataaattgtaaagatgaaaataccttttctttaatgaaacttgtttcttatttgtttttctcggttgtaactttaaaacaattataaattaaaaatagaaaagaaaaagaaagggtattttcatctttacaagtttcattaaagaggaatgggatatgaagattagtttaggatataggaatttgatgtttataaaaaatgagataagagatgatttctccaatttggtgacattacccataatcggagaacacaagattggagaaagttcataacgaagatgtctttgcacctatagattcggatgcaaaatcaaagaaggcgagattggaaaattcagatgattggagaaaaaaattaaatcagcgaatatctaggggtgtgattctgataaaatcgttgattgcattggtgagattgaacacaaagactatatatatgttagattctgacccgcacatacgtgcgggatttcatattttaagaaatgtattagaatatatttttagtgaaagatattgtaatgtataaattagaatgtgcatagaaaagtgtatagtgttatttatgatacaatagctaaatttttattaatttatattatttatatttcatttgtattttgcatagcaaatcgaatgttagatttatttcgaattgcggaataatatagagattttggaaaatcagtgtatttttcttagtttgatgtatatacaaattaattgtttttgtttgaaatttgatcaattagatgatataatgtgaaatttactccgcggtacaccgttgttcgatttttttgtaactaaaaatttgaattttaagttatagttgttttgtatatattgttttttttgtttagtagattatcactagtagattatcgtcccgtatgattatcaatccaaactcgttccaccagataatttcattccgtaaaattaaatattatttttgttatttttaaatatttctatgtaatatattaagaaaatcgagggattgacctgtggtaaatcttggattaatatatttaaaaataatttgtgatttataaatttatgatattgtagtatataaaaccgatttttagtgtatacctttcaataattgtataaactatatattaaaaatcaaaaatttgtataaattgatattgcaacctcatgaaatcttagtgatttacccgtagggtaccacgagataaattttattttatttttttataaactgaaaaaattgttaattttagttaaaaataaaaaaataaattaagttatatttgttctgtttattgtttcagattgtataactatattttgattgttaattccatgattttatctgtggtataatattgaccaacacccgactagtttcttgtaatctaatgttgaccctggaagaaaaatccataagaatacgcataaatggatactaaaattaggagataaacatcattaaaacgtgaagtaatttacttatgaatctctatctatttttttaaaagaattaatattatagattgattgtgaggcaaaatgtgaatgtatgcataacatttataagagatagattgtacgcaaaattagattttattttggattcaatcttaacttttctgaaaaaaactaatctgaattacatattttaaatttaggatgacgaaagtatttttttttaaaaagctaaaatttactatgatatcaacgattttggtattttttaaattaaacttatccttatgcattatcgcaaaagtcattattgttcgaatacaattaatgatctggcaaaaaaatcatattactctttgttccaaagaaaaatcattcaaatttcaaagaaaaaaataagaatattggtgtgaatcaatattttctctttttgaatatttgcattaaaaaatttaatcattggtatttaaactttgttttactgtttaaaaaaaaaagaaataatcgaatctagaagaatgaatattccaaaagcttgtaactattataatacgtttaaaagtaatttttcttttatataattcaaattaagcttagtgatatatttttaaaataatgaaaattacctttttttaaaaaaatactttaaaagtttatatcatttaaattctaattaaaatgttaaatattttaatctatactgaaactattttctagataattacaaatctaaaatccaaaagttatcttttgaatatgctaaatcataatttaaaatcatttttatgtgtactaatcagaaacaattaatatagttttgttaagcgaattgtataaaatctaaactaaatgataatttgttattaaattagattgaagtttccgaattatctaataacatattaccaaaataaataagtttacatatatataattcgaattaaaatagcatgatatgttatggaaacgttttaaaataatttccgaaaatattgggtagttattaatttattgatttaattcgatttttttagaaaacaaaatccaagatatttatttagttgtaataattgttaatttattaaattacccatgcaaaaaattatttagttagttttaaactacccttacaatgttgtagttcacataatgcttcccaattaatagtatagatatgtatatatatatatatatacatatctattattttctagattttataaagctatgtggtacaaatggttgtgtaaggttttagacctttgagaggtcaagagttcaaaatacatttgaaacatgtttttattattttaaaatatccaaaacgacgtaatttatattgtgaataactttctagttggtagtattgacctgcatttttttaattgaagggttaagttgcaaaaaatcattttgaaggttttgtttttgtacaaaccccataatatttctacatactacacaatttgaattttcaaaactcgatgtaaatttgtaaaatgatgaatagtatttgtaagtaataatatgttgtactatttaggatgtataggaatagaatgtttgtaaggaatatactttactatttttcataactcattcgtaaaccatttttaattttaatatactaatcaatagagttaaaactatttaactatagatttgttttagttacaatcatctactagtttgttttacttaataaatttagttacaaactttttttcttgataaaacagagttacaataatctatcggtttgttttagttaatcaatttatttttgcatatgcattattgtttctttgactattcggaaattttcattagtttatgcatgtgaaaagatgaccataataaccttttgaaatggaatgctcttgaaactaatataacctaattaagaattactctctgtggataattatacctaactttactatattatagtttcagttcgcattgcactgaactgtttagattgatctcaaaattaagtttttttcctaaatattgtcgtttatcgaatataatcatttaaagggtaaattgattaagttgctttgcttgaataaaagaccaccattgctccttacaaaaatgttgattaaagttttctcttttttgatcctgatgataacaatggttattaacgttagcaaagaatgtgatgaacaatcatgtctaaaccttttgttggaggttaagacagttttctcatcactctcggagatgagacgtcgtgacatattgatcatcgttttgaagaattccgtgcgaatgatcgacatggctatgattggtgtgatggaagattcaaaactatatgaggagatgaaaaatgatatgcttagtgtgaaggaggacacaaaactattgatgttgcattcgtcagaaccgctaaataacaattcaaaataatttatcttttattaccacacaacttgtttcccatcaaaccaacttcaacctctaaaactagaatcattgtcaattttctcgtaacatttgtgcaatttaagaccaacatagccacaacctgcattcaatcttatacttggtttaagattgatacgaatttaaattattcaaaccaaaatctttaatgctacaaaattgaaaattatttgcggagtgtataggtaatagaacatgtgtgtttgtcgtcgatccttcttctttaaacccaaaattttatctcaatcaaggtcttacgattcataactattatgaaaaagcaaaaactattacgcagacaacatcatacaaaaacacatgttttatgcctcatcgaaaatataaagcagaaataactcccacgaagagagaagtgcccataatagcaaaaacgatgaaaaatagaaagaacaactattaagagtagtaaccaaccctaattgttactgacgactcaaaatttacaacttaaattatgatagaatgagatttatcacgttattatttatattgaaaagatatatgattaatcaactataatttttgttatttttttttgttggaaaataaaaagattatcaaaattaatatagaagtttaatgtattcacatattgtttttcaaaaacttacattttttaatttttatatatagtttttcttactcatatgttatttttcaaaagtttacatttctattcttcacatatataattcttttttttcttttcatagatatcttaatatatataatattataatttaaaaatattaatgaaagtgatggcaaaagtatcaattagtgatatgacttatcgagattggtcatttataagaatatgatagtataataaaaattgtgagactaatatgtattatttaaagaagatatggacaccttcataagcaaatagcctcaacttttttatagtatagattgataacttaaaattagaattagtaaatgattttataataaaatatgtatagcttccgtataattatctttctatatttatattctttatagaaaatgtaggtatagtttccttataattatatttatactttattaagtttttttttctttgatcaaacatatttttaagattgtttaagtttataatttcttacagttatctttttatgattttaaaattatcagaaaatattgttttacacttgtcaaaatatgagatcgataaatgtgccttcttaaaacaatcatataagttattagtcttaaaaaccaagctttatatgataaattatatatagatatattaaattatatattgattaattaatactgttatcaattttcaatattgataagactatacatttataaatttctttttcaaatattattttttatttgtattattttttataatgataccgtgtaatttattaatttataaatattatcagtttatcaagattagtttatagatgttttactgtaccacttgaactatatggagaacaaatatgggaagttatcctcctctgttggttcgtcctagaaaactctctcgggcacaaaagccaaggagccgcaaaccactgttgagatgtgttttcctcaccgatattgctcctccgacgatttccctcactgaccaacacttgcttcctaggtgatatatctcaagtgaactccttccggcgacgttgttatttcccgatgagtttcccctgatatgactttcttctgcatgtcacttacctcgatttgaggctcctttcgttgttgccaccagagtctccgccagaaccgccagacccaccaaacctaccagatcctcttcctcatatcaatagtttttccgacgtatctcatgctcaaccgcatctttccacctttctaatctcgttttcctccaacgaagctctttctccttcccagcatccaccatgttttgttcaatggctctcatcctcccctaccgactaagagaaccaggcgctcttctcaagctgttcttaggggcggaggtatatggctagcaaggggtcaattgacccctatggattttaaaaaattgtttatttacttatattttttgaagcaaaacttacaaaaatagtttaaaatatgtttattgacccccataaaaatttgtttgaaatagattttaatctttagataaaaattgacctctacaaaagtaatggctacctccgccacgactgttcttcaccatggttgctcccgctgttgctacccaggcagtagagtgtaacggggcttgtttggttgtcatcacctcaagctctcttcctctttcatgtggccaggttatgctttcgtcatgttccttggactatattcagatgtctttggttggcaggtctctcgcgcttgtgcgatctcttacggcttattgaagttttttcccttgttctatttcgggtattgattatatgaagatggtctttcttcctttgtgacagattggaatgacttctttaatgtctattcctccgttgaatctggttgatttctcctttatggaatatgtctttccagtggcggatctagaaaatgaatatgggtagggcacaaattattttatatatataattttattttgaatatgtaatatttatatattattaaaaatatatatattggatttttattagttaatataataatgaagagaaaaaaataaaatttaaatttaaaaagaaagaggtcaaacaaaataacaaatgaaaaaataatatatttagaaaattaatagaaaaaaggaaaaaaggcaaaatagataaaactcgaacctaagaattggtgtgctactttacaagactcattcaaacatgctaagtgacttaattatgtacatactacaaagaaaaacctataaatcagtgtggggcacgtgccccagctcctcttaacctccattcgcccctgtgtctttctcccaaaaattccacttcgtttgagtggtactgttgcaaagaacttgttgtcgattgtttcaaacactaatgctttaagttggtcatatgtctttgaatttggcatggatctggaatggcatttgaatctcttggatcacttcaatggtgactcatgtttaccttgtattgaggtttgtgttagacttgtacatgctaaccttttatgttgctaagggctttgtcctgatttttagcattggcagatgttgttttgtaaatgtggtgtgggaagtgcaatctctgtttagggctaagcttcctcatcttggtatccgctgccaaattctctttccaaaagtcccacttgtttgagtggtttggatgatcaatcgtttccggtattcaaaggactttccttccggctgatggtattctctgcccttgtcgcagagtttgtaaccctttgggttgcgatggatgcaattacacaagaagcttccgagaacgttcttttttgaactcttttagttttctttgttgtgttgtatcttcaatatatccttagtttaactttcttttggtcttcttttaagtatttactagatgaacatccatgctacgcatgagtttttgtttttaaaattgtcgaaaaaatatgattatatttttttgttgattttaatgttcattttgataaattcatctatttaatataataattattttttatgattaaattcatctataactcgaactatcaattctagtacaatattaatatttatatatttattattctaatatttcactatcatgatcacatacaacaacaatatatgatatattgatacgatatatgtagttatattacttatgtgttttgaaatttgtctaacttattgtaacaaacaattatttattccatatattctctcgtcatctagtacacaatcacatcatgatatgctagtaatttaagtcaacattttaattctcatccctactatatagtcatatagagtctcgtttttttttttgtatgtctaatgttttggataactattacgtgaaaaaattgtatatcaatgttacaaagttatcagaactcacaaaaatgtacagaaagaaggtcatatgataaatcaaatttacaaaacgtaataataaaaaaaatatctaactaaaattactaaattaatatgaggttaggtagcaaacatgtaaaatacaatacaagtaaatttttagtctttatggattaatgactattgataaaaaattttaataaaataagtagaatagaatgaaagtagtacttgatacattagtatgattttttatttattaatgtttttagaaaattcattcaaggatgagattaatggagaatttaacacaacaaaagacttttgattttttctcaattagttttactagttttttaattaattaatgtagaatgatacatgtcattttcttgtgtgatgatgtgtcatttatatgaagagagttgaccaactttcacatatatgattgctttgttatcttgtattttctttcctcctcttatatatgaagagttattgaattgattcttgtatatttcactgaatgatacaaagaacttgtcttagaagaagaggtttgtcagatgatggcagcgtcgtagagcctgtgtgagttattgataatcttgaaccatcagcaatggtaactgcgtcatgaccattgtagggttgatgttgaaagagatgttggaaattagatgtgatgtggtgcgtcgctccactatcgagtagccatggtgaggcagcgtgtgcttgtggcacagaatggagttgaggtaactggtttaaagcgtgtaattgggtgcatcgttttgcaccatgcccatagacaccacaaatttgacacctagttggaaattgtcgtagtggtgaaaagccaggaggaatgagtggcgcctccgtatgaagagtttgcctgttgcgtgaaaatgcatgattggcagtgactgagaattccattgaatgatagatgaaacaagagaagaagaatagatggtgactcggggaaaaaaaaagttaggtttttagagatctttgctctgataccatatgaagagttattgaattgattcttgtatatttcactgaatgatattcttacaacttatatacacagcccaaggcttagctagagtaattacagagaatattgagacattaatgaagaactcaattacaggaatttgacgtgtgaaggagaatcagattatgcactttccttaacactctacattatatagagttttgaggcttaattttaatgaaagtattaaatttgtccaaaaaaaaaagaaaaacaaatatggaaatgttgggttggtataagccaaaccggaaatctctataccaaaaacaaaaccgaaaaattcatgaaagagagttttattctttcagacttctggattcctctagagaagctgagaaataccaatttttcttctatacatgtcgcttctcctaacttctccagaattttattattgtctctgctcaaagctttcacttgccgttgaacaaacgaagaatggaggagaacgagcgcttgtcgatgaagaggaaagatattgacagagtaaacgatgacttctctgatttttccctctcttctcccgccaggaagattcgtcgtctggtaaattctctttctgagttgctgaaaaccctagaattcgtcttcatgatgatgatgatgatgaattggtgttatattatgttgattcaggatgtggatttgccaccgattatggaggaagaagagattgatttaccgatgcaagatacggtcgcggaagaaatcgagcttgagccggttaacgatgagagagcaattgttctatttaagcctcttcattatcatcagccttcttctggaaacgtatttgttgatcgacacttgatttctgggtttaagagtaagtttctttcaactttcatcaatttgttcatgttgtgattgaagcaatggttcatgattaggtataacgttgttgttgaagtgtattagtgatgattcttttgaactttctttagtaatgagataagtttcagtctatgattgttaaagggcttgtaagttaactttagaaactactatgtcacaacaatgtcttagctcaataagttaagagtatcttctttattttgagatatctccataagtttcagtaaacagtgcagataatctagtttatatggtatgagctcatatagttttatatgttgaacagattgtcatgttaactgggaaattatcatagatattatgaggattttgctgtgtcttagtgtcagattttgttctggttcgttttgtttgtttgcctttaacttgtgatccagaatgttgactaaatacagacggttgtgtctaaattctgaatgttaacacttgtgcagatagatttcttcgcgatgtatcgatagctgatgataatcagtatgaagatgagagattaaacaagtgtcaagctgttgtttgctggaatccgtctcagtctacttactcacagtccataggaaccttccaacaaccgcggacactagagattactgagttggatgagacaggtgaggatgtggtaatggatgatgcatccaatgagatagaagaggatactggaagcaccagtctatctttccctcagcaaggacagcagcaagagcaagagcacacctatggttttggcttgcatccgtggcagcaagcgcaaaactgtatgattccgcagcttcctcaagtcagtactactcccactcccatcacttggttccgatgatacggcttaaccacgggaaaactgaatagggaatgcacgaagcaggatagtagaaggcagatttgttgttagtttttgtttctgccttttgcgcagattagagatatggcatagttttgttgttgtatgtttaccaaactaatagcttcagccatatctcccctaggatggttttgactttcgaatgttatcttttggatgtcgttaaaatatcctttgagataaactacgttccaacttaacatgcacatctacagttaaacagactctgatctattcttatctgctttcttgtgtcagtcctctagtggatttgtgagataatggaatttggtaataatcaaactttaggtttaaaaactttcagcatgaaaatccagttatttggaagcaaaaaccaaaaggacccatcttcttcatagaaagtatgttacactgcaaaacaaaatagatggtatacacaaaaaacaagctaaccacatgctttcagtttcttcgataagacaaacccaaaaaacgaagaaagaagacgggttatataccagagaagacgagataagttcactctcgtctagctagattatctatcagcaagttcgtcgttggagccaaagattgatagcgtcgatgtttttttctttttcgatggttggtaatgtgaattgttaagtccagactcggttggcgtacctagctgcaacgatatatgatcatctggagatatccatgccagtggattagctgaaaaataacaagacaagcgaaatgttagaaacttgtaaaagcatagacgttttcatgttaataaagttccctaaagacaccaatgttcggttcgagtatacgtcaaatacactcttgactgaaaaaatgacatcaataatctaaagccttgatacaaaagataaccacaattatatttatgtgccttgataagcaacacaccttctttagctacaggggtgtttgtattatcgatggaatccagtagtcgagctgggcgcttcctcacgtagtcatcctgcagcggtttcgggatttgaaacgagaactgtgaaagtttcaccccttctccaatgtattcggagttgtcattcaagtacctgcaaaccagtaatagtggttataagggtgtaaagaagctagctatacgtcactgaaaacaatttggtaatcactaaacgaattggtaagtcactaagcttttttctcctaccattgttgtcactctcaaatgctgcagggaagtatcatggaaataaggatgatagtttaactaacttcttggcatagtacattttcgttagtaaacaaaacacatgcaaggatttctgtaatttgcataagtgcctaactctagttatgaccacagaacaatacttgaggttcctactgattcaatatattggttgacgaaaatggtaagactgatacagtgagacctcatcaaacataaaagtaaggaacactttgttaaatgtgaaaacgaaaatgtggaaatggagtggtagagaaactaacttttggacctccacagttgatcgaagcttctttccagacggagcaacataataactgaaacaaccaagataaaagaatgataaagaaagccaatacaatggtataaagaagaaagactaatattaacataaatgagagaagagttaacgaacgacatacacatcagcaaatctggtacctccttcacctctaatccgcagtaaacgttgccagccagcgggtggacgagagatattcggtttatcaatagcccaaagacgagttccatcttgatagatatcagcaggaacatcacaagaaatatccggcttccactcacgcgctgtatcgcagaaaaacgggttttcaagaagctgttccctaatctcttcatacttctgcattgaaggcatgagtctccatttgaaacaacttgcacactgaaccgtaaatgccccgatagagggacactgtgttctagatgacaaaggctgagattgaaccggtagaacttcttcttcagtatcatcatttcctttcaagtcataaaccactaactgattctcacctctatcctcattaggtgaagacgatctttggacagctcgagactgcgacatactcatagaaactacctataataaatggttagagaaatgaatgtcaagtgaaaacaaaaatgacaaatttagttaacaagaatcattcatcacaataacactagtctctctattaacatcataagagaacatgatcaagaaaacattgatacgtgtaaagaacagtgaacagtagaaaccctcgaacatttcaatctcaaaaatcaacaataatcataaaacagagcaaaggaaacaacaattatcatataatcaaagaagaacatgagctgatagagacgagatccaaaaaaaaaacaatttcatcgaaaagccgaaacaaagattaaaaatttatcaagaagaagaatcgttacacgaagaggacgagagcaaaccagggtttcagagatcggtgagcgaagaaggctctaaagatcgttgtggttaatttgagaatttcattttttgagacagagccaattcagacaacactctttgtctagatagaaaatggggaaaccgagaaagagaagagagaaagaaactgaatttaatttattttgtataaatataaaatttgttgttacgaaaataattcttaatttacattcacttcaaaatatatcatgctataagtaggagaatatttgtgcttttgggcttataaacaaatcttaccattaatcaaaatttccttcagaaaaaaagaatcaaaggataattctttctaatattagatatggattcgtgttgtgcatgctaaatagatgaaatatgtctaacaaatatttgccattgtttaacaaatattttgagacttccataatatgtaaattaaactttaataaaaacaaatatatgtcaattgttgattttttttttttgggtcaaaatatatgtcaattgttgatataaaatattaggcctgcgacttcgggtaaaccgaaccgaaccgagtcggttatttcgggtttcggttattttggatttttgaaaattcttccgaaactaaccgaaatttattacggttcggttcgattcggatattggtttctttggtttttaagtttaaaacccgaaaataaccgattcttttttttttatttttttttaacattaacagatatactttattagagggatgatgtgtaatcctatggaggatttgtacaagaaacagaggtacataagaatgagagacaaaagtaacaatgttttctaactccactttagctaatcgatcagctgctttgttagttgaccggaaagaccatttgataatggcagtagaaaacttcttccgccaatgttgtatctccatgacgaggttatgaagttcaaaattccttgtgttcccattgagtaagctttccacagtcctattatcaccttcaaatataatctttcgatatcctctactccatgtatgttgcattgccatcaagagagcctgtagttccgcttctagcactgagttgcatagttgtcttgtaccttgagccgcaagtagataactgcctgtgtcaattcgtaaaatccaaccagcctttggtgctagatcattccttgagaaactgcagtcataattgcatttgataaagccgtgaataggtttttgctacccttgcccgcttctgtcatttagacttcgtcgttgtgtgtctcgctgcagaggaatccactcatatgagtctgttatcgctttttgtacatcatcttgccaattactcccttttcgctggtaaactaacaaattcctgctcttccatatgtgccacaacatccataaaggtatttgtcttgtgatatggtcttgtctcgtatcagtacagcattgaaggattaatctgaatttatcttcaaaaggtaagtgtggattgaaaaacgctgtatgtgacaccggagagcccctccaaatagcttgaacataatggcatccaaagaataggcgttctaatgtttcaggagctgcacaacatcgtttacactgtgaatctgaaatgatatgtcgtcgtgtcaaggcctcgcctgtcgccaatgattgagttactatccgccacatgaagtgctttagttttggtgtcgtgtctagcttccatactactctcttaaactcgggtaaacctggtgggggaacataatcatgttgttgattcggtagatgtgtacagagccaataacttgatttgaatgtgtattccccatgctttgtgtagttccagcctagtacatcaggggacggttgtgatcttaatcttaaccttgtatcaatcgtgcttcatctgcttcaaagagttcttctattacttctttattccacatgtttctgccatcttgcattaggtgcttgacttgtgtatgattggtgaccgtcgcatcacgtttttgaggtggtcttggtgggtgtgttggaagccatgaatcagtccatatgtttgtctgtttgccatcttctataaggattcgaagtccttgctgcaggaggtctcgtccttctagaatggatctccaaatgaaagagggcttcctccggttcttgcattcagaatatttgttgtttcaaagtaccttccacgtaagaggcgagtgagcagggatgatggtgcttgaagtattcgccacacttgttttgctaacatggctttattaaagcattcaatgtccctaaatcctaacccgccttcattctttggtatggtcagccgcttccaagccatccagtgcattgatctcttatccgagcttttactccaccagtaagacgcaagtaatctgttgatatcatcacatatcccctttggaagtttgaaacagttcattgtgtaaactggtaatgacaaagccactgtctttattaagatttcttttccggcttctgatagaaatcgagttgaccacccttttgttttttgttgtacccgatcaacaatataggtaaagatctccttttttcctccaatctgttctggtaaacccaaatatttacccccaccaccgtcattatggatgtttaggattcgtcgaagttgagttttcacttgttgcttcacttttgaaccaaacgtaatggctgctttgtgtagattcactgcttgactagagacagtttcatacatccctaagatctccatgattgtggcgcatgatttgggatgtgcatgacagaagaataaagaatcaccagcaaaaagaagatggttaatagctggacccgtattacttatcttcattcctctaagcttgttgactaacgttgcattggtgaaaagatgagataaaacttcagagcacaaaatgaagaggtatggagagagtggatcaccctgtcttattcccctgcttggcttaataaatccatgcggtgaaccattcacaagaactgaaaaagtaacggagcttacacactgcatgatctagttaatccatttgatgtcaaatcccatatggatcattgtgtcttgtagaaagctccactctagacgagcataagctttcgaaatgtctattttcacagccatgtaagatttagcccatctcttcctggatttcaaagaatgcaacatctcatgggccataatcacgttatccataatattccgtcccggaataaacgccgcttggttctcagtgataattcctgaaagatgattcttcaatcttccaaccaggttctttgatatgatcttatagctaacattacatagtgcaatgggcctaaaaccactcattgttcgaggtgtctccggttttggtattaagcaaatattggtgtgatttgtctcagcccccaacactcctgagttgaaaaaatctcaaacttcctttattacaacttctttgatatcaggccagaactgttgataaaaagctccagtcaatccgtcgggacccggtgctttatcctctccaatcccaaagactcgattctgtatctcgtcctctgaaacttctcgaaccaaatcattattgatctcattggaaactcgtttctgaaagccatcaaacaccgcttgatagtttatatgaggcgatcttgttgtagaaaatagctccttgaaatacccttctgctatgttgccaatgtctgaatcaccatgatggaaattgcctgaattatcttctaaggatagtattctgtttctcgccaatctcgtctttgctcaggcataaaaatatttggtgtttctgtcaccataattcttcaagttgttcctactcttcaacctccaatatgtgtcttcatcatgataagcttgacttaaatcttgtcgaatgtgatggatatcctgagttgtgaagtcgtcattcgaaagagcaaaatctaatcgtcgtttcaagacttcaacttgttctgctaaatttgtacgatgtcttcttttccataaagccatggatatgcggcactgtttaatcctcctctctagaggcgtgatctctgttgcagcattccaactttcaaggaccttctctttgaacccttgtcggtgaaataatctcttatcatatgtaaaggtaccatagcgacttcctaaagtatcggtgatgcttgtaatcaaagggcgatggtctgagccttcaaaggggaggaactcagtttgagcagagggataacaagcaagccattgtgagttgccattgaacggtcaaggcagcaccatatatcatgtgtatatatctttcccttccatgagaatcgatcaccaaaggatttaagatcatgaaaatcacatgttaaaatcattcttctgaaatccaaaaacctgctctctggtcttggaggaccgcatcttttttcatcattggatttgatttcgttaaagtctcccataattaactaggcttctcttcttgtagttgaaatccgttctaatcgttcccataataagtgtttgttacttggttctgggaaaccatatacaaaggacaagtagaaacagattccattactttcaacatagcaatctacaagattagaagactaggaaactacagaaagggaaacattagaattccagaaaacagcaacaccaccactcaatccaacaggaggaactgaactactcctgtcataacctaagtcaacacatacatctctgactttgtcatctccttgctttgtctccaataggcataagatttccgggagatacttccgacgtatctccttaaggtgtcgaactgtaaggtctatgcctaaaccttgacagttccagcagggtgtattcatggcggttgtggtggtttggggcccactgcgcctctacactgggtgatcatgctagaagagccacttccttctcccgcttcgcgtatcaccatcttcaagttgtcattgccttcagtctggtccagagagtcctctcgcttcctctttcccctttctgcagccatggtctcatgatcattctttggttgcgccatgtcttcaggttgagaatgaatgttggcagaatagcgactgtaactttcatcacctggaatatctcttgttgcattctcaaagattggaattgggttaaacaactcattagtatcatattcaccactttacatgctgtagcgttgataatcacggagatcatcatcctcaaccggtgagttaggcatcaggtcaatatcttcaacatgacgaggttcttcccctggatcagcaatcacagagaggatttcaaggcctccattctcctctccttcttctatctcacggatgaccactccctgattttatggctcagcatttggcatatcatcatcttcatcaccatcagaatttgaatcagcatcaccattacaaagaatacacgctcctgaatcatgcgtaagcattcgatagacctcacaaaaacctctcagacattcaaatcggaacctcaacaacgtgttgacaattgcgttgaaaacggagtggattcacactgttccaactaatctgcacacgcacaaattcaattcttgccgctgcctctgcatcgaagtcaatgtccacaacatttccaattgctcgcccaatctcgccaatgacatcacggctgaggaaatggaatggaattccacggatttgaatccaaaacggtatgaagttgaggagtggaggattacccagcggtgaccacctttgaagtatcagcattctatcattgaaagcccatggacctctcctgataaccgtctccatcgactcctcagaaggaaagatgaattgaaattgattccctgggataattctcccatgaaccaggcccgattgaccctagatccggggcatggaagccacaattgatcggagattctgacgacgaggcatcaccggtcggcccatgaggatgaaccgattctccgccgctgcctgagccaccactgctgccgaaagcgccactggttcgtcatccacacccaagttaatgtcttgtactgcccgtcgtagattatcagccattttgcgtagagtgtgataatatcaaaaggggaaagggagtctaagagggataattttttcaagaactgtgaatagacgaattgcaaatctgggtataaatagacttgagatctttacaattgctccaatatcatcacgacgagaaggtggtatagtcatggagataaccgtcggagaaatgggtcgaaaggaaaccacatcgtcggaaaaatagagaagaaccgtcaccagagtgatggtgggagaacggttaagtaaccatatataaatcgccaaaaaaatcgccattttgagtttaaattttattttcttttaattttttcgtattttattcatgggattcaattaaaaccatttgggctttgattgcccaaacattaaataaaagctcacacaaatacaagcctataagtccaaatgattagggttttgtcttctttgaagaggttgtagtggcggggggcagacggtgtcttgtcggcaatagaagaagaacaaacaaattcatcatcataatccgttgtttaaagctaattaaaggaaaagaaaagagaaaattttgtgtagaagaagaattaattgaagagtagagatgagaatatgaagaaaggatgaaagaagagaagaaaactaacttaaaacaaaaaaaagagaacgaacaaacagagacgaaaagagatcaagagaaggattgactttgtgtgagggtgagagaaattcaacgaagaagatggatgttgaatggtgagaggctgagagcgttcatgatctcgtttggtgggagaaagtgagagagtgcgagtgaaacaattagaaaattagggttggatgtgagtctactaggttagtctggtttaggattaaatgttggttaaccattcggttatgtataaccgataaccgattcttatttattaaagcttccaatcggttatatgctaataaccgaacccgaaccgatttgctcaaatcttggttcggttcggttcggataaatcggttcgggttattattccaggcctagtcgataacatcaaaagaaaatattcttactagtgaaggattgtcacgagtccatctctagttgttgcgctcttaagatcgatatctctgaagctttttattaggttcaatggcctttttagcttaatattcttaaggccatgaatctacttgaaagctttattcacttgatcgagttgtgtaacttgtgtattggttggtaccgactatttttctgttcaggttaaacgggagttagcttgtttcctttatttggagtgtgaggagactgaggcaaggctgttccttatcaccatatctattttttcatttgcatgaatgttttgtcattaatgcttgacaagacagatgctgataaacaaatacgaattcatcttagatgtaaaaacattgagactcacacacttgtcttttgcggatgacatattggttttcttataagcacgtgggagcaaagactcagtttggtttggttagaagaagacccggttaagttggtttataccttttatatataatctttactagtttacgagagaggatcatgcattgtttgatgaatgtacagtgacatatgtgtcacttgtgagagagagttatgaatcggtgatgtgttggtggctcaatctcgagttaaacggtgtatcggaagttaagaaatagagattacgtttcttattcttaaaattttctcggatggaagttctcggtcagttgcaggtattttgtaggtctttgatcagcttgcaacaaattcggggttaaaaatagatttgaagaaatctaccttgttcatggcagggactacttctcaacatcgaaaaaatatacttggatagtttcccttggtcttctactactcactaattgtatgacatggacagattctcttccttcgccagagagaatcagaacgcatataagctcttgaactggtgggtttttatcttttgtgggtcgcctccaattgataaaatgaatactttcaagtcttataaatttttggctctccgctttccgcttgccaagtaagtgcattaaagaaattaaaagtctatatccagtttttatatggtcaagatctgagttaaacccaaaaaatgcgagattgtatggaaaaatatttgtaagccaaaacaaaaagggtggtctgagataagattgctatccgaggctaatagggttagtgtcttgaagcttatatggagattagtctctgcaggggattcaatgtgggtcgattgggtccataaactttgtttcataatgcttcgctatggtccgtatgtgggaactcctcccggttgtggctataaataattctgaagtatagaccaataacgaaacctctttataggtggaagtaatatcttgtgagggtacctttttcagcatgatgtttggtgcacacttgggaacttgttcgatattctaggcccacgaggaagtattgatctggaaattgcctctcgaagctacgtggctgacgtgcttgctactcaccgccgtagacgacatcggcttgatttgaacattatcaaagatgagcttgacactaaccgcaatagttctttaaactggtcaggatatctcaatgtggaaaaggcaaaatggctcctataagtgcaagttctcgtcccaacataattggcacttgatttgggaagcaaatccaaaatgtgattggtaatcaggtagtttggttccccaactctactcctaaatattttttcataacttggattgatattcaaaattgtctaggagatagatttctcttgtggaatgttggagcgaacggaagttgtgttctttgtggagatggagtagaggcaagaaatcacttgattttctcatgctcttactcctcccaagtttggactacacatgcatgtggaattctagttcacatgttcacaacaatttttgggaatctcatatttgagacggagccaattcggacaaagagagctttttagatttgttgtctagacagaagatgtggaaaccgagaaagagaagagagaaagaaactgattttaatttattttgcataaatatgaaatttgttacgaaaataattcttaatttacattcacttcaaaagatatcatgctttaactaggagaatatttgttcttttgggattaaaacaaattaagtttgttgataattgtttgttaatataggggatcttacagttaatcaaagtttcctttagaagaaaatgaatcaatgtatagttctttttaatattatatatggattcgtgcatggtatgtgctaggtagataaattaatctaacaaatatttgccattgtttaataaatattttgagacttccaaaataagtaaattaaactttaataaaaacaaatatatgtcaattgttgataatataaaaaaaaattgttcctagggaaggattgtcacaaagtcaatctctagtcgttgcgctcttaagatcgatatctctaaagctttagattaggtgcaatagcttttattttgcttaatattcttaaggacataaatctaccggaaagctttattcacttgatcgagttgtatagcttgtgtattgggaatgcctatttttctgttcaggttaatgggcatttagcttgtttttttcagagtgtgaggagaccgagacaatgttgatgaacaaataggaagtcatcctcgatgcaaaaacattgagactcacacacttgtcttttgcggatgacatattggttttctcagatggaagttctcggtcagttgcgggtattctgcaagtctttaatcagtttgcaacaaatgcggggttaaaaataggtttggagaaatctaccttgttcatggtagggactgcccctcaacatcgagaaaatatacttggacaatttcccattgaaatgggttcactaccattttgatattttggtcttccactactcactaaatgtatgacatggacagattatctgcttttgctagagagaatcaaaacgcatataagctcttgaattgttcgttttttctctttttgcgggtcgactccaattgataaaatttatactttcaagtctcacaaacttactttctctctgctttccgcttgccaagtaagtgcactaaagaaattgaaagtctttatccagcttttatgtggtcaggcactgagttaaacccaagaaaggtgaaaattgtttggaaagatatttgtaaaccaaaacaaaaagggtggtttggggataagactgctatacgaggctaatacggttagtgtcttgaagcttatatggaaactagtctcttctgggtattcaatgtgggtcgattggtgataacactgtattttactcattttaggtgtgtatttatcatcatttagctttgcatttgctcattgtatcatatcattttgcaccactttagcttgttttgcatacttaggcatctaggatcatcttgcatatgcattgcatgttttggtgtgctttcaggtgcagaaggaggtaaaaaggactcaactcgatccattcacttgatctaggcagcttcagaagaggcatcattctactcgacctctttactcgatccaggatgctacaaagaaggctgcagtttactcgaccctcttactcgatcaaggcaacctcagatgaagaagcagattgatctactcgcccctcctactcgatccatttactcgaccaagggtgaccaactctacaagacttgttgagctatcaaagcgtcttcggatcctcctcattccccactcaaccagacatctgcgcatatggataggagaagatgaagcatctactcgactaattgatcactcggagcatagacacaaaggcgcagactttgcagcaccctctttactcgatccccaagatcgattattagcccaaaccgcctcaagtcacttgtcttctagtaaatctagggtttccaatattttagtataaatagatcactttgggatttgtccaaaggatatatgctttatctttaggttttctttgtgttcttgaatcttcaaaacttaattactcttaatctatttcgtttttgcatttagttgttttagtaaagttgtttaggttgtttagatctaccttttggtatgattttagtaatttctgggtttgtattcttgagaatgttgcatgagtagtgattagggttcttgaggattgattagattagggtaatatctaggttagttaggtggttagtgtttaggtttatacccttctggattcgcttggcccatatgcggttttcactagctaatgtggagattcgatcatagacgtccagcgtccaaaagacgttcaaatggatgtctgacctacaaattcttgagatttgttgactcaaccaagggattggcttgtctgcctattggctttggtagattgttttttaaatcctgctctgctatgtttcatcaacgagagttgagattagaaagtggtagagttatgggggtctctgtcacgatagtggattgacccagtttttgaatctatcgtcatgggtatatacctttcgcctattagccatctgatgaaccctagagttgcccttatcaatgaatccatccttagaacttctattagatttatttgtatctcctgttgattgcacttttatttacccgttattcgtatcccctatttgtatcccctgttgattgcatttaggtttcttaattttgtcacctgttggttctactcgacccaatgatcgagtagggctcttaagttcttatttttacttgtttgaatcctgacctaggattgttactagaaacccaccatcattataatctggcttggcttagtagtttctgtacacatcttgattgctagcaatatagtggactggattgacaccccctatagctgcatcgacatgtttgtgttttaggggaatggaactgaatcacacattcaccataagcagacctgtaaaacctgcttatcaatttggcgccgttgccaattcattgtagcattgttacattcaagatatcagaaacttttaagatcaagttcttttaaattttactttggttactgactatgtgttcttctctttgtctgattgtttgaggtacattttgagattggccaagaagataaaggtgaggtcgagttagtcaaaaacctctttccacacaacaacaatatagaccctttggcatgagaagcacatggtagaaatgcaggctctgaatgagaaattagacaagttcattctactatagaagaagcaagctcactttgcttgtaaagatgagcagtttcaggttcagaatttggggaataatcagttagaagagataagatacatccagaaccagggagcctatatcaatggtttcaacagctatggacaacagcaaacccattaaaagccttttgttccatacaatcaatgtcaaggatttgttcctatgcagcagtttcaaggaagctaccaatagcagcagtatgcaccagcatgttttgctcaacaacaaccaactaacaatgcacacgatgcagacatgaaaacaatgcttcatcagatactacaaggtcaatcttttggatctatggtttcggaaacgaaacttgctgagatacacactatggtggattcctcttataatgatctgaatatcaagtttgagactttgaactctaagatgtgatacatggaaggacaatttgcttctacttcagcaccaacgcctccatgccaacttcctggacacgccattcagaactccaaagaatatgccctttcagttacacttcgtagtggcagaaaacttctcaatagtcagaacaccgagcagatcactgaggaagtgaagttcaagaaggggaggatccacatcaaaacgaaatccaaaccaattaaccaactaaacataatcagcctttagcttcactcgatcgagcaaagccaacttttgaagaaaaaaaagctgttgttgcaataaagaataaagaatttgctccgccaccctacaaactgacaatgcctttccctggaagattcaagaaggaattaataaaaaaatacaaagccctttttgatagacagctaaaggagattgaactaagaatgccattaatggatgctttcatgctcattccacactcccacaagtacctaaaagatctgattaaggagagaatcaaagaagtacaaggaatggaagttcacagcaaagagtgcaatcctattatacacaaggagagtgtcccagaaaagctagaagagcttgctgttgaagatcaactccaaacttctttgactaagagagctgaagctaaatatctccctaatgagaccttgatctctatgaagtcattagtctcccacaagattatagcaggggtagatgtcgttaaaggtgtgattaggtcaaaaacagaggttatgacaacaaaagaggcatgttctactcaagctcgaccatcaaactcgactagtaggtcgtgttcaacctccactcactccaaatgctcaagctcaacgtctaaactcgacctgcatgttaagcaaaccactgtagcatctgataattggttaaagcttcagagaagatctaaatggcaggagaaagccataagggagctaacacaaactgtgaaagaactcaaggatcaaattaaggacctccgtgggaaatccaaccaagtaccattcaacatcaaagacaaaccccctgatggaaccaccaccttagttagcaaagctgaagctgaactcaaagtgaatgggcagagagtcaagccttgtatggctgagcagatcattcaagaggagagctcatttcctctcctctcatcaccctttgcctgaaaacagtatgaaagtcaaactaaagactttaaactagcttacttgggaggaaattccatgtttatccttgtatatgcttttttcccttgttagttttgatgtttttgtttaagtatttcaggttttatagtccagagaagtcaacgatcgagtgatataaatcgaggcaaagaatctcagacgtgcaatagagtgacttaatgcgaagcatccagctcaactgagtcccacacaacctgatccctggagctacacaaagtagagtatggacgacttcgtctcctcctacttaacctaaacgctgaggtaacaccacctcaaccattttacataccatagcatttttatttttctttgtgtgttttgtgttttggtcttgaattcattctcagatttttattacacaagagactgtgtaatttaagtttgggggagggttcaagacatgtttaacattgtgttctcttttcttatctcaaattttgcatcatctagggcatagaaaaaaccataaaaatttgaaattttttcagaaaatgatttcatcaaaaacagagtgtcatgtagattgcatatcattttaggattgtatatagtgtgcttgcatttaggattgctcatttgcatatgggataatgatgatttcaaaccgataagcatgttttgattatgaagtaagttcaatgcccaggttcttagttctttgttgcataaccgattgtatctctgaagtaagactgcaccctgctttgaatttgtaacttgactatacttctttaattcgaaactcgcttatctgatgccattccctatctattagaacatgaattgaatttgaaattatcaagtctatgcattgtttgtgaactcatggctaccatatacatacttggattatcttattcacttcaccaccctctgttaatccaagtagttgtttcacatttttagagcagtttcccatacccttagcctagccttatttcaagccaaagatcatttgtatgtgattgtgaggtttttttttattgagcttggtataacttgttaggtatgagccgacaagaacagtcttccatgtagacctagcccacgctttttgggttagctaggactaggtggagacttgtatttgggattgggattgtgtatggaatgaatgggaatgagaatgagattgaaaagaaaagaaaagaaaaaaagagagtaagagtttagagttctaagggggatacaaaagtgttaagtttagtaaagggtttggaattcaaagaagttaggcattatgattcaaagaaaagggtaaaacgccctctatgctaagattaaaagaaaagccttaagtttgtcaaagtataaaaccaaacccgctagactcttaaatcgtttcaaagagaaccccttagaacttgaaccaaaagagagaaagaatgagaaaaagggtagagttaggacatctatgggactgggatcatcttttgagcttaatgaatgggagtctgttcttgtatgtgtccaatgacttttacctttagcattctgctgaagctcaatcttttctctgagagtcccctgttactcgaccaatcacaagagggaccatttttgtctcatagcctaagcccgaaaccaagtgagttcataaccattgcattgcttgatccacttttcgtgcttaatgaatgttaaaggaattggttgatgagaatgcttgaatagattaaggcaagttgttaggttgcattctgacgagtatggctaacgtttttgagtaaaggtctatcatcttgcaacctagaattagctacctggacattgagcttacccgttctatatgcatgctttggtttttgaatccccatcttcaaacctctccttcaacttaagattttttgtttgcttgagggcaagcaagagataagtttggtggagttgataacactgtattttactcattttaggtgtgtatttatcatcatttagttttgcatttgctcattgtatcatatcattttgcaccattttagcttcttttgcatacttaggcatctaagatcatcttgcatatgcattgcatgttttggtgtgttttcaggtgcagaaggagctaaaaaggactctactcgatccattcactcgattcaggcagcttcagaagaggcatcattctactcgacctttttactcgatccaggatgctacaaaggaggctgcagtttactcgaccctcttactcgatcaaggcaacctcagatgaagcagcagattgatctactcgcccctcctactcgatccactactctatccatttactcgaccatgggtgaccaactctacaagacttgttgagctatcaaagcgtcttcggatcctcctcattccccactcaaccagacatctgcgcatacagataggagaagatgaatcatctactcgactaattgatcactcggagcatagacacaaaggcgcagactttgcagcaccctctttactcgatccccaagatcgattattagcccaaaccgcctcaagtcacttgtcttctagtaaatctagggtttccaacattttagtataaatagatcactttgggatttgtccaaaggatatatgctttatctttaggttttctttgtgttcttgaatcttcaaaacttaattactcttaatctatttcgtttttgcatttagttgttttagtaaagttgtttagcttgtttagatctaccttttggtatgattttagtaatttctgggtttgtgtttttgagaatgttgcatgagtagtgattagggttctggaggattgattagattagggtaatctctaggttagttaggtggttagtgtttaggttatacccttctggattcgcttggcccctatgcggttttcgctggctaatgtggagattcaatcatagacgtccagtgtccaaaagacgttcaaatggatgtctgacctacgaattccagagatttgtagattcgaccaagggattagcttgtctgcctattggctttggtagattgttttttaaaccctgctctgctatgtttcatcaacgagagttgagattagtaagtggtagagttatgggggtctctgtcacgagagtggattgacccagtttttgaatctattgtcatgggtatctatctttcgcctattagccatctgatgaaccctagagttgcccttatcaatgaatccatccttagaacttctattagatttatttgtatcccttgttgattgcacttttatttacctgttatttgtatcccctatttgtatcccatgttgattgcattgaggtttcttaattttgtcacctgttggttctactcgacccaatgatcgagtagggctcttaagttcttatttttatttgtttgaatcctggcctaggattgttactagaaacacaccatcattataatctggcttgacttaatagtttctgtacacatcttgattgctagcaatacagtggactggattgacaccccctatagctgcatcgacatgtttgtgttttaggggaattgaactgaatcacacattcaccataagcagacctgaaaaacctgcttatcaattgggtccgtaaactttgttgcataatccttcgttatggtcagtatgtgggaactattctcggtcgtggctgtagagaaaaattttgaaggacagaccaacaacaaaaccactttatacaaggtggaagtaatatcttgtgagggtacctttttcagcatgatgtttggtgcccacttgggaactttttcgatatcgtaggcccattaggaagtattgatctcggaattgcctctcgaagctccatgactgacgcgcttgctactcactgccgtagacgacatcagcttgacatgttgaccattattgtaacgcctcgactgtccctactagtgggccccacgtcctctctcgggctcatggcccactcttgtccgacggttagtatgctacgtctgggagagtttaaagacttgttaccgaccctacaaatcaccacatgattatttctcatgctttgttctcacccgtatggtttcgacaatcacttcctggaaggtcaccaatcctgaaactactccagcccaagcacgcttaactacgaaattctctcaggacgtttgaccaaaaatataagtgcattttggtgacataggtggccaaatgaattcttttaaacctctcagcatgcaccaccatattcctttaacctggatgttacaattatcaaagatgagcttgacactatccgtaataggatccttcaaactagtcgagatatctcaatgtggaaaaggaaaaatggctcctacaagttcaagttctcgtcccaacatacttggcacttgaatcgggaagcaaatccaaaatgtgattggtaataagggagtttggttccccaactctactcctaaattatctttcttaacttggattgctattcaaaatcgtctagctattgaagatagttttttcttgtggaatgtaggagcgaacggaatttgtggagatcgaatatagacaagaaatcacttgtttttctcatgttcttactcctcccaagtttggactacacgtgcccaaggcattctagttcacaggttcacaacaatttgggaagctctacttcccttactcacggattcaaatacgtcacgacttcactcgttcatctatggcgtgtacgtaacggtcgacgtcacgagagataccaattacatcaccaagcttacttcgatgattgacaagagtgtatgcaatcgacttagcctaactgtttcacccatagttcctagtttatacctctttatatattttctgattttttaattgttatcaattttcatgatacatttattgtaaaatagttattttgggaaataaattttacattcatgcaatacaaaaacctatatataattgagatttctgacaatgccatgaaaatatttttaattgaacaaaaccaaattttattgatttttcattaaattgtaagcatttctttacttctcattcaaattgttaacattaattaactttgccaaaatagtcgagtcgttaagtttggctgagaaaataaattaacggttagttaaagttcttacacaaagactaaaaaatcacaaaaatctcatttaatatatttcttttacgtaaaatattattgaatataactacacaagaatggttaaaattatttttttataaaatgatcttttacacatgttaacagcttaaacagttaaaaaataatcttttacacaaagattaagaaatcacaaaatctcattgaatattacaaatttaaccaatacaaaatatattgtaaaataaagttggtcagaaaatattaaatacatttatgtttgcattgaaagttcaaaacaaaacttattttgcaacaaaaaaaaaaaccttaaactacataaaattgaaacgtggagagtagatgttaatctacaaaacaagattttcaggggagacttaactctgttaatttattctgtttagtcaaatgacacaagttggaatcccaaaattgttttaacatattttgataatgggctaaaggacttgtttttctttaggcaaaaaatttatcgggcttagtctgcataagaagtctaaaaatcagtatactattgtgaaaaaaccgagtttcatgagtcgttgatataaatcacaaaatttaactaatatggtggataatgagagtattgagtcgattttaaatcagaatggcaagtgaaaagtacactcaaacaataaaaaaacttttaatgtttatggccatgtttgtttgtccatccacatgatccatccaaatggagatgaaaaatgatgtttgtttttgacaatttaacaagcatttggatggatcatctggatgatacatctgaatgagtttctaaatttaggcaaatttatgaaactcattttgatgaatttgattaaaccatttggatggagatggttcatccaaaaataacaaaagactgatataccctcatttatagtcataatttaaataattttattttctatagatttcttatttaatattttttaaattacatattgaaacaaaaaaaactcaaaaaatcatgaaatcacggattattcttttatgtcaaaatcgtaaaattgtggaattgtgttttttggccaaaaaccgcaaaatcataatttttgatgtaaaattatagaaatcgctattccacctaaaatcataaaactatatttacgctgaaaccactaaattatattttcttgccaaaatgacgatattatgttttcccgccaaaactgcaaaatcatgttttcctgccaaaattgcaaaatcatttttcccgcaaaatcatgttttcccgccaaaaccacaaaaatcttatttttacgccaaaaacgcaaaatcatgtttttcccgccaaaaccataaaatcatgttttccgccaaaaccgtaaaatcatgttttttcgcaacaccgtaaaattatgtttcccgccaaaaccgcaaaatcatgtttttcccgcccaaaccgtaaaatcatgtttttcccgccaaaaccgcaaaatcatgtttttcccgccaaaccgcaaaatcatgttttcctcgccaaaacagtaaaatcatgttttcccgccaaaaccataaaatcatgttttcgcaaatccgtaaaatcatgttttcccgccaaaaccgcaaactcatgttttcccgccaaaatcgcaaaatcgtattttactgccaaaaccgtaaaatcgtgtattctcagcaaactgtaaaatcatatttttccgccaaaaccgtaaaatcgtattttcccgccaaaaccgtaaaatcatattttcccgccaatatgtttggtattgataatgggtaataatgttgaatatttgtcatttgttaaaatgaaaacatgggtattttagtcatttttatctaaatgaaaatgtgaatgaactacaaaatgaaaatgtgaatgaactacaaaatgatcaaacaaataaagatccatttaaatgcatcatttagattaaattacaaataatgaaacaaacatcattcaaatgtatcattcaaatgaatgtaagtggatcatttgaatggaaatgataaatgatgaaacaaacagggcctatgttaacatacattattatgtttttagcactatttatttataccacaatcacaaacattgttttgttctttaaaacaaaactaattaatgtagtataccacgtagtatctatataaatcacaaaatatttaggttaggatcctctaaaaaatatagacataaggatttggaaaaaaaaagatttgtgaaccaagaaaataactaaacttgtcaacaaaaccttattaaatttgtccaaatcaactcaatatctatatatacatttttgtagacgttttttgaagataatgttgaagatttgagccataattcaacaattaattcaaatgggtgggtataacccggtttaactctgttcggatcttggataacatgtttaattctgttctgatcttggataacattaatttttggaaaagttacctaaaaactaataatgaaaaacgaaattaattatttaattaccaaatttaatataaacaatatctctaaactaaccatatttgttatttaccttaactaatttcctaaaatatttctacctaatttaaacataaatatataattcttctttcacttttatttgatcttatactttatttattttgaatttatataaaatatatatagttaataaaatattatagttttttctgcatatgatgtaattcaattttttttaaacggacatatattattcaacctatgaagaaataatatatgtacaatgtcgcacatcgcttagaaaaattggacaatggttcagacccatattataaaaggaccaaaatgattctgattacgaatgagcaggaagcttgatttatcaggcgtccaaaattaaaatagttatccgatttactcggggtttttattttaaagaattgaaactttaaaatgtttcaagaaattataaatattataacttaatcaaaatttaaatattataattttattataaagtttatctttaaaaaatgctttaaatatttataattttaaaacttataatttcttgaaaacttataaattgaattttaaaagaaatttaaacattataaatatatataaaatatattaatacgagacgatatattacatgaaaaatcttaaatataatcaaggtcgatattgtattttttgtaagtttcaaattttataatattgaaatttataagaaaatgacaaaattatgtttaatttcacgggactgggttatatggtaggaagggtttgggtggataataattatgattatacaatgtcccacatcgcttaaaaaaattggacaatggttcagagccatactataaaaaggaccaaaatgatttagattaggaatgagcatgaaacttgatttatgaggtgtccaaaattaaaatagtttgtttactagggttatttattttaaagaattgaaactttaaaaagtttcaaaaaattataaattaaattttacaagaaatttaaacaatataaaatatattaatatgggacgatatactgcgagagaaatcttagatataacactcaaaattcaatgatgaagtttgggtcaatattaatcttttttaaagtttctaattttataaatatttgaaatttataataaaatgacaaatttgtgtttaatttcacgggacggggttatatggtgtgacgggtttgagtggattataacatgggatggtatgctacggaaaaaaacctataattaacaataataatataattatataatcttaaatactaaacaaaattaacaatattaaaaaaaaacacttaaaactttaatttttttaaaacacatttcgattcttttataagatttttctcgcagtactaccacgggtgaaatcctagaattgacgggtttgaatcgatattaatatgggatggtgtactacggatgatattttagaattgactggtttaggttgataataatttgcgatagaattaggagtgaaatcctagaatgacaattaaaatataattacacaattaaatactaccacaggtgaaatcttaaaattgacgggcttgattcgatattaatatgggatggtgtactacgagtgaaattttagaattgactggtttgggttgataataatttgcggtagaactagaagtgaaatcctggaatgacaatcaagttattattatacaattaaatactaacacgggtgaaatcctagaattgacgggtttgattcgatattaatatgggatggtgtactacgggtgaaatccgagaaacaacaatcaaaatacaattatacaatattaaacatttaacaaaataaacaaatacaactgaaaactttaaaatttgagttataaaatttcgtcttgcgatgaattatacatttaaatcaaacaatagcataaatttattaaatcatcctaaaaaagattcaattattttttatttaatgaaaatataggcccgcggtataccgcatgttaatatctagttatactttataaccccaaaataagttaaaaatatcatcaatacataattaaatcttgtcctcatagactatacttgtctatgaaataatgaactaaagtttcattttttgcccttttcgcaattgttatccttcgaagattttcttcgtttcactggtcgagtacgcttcttcacgtagttatcgtccaaaggtttcggtatctgaaatgagaattgagaacgatttaccccttctctcacgtattctgggtggttgtccaagaaactgcaagtcaaaaatgaggttaaattgcaaaatgattctatacattggtttgcaaactggtaagacattgatacactgattctcatccctaaaatcagatataaaagaaaaagactataggaaaaggaaacaaagagatggaacgcctacagataatcctaaactaggaaattcaaagagtgttaacctatgagctttttttataaattacataacagttgttagaaaatattacctttgaacctcagccgatgatcttagcctctctcctgatggaggaaaataatagctgaatgacaatgagaaagcaaattataataatatcattatgattttacatcattggaaaaaaaaagtgacaaacttacacgtctgcgaattttgtggattcacttctaatatggacagaacgtgaccagccggtgggtatgggagggatgctaggccatgtatcacatgttgttccatcttgaggaacattacatgacatgtttggcgtccaaccagatgttgtgccgcagacaaatggggtttgaagttgtgtttctttgattatattgtagtgttgcatcgaaggtatgagcctccatttcttacaatcggtgcactgaaccataaaatccttagggacgcgctttgttttagaggcatgtgtgagaaattggattggtggcagagactggataggttccacatcttcgtttggaagagtcttgtttctaatatctgatttttctataaggtcatcccattcacgggtgttgagttcatgacttacagattcaaaagttggtagatgacgaaataacttgataagaactacatgtaatacatgttatatggttaactttatatgaaaccacaagtgttaacatgcatgcatcaaattatagtcaaataaagaacagaaatgataactacgtaatcatggatcattcgtcaaaatttagcgtctctatatatgaaaattataagggaacatgaactagaagacaaaaaatcatagttattggagcatcagaaacattatatgcctaggaatttacgggaatcaataaataaattcagaaaatatcaacgtgttgttggcccagtggtaaatctcccgggtggaggtgctggatttgagtcacgttgggagggatctcttctccgaaagagatgtagggcttttggtttgaacttccagatattcaaaaaaaaaaaaaaatcagaaaataacagaaaaaatacaacaagtatcaaatatttcatagtagaaaccccatttatttcattaccagaagaatcaatatacagaaaacgataatcttacttttgaaaggcgatccttaggaggaatagataagagagcaaaagagaacgttgcagatctcacttttgaagaagagaagagatatctagatttgttgtgttgctaagatggtatcaaagggagtttatgtagtagactcacaaaggaaatggagcgggccggttttaattgagttaatttcaaataaggcatttgtcttacaaatgtatttgcttttaggcacttttgactcggcattcgaaaactggtactatcattacgtgaaaagtcatctttctcctcattcactggagtcatcttctccactgaaactgcaattctcttagttcacaaattttctcatctgcatcattattgtttccaatttcggctgttctgttttacattatgtaacatttgtcgtctttagtccatcgtttatcatcggtaatttgtattttcatcttcatataatgtaaaatattataatcttcaacggtttttgacactctcttctctactaagaacgcaactatgggtctcaaaaggttttggaatactttaccagcttgtctaacatttacatactgtaaattgaattgtttgggttcctaaatcccaaactagggtatagtttttactaatgtttagactctgtaccatttccatactgataattgagaagttctagatattatatttgtttcctgctttcataccaaggtcaaaatcgtcagaatcgagtcaataagttgctactgttgaatcctactgtagaaaatacctcttttgaaagaaacttttttaaaatgcccattttagatataagctcgttttaatttaacttccaaaaattattctgttgacttagattgatttttttttaactaacggttttttttaaaataacggtttaagctgttgacaaattttaaaaaaaaggttttaactaggtgaatacccgcatatacaataactacccgcgctttttcaaatggtgttttgtataaatatgagcataagtttaagatatcagatatatatcagggataaatgatttgttttcttatacaataaggtaaatataatagtgatatcaaaaagaaaaattagttttgatactttttaacatattaaattttttaaataataaatggatttattatattacctttttaacataagataaatgatagcaatgtgtttaacttctaaaattaataaataaagttaccaaagatgagaagacatgtattgactctctagttagattcattttttactttaccatatatataaatattaccaataataaattatatattatatagacacatatactcaccataaataaaattttaattatattaactcaaaaagtaaatgaaatgcagaaagatttagtttttaataagtatttttgagactctttaacatatgtaaactttaaataatgtagggggtttatatgtgtgcaatgtgttaaagtttataaataaataatgttatcaaagctaattaagaaaatgtttataaaaaattaagattaattattcctttaattttgtattaaaatgttgcaaacaaataaatgtcatattatatttacataaaaagattattcctcaactatgatactatctgtgcatatacgacaattacctgcggtgattttgaaaatggtgttttggacaaaaattagcaaaactttaaaatttttgatttggatttgatttggaaaatggcttataacacttcatcattgactatgcaaatttaagctcgtaaaaagtcaacattatatattgggaaaatcatgtttttaatcttcaaagtggtagtgggtagcactttaaaccttgacatattttcactagcacaacaatcatattcagccttacaagcggaggtcttgggatttctacacgctctacaaatggtttggattcatggttatcggtacttttggtttgaaggagacaacttggagctaaaaaatctaattaacaagattgaagatcatcatctccttgataccatgctatatgacattcggttttggatggctaagttaccttattcatcgatcggtcatgtcacaactatcacgtttcgcagcgtcaatgcccaatttgtatcaaatctttaatgtaccgcctagatggttactgaattatttgtactatccatttacaatataataaagtcagatgttaaaaaaaaaaaacctccaaactaattttactaacactttaaacctccatcttaagttttctctttatgtagccctaaaagataacagaaaagtttctcctgtaaaaataaaacaagtttttttttcacgaaatagttttactttttgacgtgaaataatatttgtgtgtcccgtcaatcaaaatatttttatttttgatgtaaaaaatgatctacttttacattttgacgttaaaaaaatgatacagttttacattttgacgttaaatagttttttttgtcccgtcattcgaaacagttttacttattgatgttaaaaaaactaaaaaacaagttttactataaaccttgaaacttattttacgaatactgtaaacctcaaaataaattttcagtttggatctccctaaaagataacaaaacaataactcccgtcaacagaaaagtaaaatgtgtttttctcctttttttgacgtcaaaaaataaaagtatgtaatgtcaaaaagtaaaataaaattatttttaaagtcaaaaaagttaaactatttttttcacgttcaaagtaaaaatagtttgatagacgggacacaaatattattaacctcaaaaagtaaaattatttcgttaaacaaaatacgtttaatttttcattgatgggtgttacggttccgttatcttttatggcgaaacaaatagaaaaattagtttggaggttttaagtgttagtaaaattagtttggaggtttatagtgctagtgtaaatatctcaggatttaaaatgctaccagtaccactttgaaggttaaaaatgtgtttttcccattatgtattatatggttgatattcttctctctccttctcccagaatctccaatttaacaagtaaaaacttttaacaataacccataacggaggtttatctgttgacaacaatagattactcccgtgcagaggcaacttaactcacaaggtattatgtatggcgaacatagccttctctcaactcacactagcttaaatttgtcgcatagtcaggttatatgttttgggtgctgaatgatgcgtctctatcaactattgcatgtttcattaagagattccttttaccaacaaagtgtaacaccctgatttatggaatatggtagttgcatgaagagcggttaagaaaattgatttggttatctatgtcaccgaagttcagttactttttcattcaaacatcttttgagaacatcctacgtactaccgggtagaggctatacttttatgtgcataggtgtatatgtgacgagtatcgtaacatagatatcatggtgaacatgaatccgaggtttgacttcataacacatctttcgaaagatgtatgactgttagaggagctacttttctgtaataatatacgaaacattatttctgatgttataatggaagatagggctattttggaacacgactattgttagttttagcttttcccgactcttacttagcttttagtttatgttcttctaaccctcttttttttttttccttcatgtaatcaacatattactttgacattttcaccaaatgttttttgaaaatattttcaagattatagcattgggacgacagttgtggccggacattcattgaggaaaaagaaatagaagttaagctagtatcaagtcatgtgactcaagtttcttttcttatttatgttttcatttgttttatagttgttctcgtacttgttatgttgtggagaatatttggattttacttctctgctttatcctcatgtttgaagactaaccaagctctgtcaaagtattctttcaactgaaggatatttgataatcttcatgtggggcacaaacagtgtttactgaagttgaagagacaaataggtcaaacatagttggcatgatatagattgatttgctgaagttgaagaaacagacttcaaacagagtttgctgaagttgaagagacaaatcaagctatatcatgcaaactctgtttagcttggacgattaggtgaccaaataggtcgaggttaagagacaacgatgttggcaaaaactaaaaagtaaaggaaaggatggtgcttaagcaacaaaaaacaaacaagctccctctcgccgagcaggagaaatgttggagagctcgtataaactcttagctcgtataaaattattaaaaggcccataattttttaaacaaaaacttttattataaaaaaccacagatttagtaatttgtcttttttattctttaacagctctcgagagttgagacaaggatgtgctctttctccttatctctttgttatatgcatgaacttattgtcgcacatgattgatgaagtaccagtaaaccaaattgatataccatgatttttaccatttttagttatgaattaggtattggttttagagttcttttgttatttctagagtcttttttagttcttttaaagtttatacacgtttgagatgcatttggagattatggagcattatagagtaaaaccgagaacttatgatgcaaaagtaatctggagactaaaattagtatatgtgtcgattgacactaaccctggtgtctgtcgacaccaatatctgacggcaattcaatttcgaatctctttgaagttttgaagatttgcagattcgccttagaactcttccctattttcaaaaaagtgtttgcccgtctgtaagaacttatatatagttttcttaaaggttattgtttagacctaagcttgagaggctaatcttcttttctactttgtttttgggagcaaaaccatgtgaaactccctttagagaagatccttcttaactttattctcttcttattttctttatttatttctaatttaaacatgtttgtgcttcttcaatcatgtatgagtaatcaccttgttgggtttagggttttttcattagagatttagatgaattaatatatcgataacctgttaggatttttctttagagttcatcatcttgattgttcttaatactatttctagattgatcaccaagaacttgattataagttgataggtaagatcagataggctgcttattaccggaactatcatagatgggtttaaatatctactagatacatataggtctggtttagatgcttatgtgaacttatcaaacctgtttataatgcatgtttagtatttaaggatttacagacgatagttgggattcctatgtattaagcatagttaatcaatatagacgagagttggttgattataggttagtgatttgacttctagaacggttcgctaataatcctaattaactgctagatctattattcatctattaagcggatgactaaggctgattatgctcctcttatagagaagatatgatccaagataaattcttggacggtctgagcactctccaatgtaagccgtctagatgtcataaactctgtcatagtaagtatctcaaacttttggatatcttcttatcaattacttgctggttatataaaggcgattgagaaattttgtacgggtttcttgtggtcaagacctgagcttaacctaaagagagcaaagatagctaggagtgtgatatgcaaacctaaacaagagatagggcttggaatataatcactccttgaagcttataaggttagttgcttgaagttgattttgagagtagttttagtgcaaccttctttgtgggttacttggatctggaatacctaatcgacaaaagatcattctggtcgataaaggaaaactctaatataagatttttggtgtggaaaaatctactcaaatatagagccatcgcaaaaacaatgtataaggtggatgttcgaaatggcaaatcaacatccttttggtaagatatgggtctccattgggtaggttacttgaagtgacgagtcctagaggagtcattgatctcaattggtgatgtactgcagccacgtcgggctagaaggcacataatgagtgttttgaatgacatcaaaacagagattcaggccatccgtcaccgagaaagagaagcagaaaacagagacacttcattatgggaatccttgggggataaattcaggaaaaatttcaggacaaagcacacttggaacaatattaaaaccacaagcctgaaggtggaatagtacaagggggtatggttcttctactccattcctaagtactcatttctacaatggctcgctcttcacaaccgtttagcaaccgatgatcgaataaagaattggagctcaggaaaacagactgaatgttttctctgtgacaactatgaggagacaagagaccatgtgttctttgcttgttcatactcagccggaatctggaaagaactagctcaacgacttctccatgatgactactccacggactggaaccaattggtagctttgctcaacaaccaaacaccccacgacttcgtctatttttgataaatatgtgttccaaggcaccctttacaacctttggtgtgaaaggaatgcacgaagacacggtgaaatgaattctccacatgttcaacttataaatctcattgacaagaatgttcgcaacctgatcaactcaatcaaaaatctgggaggccgttggtatgatgacggcctaaggttgtggttctccactcgaccaattccgtagacaagcttggcagcaataagtcaaaagttctcctctaggctcactatgtatttcctctcaacataacttcaaaaaactgaagcattcattctacaaaagactttttgattgaataaaatttaacattctttcaaaaaaaagatatattgtttttctttataataacaggtcaaaaaacaaattgcctacgttaagagcaaaagaagtttgattaaagggaaataatcgttaaatttggaagaattagggatttttctatttgagtagaaatgaaaaacgggggtttgtttttaccaatggcggcaaacgtttaattatttcatcaaattaatttctagaaaagtaaaataaacaaaaattaatgttaggaaattaaaaaaaaaaaacctagatgttaaaaaagttctagttaaagtagattcttcaaaggttttagacaacttgacaaaagttccaaaacgccaatacaatctatataagcttgccaaatggaatgcaaacacttaaaaggataaacaaacattaaaggagaggaatcaaagcaaccattgtgggcatttgtagtgaggtagaaactaatgaactctataaatttgtaagacatacacatatataattcataggtattttgcaattctgtttaagtttcatgaaaatcgattttattgaaaacgaaatcttctatttgtttttgtggctttttattgttttttattttgtgttgaatgaagctaaatgtcacaaaaatactgtagttttccaaaactatcttactcttagtcatagtattctcaaagttcattgtaattcgagaatgatgatctaggctatcattttctaaaatttaatgattctacctataattttatttttcatgatcatttccttctcacaacaagattcagatgcatgttgtggaaatgagctaatttggaatatcataaaaaatttacagcaatatgaaggagacgaaggatctcctcgtggtagatgtggaggtttatatatatggaacgcacaagatgatgctatttacctttcaacaaaaggtatagttgagaagctcatgtatacttggattaaagattaatgtttattcaattaaaatcttatttcgtcttatgagctacctatgttgcctctcttttaactagtgttggtatcgactatagagatcaaaataaaataaattattatatttttcttctgttttcatttatagatcatatttatattaaactaagaatatacatatttgtacatataaaaatatctcacatgtgtgttttcctttcgaacttcgtcatcttatatttcaacatccattaaatcatctaaaaagttcacaataatttattgtaaagcgaaataagagacaaaatattagtggaacgagctacacaacatgagatcatgagttaaagaaatgcaattctaaagcctacctttagctttaatgggaaacaagaaaacttgtgtgttgatcttatttataagaaagaatcaagtagtcactacttagcttatttagattcgtgaactaatccatggttagcactattgtcagtgaaaaatgaaaacctaagtatggttcttgatatctatttgaactgcaatatgttgacttaataaagaatatgaataacaacaatcgattttgaataaaatttaacacaccagtaatagtggattaataataatgacatgattcataaaccaataacagtaaaaaaattaaaaaatctaaaattttatagactagtatccgcttcttaacttatttttgcattttgcacaaagcaaaatgtgactaaaggggtcaatatcataatatataaaagggtcctcccatttttacatatttttttatttacaatgaaatttgagaatactacaacttggaaaatatttgttatgaaagacaatgcttattgatagcactacatagtttataactaaatatttttgataagtttgaaatatatatgtatacaataagattttcatagtcatagatttacataattgtttgtatcttcttcaatccaatattggtttaggtatcaagagaaccaaaaatatcaaagtgtattaaatggttttaatggactctgtttggctagttttaattattatttattgtcctagaaaaaatcttttttttgttatgaaagtcaacaatatcaaacgtcaacaataaaagtattacgagtaaaatataatttgtgtggagtctaccgtcacttgtagttatactttcttacgtctatagaaacgaacaaattcgttcatttgtaaaatacaatttcattacttcaaatataagagaagtataagctcatatatctctctgtctctctcatctctttactattcagtacccgatctttctacggctataaatttttctcttttatttatatttatatataccataaaataaaatattgattataacacgtaatcagaaccaatcactctatgttttctgaaaaatatatggtattatcctgaacggtatgtcacctcgttaaaagaaaaaacaaatatgaggaaaaagaggaaaataaaagaaaagaatagaataagatattaataaattttaattttttttatatattaatattttcttgtgatttttcatatactattatttgctcgttgctatagcgagaggaatgtcgcccttataactaattggagtaatgaatgttttttacctcatagcagtggacagcttagccccatataatgtggatgacttcgtcaacacaattgttttattgttataacgtggatgactctgtcaccacagtattgtcgtaaaaattaatttatattttgtttaatatataaggaggctcggccaactgtataaaaaactattctctgaaattagtttatttaattgattgataattaaaatatacagattgattttctatttaaatattttcgctaatggtcatgaaattttttttatcacttttcataaggctgtgaacagtaattttaatctataaatacactcattttcactcattcattcacccaaaattcatatctctcctcatatattttctttattttttttaagttttcatggattcgcttatttttaattatttgcttaatcgcaattgttacttgtatttatggtatcttcgttgggaaatttactcgcgaaaaatttacattagtgtcggtttacttttctatgcaattatgttcttcgtaatcgcttgcattattaatataaaatgttcatatgaaataaacaatatcattatactaataatatttatttaattattgtgtttagataacaaatgacaaacattgagaagcttaaatttccggctctcaaaattactggctcaaagtacatagcatgtaccactaatgtcaaactctattttgagtctcaagatttatcttaaaccttaaatcagaaaatttatcgcctccaaaagataaagaaaaagcgataatattcttaagaatacatctcgatgaaaatgttaagcatgactatgctcacagaaaacacccaacaaagttgttgcgtgctttaaaagcacggtttgacaaccagggagagttaccagagagaaataactctccctcatgcattagaggagtggaaaaaaattgagattccaagactttgagagagtggaggaatgtaatttcgctatgctgaggatagtatcacaattgaagtggagactatttgagggtacatcgtacctcgatgtttccaactttgtaaacgatttcgacgaggccgctcatgcgaataactaaaatgcttgtagtggactataaccttcaataatctatatatacatttttgcaaccattttgtgaaataaatcctagagttggaacttatttacaagaaatgccattagcattaattattatcaataaattaatattcataattattagcatttccttatctaatatattttcataaattctaattacttcaaaaaaagagaaattttaggacattattaatattatattttttttaaagataaaaattatagttatttataatttattaaacatttagaatatttaacagaaaaacgtttagaatatttataatatgaaaaatcttaaaaattaaataattatttgaaagaactttaaattgatttgaattataaatcttttaataagtttattattaaaaaaacataatgtttaatttcatcgaacgagataagatggaaggacgggtttataatattatatcatatgaactttataaaaattaaataaccatttgaaagaaaacttttaaattgatttgaattgtatatttttaaattaaggtactattaaaacaaaaataacaaaataatgtttaatttcactgaacgaggttagatggtaggacgagtttgggtctatagtaatacgagacgatataccacgggtgaaatccattagacatgtttaatttcatgaatgggattaaatggtatgacgggtttgggtcgatagtaatataagacggtatactacgggtaaaatcttagatataacaattaagatacaattacattatcttaaacacaaaacaaaacaaacaatattaataaaaaatataatttaaatttaaattatatagttataatctacgttttgacttaatgaactgtatgttattgtttccacacttttaaacagtaaaaatcaaatatagtagttgtacacttaaaatttatagatataaaagttataaatttagaaaatacaaaaaattaaatcatatatatttttaatgtactaaacaagttaaacttttatttttttttttataaatatgggttataatctagtgcaattatataagtattacatatttcaattgttttaaaataatgttgtttctgaaaaatgaaatgttataattattggttttgaaaactgaactaatgtataattattatatgtttgcaatatcagtattaaattgcttatattgattaaagtttatgttgattacagaaatggatcattcaaacaaaatgatagcaaagaaaaatatcatagaaatttgcatattagataatggaacaacacactattttgagagaagatatttttctctaagttaaaaccgataaaaattattatcaatacaatgtctaatcctacagacttgattgaaggaagtggcaaagaaaattttaaattgcctaatggatcggaacaaagttttccataaagaatgctttatattctctgaattcaaagagaaatttgttgagcctcaagacatataccttcaaggatatgttactcagtgtgcaaatgagaatggaaagaagtgtatgtctttaactactaattaatctggaaacaaacatgtctaggaaatattttcagaacttcattggtgtttgcatcatacttataaagttatatagatgccataaaatcgtatcttctgatcaaaagaaatctagaagatttcgtattatggcatgatcgccttgggcatccagacactaaaatgatgcagaaaatcatagaaagctcactaattaaaaaatcatgagataaatcatggaaagaaaatgacatatgcaacatgttctcttagaatattgatcataaggccatcgacaaccacaatcaatagaaaatcaccaaagttccttgaacgaattcaaggagatattttgtggaccgatacatcaaccatgtggaccattccactattgtacggtaatgattaacacatctagcagatgatcacatgtttgtctattgtcatctcaaaatttggcttttgcgagatttatgactcataatatcaaataaacagctcaattctcagattattttattagcagagttagattacacaatgcttgtgaattcacatcccaagcattcaatgattattgtatggtaacgggaattgaagttgaacatcatgtagctcatgttcatacacaaaaatggtttgtcagaatcataaattaaacgtttgcaattgattgcaagaccattgatcataagatcaaaacttccaacctctatatgcggacatgctattttacatgcaaacgcactcattcggataagaccaagtgcatatcataaatactccccttatagttagaagactcactacttgtgccacaaatcggaagaaaataattactcatgccattgttatgtttgctatttttttttttttttaaatcgagtaaaagacaaaataaaccaaggaagaagaagagggaaccaatgctaatgttgtaaatttttgaatggtgcttcggaaacaagtagttcaactaggacgaaaatatggtattgataatattccggattgaatatgcaggatacatataaggatgatgatgattttcaaccactaccgccacaaagtctatagttttctccaactcagtacaccaaggtgtgtaagataggaaccatgtgtcaattggtccaaatagtggaagtgatagagaaaatggatgcataatcgaggtgatttaggaatatgatcagtttaagcatatattccacatgcctaaggaaccaaatcacatgattcaaggcaccgctaaacgaagatgatgagagagtgttggtttgtgatgaatggagtgcatataagatattctttgaaaaagcatgagtttttgaccgggtaggactgccatgagtacccaaaaaattataagaagttggacattttgaagtttgttgaaaagatgtttaagaggactgggatatcaaaataaaagacgtggaagtgaattgatggaagagttcaaaagtgagacgtctgtggctaggataaagttgacaatcttgttatttttatccaaggttgtgagagtagattcgaaaggtgatgcaaagatagaggacttactattaaggattgttgataatgtgaaatcttgtgagacattcccgtgaggacgattttcatttgagcagtgtatgaaaggggtccggatagtgatgaagaacatgaaaggggtggtgaaaccaaaagcacagactaccttttatggattcatttctccacttgacgttatgagactagtaaattataaaaattaacaattttgaagtgttgttgtgcatttaagtgtgcgtgattgtgaatgtgtagattctagcatttaagtgcattcccccagcttagaaaaagattcatagaagttgtacccgcagaaaaggattatccaagaatgtgcaagcacaagttcactgaactggagagagcggcttatcaagcacaagcacaagcactgaaagttgcatgaaaggatttactttggaagaaataaatgaagcgcttggagatataaaggttagcttgatcccttgaaaactatcaatttgaaactgtgtggtgtttgattatatgttaacttgacaagatatttcaaacatcttagaacctgatgtggatgagagaaatatgttgtctcgcctaccgagagttatgttgatgatgagatttgatatatcgatccaattgttgatagctggagagagcgacttatcatagagaagaagaagatctgttggaatagactttacaaatcaaacattgatgttcgacgtattattgatgttaatgatgtccatgaagtccttgttgcattaattctcttgttacaggaaactatggagaaaagatttggcaagattacagaaaagtttgttgtgatggatagcgaaatacaacggctgggtgtgagagtgcaaggtatagaaacctatgtggcaaatcagctagagaaagagctagataagaccgttatgaagatctgcatcctggttcacattctgattttgtgccacagtcttatcagtcaagagatactcagagcaatgctttggttattcacagtggaatatgtgacccaaaatctccaactctccagtctttaggtgagtactcttgtccagttttttttttttttttaattattttaagatcttcttatatgtttggtggtttcacatattttttaggtgatgacattgatgaagatgggtgatgcggagcaggagggtaagaagaagaagaagcggaaattgaagaagatgacaaagcatagtggcacaacaacggaaaccaagaaaaagcaaccaagaaaaccttctaggtttaagggggaagagtttatagcggaggagaagaaaacgaagaagagataaaagaaataggattttccactttctttggactgaggcttatacatgtgtggactcataacgatggtggtcttttgtgtatttgagattaggtgtttgcttttgatgttgaacattgtaggtgtttacttttgatgttgaacttcttgtgtgaaatggtttacaattcagaattacaatgttatggtttaagagtgtatcaataaagttttagttgttattgttggctggaaattatacaaattgtacaattgtctcgaggcaattgtaccttgttgttgcacaaattgtaacacaaaaacttacgttcattgggcatttgtacactttttggccttgattgtaaccagtttggcacacctcaagtgttacaagcttaccaaagtaacatttcacgggatctcccaattcgcatcagcattcgctccttcactctcccaactagcttcggttgtggaaggttgtgagtaactatagggcatctccggtaagaaagataaatatatgttaaaaattttactatctcatcaaacttagatttacattgaaataaaaaatcctaaaatttagacataaaggtcgaaaaccttagatttgtatatccactaatttaaagctcgaaaaccatacctttacactataggtagatgatggttggaaaccctaattttccttgaaatcgtcgggcttgaagaaagaggaaagtgaaagtgaaagagaagagagagaaaaaaaagagaataagagcacttcaactggagggaccttgagaattttttagagaaatcctaatgaaaacaagaaaaatattaaattagaattgtgtgattaaagaaggtgcaaaccttggcttaaatgttttgtagtgtgtaaggtgtgttgacgtggccacacattattggttggctttttagacaaaacaaaaaaaaatcttttcctgtgtttctttatttcacttcgcagatcatcttcttgttttctccgaagaatggcgacaacgaactgcctctcgatatgcttcatgcggtgtgttcagcatcaatttggaagataaaaccgaagaatcatcgtaccccttctgtcgagatcgccatctgaactggcggtggtcaacgactctgaatttgatgaacctaatcggcgactttgatgaaccaaatcggagaaattaaatttttaatgaaaccatggttcaacccatggtctgattctctctgtttgattgtgtagataggcggttaatttgggtttctccatttaagattagttggattgatttgtgtctgttttaattaaggttcaacatttaatattagttcgattgatttgtctctgtttcactatcagagaaatttagatcagttggaagcgttatcgaaagaagctcaaggctaaaaccctaaggaacaaagctctttctcagtctattgttgccagtaggttaatcccatttttaccatctcaatcacttgttattgtgttttgtatgcgaacaagaatttgatatgtcttgaattcatttatttttattggtgtttggttaatgattgttgtgtatgtttgtgtttccagttccaattgggttctatggtttgcaacattacctcattgttgggatcattgattttggttctactggttattgttcctacaatgggaggttcacatataagtgtgattcttttggactctctactttgatcgatgaggattacatttagtttcatcatttttgattatctgtttttggattataggaggacattggaaattatcaatggaaataatgtaagtttgaaagaagaacctctttcgctatctatgagtaagtaaaaactcttttctactcttggtatttgtgattatcctgtgtttgtgtatagcaaatggaatcaccttcttctttttttctatgctttgttaatttgttaaggtttgtttttgaattaagatagcattacatcattgtgataaatggttgaattgtgatagcattacattaggtaatagttatgttatgttttcattgaatgctagttaggtttagtttaagtaaatgctctatgtgattgattgctctctgtgattaaatcaacgctttagaataatatatgtttctagtacctcttaaaaggtatatgcctaaagaatacattattggtatcagtttgcagatatagtggaataacagctgtgatgatggagggagttacaacaacacttaaagatattcaggtaaatctatatcttttttaaacgcttattagataatgaataggatgtttgaattgcagactcgtaatggtcttgtataattacagtataagctctttaaccattgattgtataaggtgagtttcttgattgcataaggattgtaattgattgctagtacgttttagttatttaactctgccaattggataagaaaaaagttttacatcattgaatgctagctgagaataaaacttattgctccacggttttgtagaattgtatatttgtttctctgacttggtataatgaattgtggtatcattacatcattgaatgataactgtttttgatgtaatgatatttgtttatcaaaattgataaaatgaatgcatgttaactagtatattttgaagtggtttagattaggtcaaagtcttatcaaagttatggtctatgtgattgattgctctctgtgattaatacaaagctttaacttaacacttaactcaaacttgaagcttttaaaaccgcatctatttatattttaaaacacataacttcaagctgaaaaatctttgtcttctctttttaaaaaccaacccaaacaaggttatggatttctttaaccctttcgctaatcaaccttcaagatttttaaatcttttaactagtcaacaagagaatcaaacattttcacctagcatagaacttggatcatcagatgtcccagtgtttagtacatattggtctgatgatcaagacgaagttgaagcgccaattgtagagaagaaatcaagacgcaaaggtctccaacagaagatttggtccttataagtggctggttgtggtttccaacgagcaataagccagaaccttctggcaacgcatagcagattattttgctgcaagtcagaagctcaaaagtctggaaaagaggagcacattatgctgtaaacagagatgtgcgaaaataaatgagggtgtgaacaactatgtgggaagtttttgtgttgcaaccaaacaacaagcaagtggccaaaatgataatgatttggtgaacttggctcattagattttctacgaggactatggctccaagttcacccttgaacatgcttggagggcggttcactatgagcataagtggttaagagtttcttacgactggaacaacaaatagaagaaaagtgcatctcttccagttggcattgaagagaaccaaagccaaaccgaaattcgtccccctagagttaaggcagctaaagccaaaggcaaaacaaaatcccaagccaagccaagtagtgtgtctggtgacaatgtgaaagagtaacaacttatttgggatattaaggagaaatatttagctatgagagagaagctaattaacaaagaagagaagattggtctcactaaattgtttgatagtctctttgccaaaactgagcctctaactgacatagagataactcttaagaacaagctaatctctgatatgttgaattaagtttgtaatgtgttcattttatgtgtttgtaatgtattcagtttcatgctcttgtgtttgttatatgctgttgcgtttgtaatgtttcatgctcttgtgtttgtaatgttgaattttagtttcattttaactactattaatgaatgttggcttatattgtttgtgtttgcggatacatgagtttgcaaagtccatgtcttttatttaattagttgagtctattcaattttgtagtggtggacaaagacacttcttaccgtcatcagttgacttgttttgtgttttgttcttttgtactcacaccacttgttatgtgttttgttcttttatgtttgagaccacacaataatattcggaccacaatttgtattaaaagctttccaagatctttggatatggcacgcatttttaggacctccaggtacattaacgatatcaatattctcgttcgctcacctgtttttgatgatatattacaaggtcgtgctctgagaatgagatacgtagtcaacgagaatgagtattatttggcttagtatctcactgatgaaatttatcctaaatgggctatatttatccaatctatttcccttccacaagatgaaaaaacttatttgtttactacaaaacaagaagcttgccgtaaagatgttgaacgtgcttttggagttttgcaagctcgatttgcttttgtcaaatatcctgctcttatttgggataaagtaaaaatcgaaaatattatgcgagcatgtataatccttcacaatatgatagtaaaagacgaacgagatgagtacactcaatataatgtatctgatttcgcacatctggaatcaggtagttcttcacaagtggatttcacctattttacagatatgccttcaaatctcggaaatataatggccactaaacccgacttcatgatcggactaagcataaacacttgaaagctgatttggttgaacatatttggcaaaaatttggtctaaatcaagcttaactcttctcgtcattcaaatttttcatttctatatgtttgttttgtgtttatattatgtatgtttacaatttaaatatttcatataattattatgttctgtgaaataaaaatatgaaaatattatatatttttttaagaaacccgcttaagaactccaccattggacaacaaaaatataaggattcaacaaaaactctaaactttaaattcttcataatagagtattataaaatagtaaggagtccttaactttgactcctgaatagggatgttctaaatagaaaagaaaaaataattaatttaacagatggtggtgtgaacaaaataatggtggtgtgaacacaactttgtggaatccgtaaaagaatttaaaaaattattaaatattaaaaatgtgaatagttttatgtatatgtacagttgtccggagtctcaaacagttgaattattataaatatttgtgattttggagttgaaccttaaaatcatacataattttctagttggtcacataattttcacattgtattggtgattcataagttttgatggaaaaatatttagaaaatcatagttttcacacttaatgtatcaccataggatgatcattagctaaatgttccttgttatacataggtgatttgtaagaaaaccaatttatgttaaagtttactaataataacgttataatatcatattttatcaatagttagtgttttaatgttggtaatatttgtaaatagtgaaatttacttactgtaaatttttgataaaatataaatacatttatcaattgttttagttgaacttgaaaataataaaatcaaaataaagagaaggataatcagtttgagaataattcaataaagttgaaaataataaatcgaacttgtagataataaaatacaaatacagagaaggatgataatcagttatcagttgaatcagttaaactttggaataatacattgaaagataatcagaaacaattggcgtggttgtcccggtttaacctatatgcaaaacacttgtaacttactcaacgtttctcaaactacattcaagcctccaagtttattccaggaacaactttgctcatcttgagctttttccaacggagggaaaccgcttattttgattctgtcctggtccttttggtatgtattttggaggaaagacaactaactcttcaattggggaaaaaattattcatttcgactcatgtggcactacatacaacatgtaataggccaatgcccaactctctatcaacataatatataaagcagagtccatagattcagatattagcatttctaccttctttgcgagcgaggtgccttgttgcggctatggcatggacacacggcatcttgtctatatcaaaatgtttgcaagaacaagttttcattttcaaatccaccaaaaagcttaccgagttgagatcaatcacgttgtattcttggttgtaactgttaagctcaatccctgttaatttggctgcaactggaaatcgaatatgcaatatgttctccacattatacacccacttctgatgtgcttgaggaagaacctgaatctttcctatgtttgttgaaccataaagagaacttatgaaacatcgcatcaatcagtggtaacaggagatacttcctctcttttctaaatacactgttgatggactatatagcattgctagtgtctatgttataattgtctcttttaaaatggcacctcgtctatttctcaaaccctacatcaactagaaaggtagcgggtttatgccatcgactagtaaaataaccaaactctttgttgaattcagtctcacgcaattcctgaatttatcaacatctctctccttgtcaatcttcacatgaagtctcatgttttgagtcaaatgccatatacaacttgcatgaagcgccttcaggtacacagtcctaacggtcttctttatgctttgatgcctgtcacttatagacattaatccaagaacatcataatttacagattttttagcttttttaaaaaccaaatccaactaacattcttcttgttatcaattactccaaatgcacgaggataatggtgatgcttaggattttgagttgttgcaataaccaacatcccaccatatacagttttaagatgagttgcatccacaactatcactttccacattaccctaaaaccttcgatgatagtgcctaaagtgatgaaaagatatttgaagttctactcttccaactcaacatttgttatcgtccctcgatttaccttctttaacaagtacagataaaaacacatcgtgtagcttctttctggagtggctcgcacatcactaacatgtagcattttccctcttaaggcagtggagtatcaacaatgcacaccaagtcttcctcttacaatcgacatgatttttttttgagttggggtctctaaaatacctggatagtcaccatacaaaacaaatgctattaatcgtggtatgcctcactatatactattgcttgtcctctcaactgtccgaaagcatgtatgcatctttctattcactctaacactccaaaaatgtgatttcttagttctcgcaactcttagataccaagtacacccttttgaggcttggtgacattctagcataagtctaaatgggtctcacttaatagtaaagatttcaagaacttcttgttttgaagttcatgtgaagaacttaaacctgtcaaaatataacttatatatcttgatattgaaatgtgagtacttgcaagtaaaagaaattaaataagtaagaaacaaataaacctgtcaaaatataacttatatatcttaaaagacatacctgcagagattaacccatgacttatcgagcattttatctaggcctgggcattcgggtatgccagtcgggttcgagtaataccaggtcgggtacgagtatgtcgggtatacgattctaggacccaatagggtaaatagaaaacctcagttcgggtctcttcgggttcggatcggttcgggtataagttttgagaaccgctaagaactcgaaattaaacagttcttgctggtttcggttcgggttcaataattatacccgaatacaccattaaaccaaaattttaccctgtttacactacactatacccgaatataacaacttagcatttcaaaaaacaacataacatgaagcaaaacaatagccaaacatccaaatccaatgaaccaatgatccaaatctaaaagtcaaagacataaaatgcatacaacatttccaaaatttcaagtcacaagaataagatacaagtccaacaaataaaacaactagatagcataatccctcactccctctccgtgagaccatgaccccatgactcacctatacaagtaaacaaatgtcacaactcacaaagaataatgcaattaactacatatctcactgaatcactaatgactaacctttgtatcgcattcactgttgaaatcgaaacctgtttcacctagttcatgctctacacaaaaccaaaaaacatgaattagaatcataaatcataatatgacaacatgatgttataactaaaaagagagaagagaatcataacttacttctcataagatgatcttccaaagtgatcttcgaaagtagttgttttattgtggagacgcctctttcattgagatggatatcatattttagccattgctcaagacacattaaaacttcaattatgtaatgtgagagacagattctttgaggattcacaactctaccacttgtgctaaatgcggattctgatgctacggatgacattttcattgcaaatatatctttagcaatgagtgagagaactggatacttcccactattgatcctccaaaaaatctagcaaatcatattctgtaccttttagaatgactgctttctccacatgatctttcaaatacacattcacctcattagttgtattatgcaatcttgtgtccttcacaatctcatcatatacaaattccatatactcatataaaaaccatttcgcataactggtctctctgaatcttcattcacaacttgatcttggctccattctgattgagtagatgacctagcagtaccactactacttttgttcaataaattgtttcttgtatactcatcaaacaaatcagacaagatgttataaactgaatcttggagatgagtagcctccacactacctttaccatatagccatcctttcaaaacataactcaacaaaattcattttctttctcgagtcaaacacacttgccactatcacaaacttattcaattccactttttccccaaatgcattctaatacttacccaactttgctaacatagcttcggctttatcctttaaagcatcatcatatttcaatgcacctaagtttctagtaatggagactatctcattgtagagtttatgagatgcaacatagtttgaagctgaaataaccaatgtacacttatagaaaatctcaagaatctgaaccaacctctcaatattctcccaatcttttgtcatagttggtccaatccttttatttccatcctatttctctgcaaagtaatcattatacagtttatcttcagcctccatcttctcaaatgccaatctgaaatttaaagtttgctctagcttgaataagtcgaatttcatctggtcttgacatctaaaggtagacttcccctttgcaacttccctgtttcaactctaaaatcaaatgattgaagttttggtgtcgaagatctcacatactggattccattgcgaatagcctccacactgctattaatctctgttaatccttcctttacaaccagattcaaaatgtgagcagcacacctcatatgcaagtactcacatttcatatgcaagtactcacatttcaatatcaatagcagcacacctcttgtagttgttctccgggaatgaggcttatacatttgaactttggagcaaaaatgtctccaagcaaagcagtctacaaaagatagtggtagctcagctaaaactaccatctcattagttgcttctttccaaacagatttactgaccttacttatagtcatacacccactaggaccaccatgagttaaaacggtttgagtattctgaacattagcagctttccatacctgatatgccttacaaatatttagaagatgcttctttaaagtggaggttccggacttggttgaacacgccaactctttcccacagtaattgcaattgcaatggtttacatcatttgaaagtttggtgaaatgatcccaaacccaagacctaaccttcttgcttgacttagaaccacttccccctgcccctccattatctttcttcttggttgattttccaaaaatagatgtttcaatctcttcttctgacatttcatcattctcatgaattgattcatcacaagacgccatctgcaacaagattcaattcaaccacagattaaatttaaacactaataagttcaaacataaacgaatgagtaaaaaattgatcactagtcatacaaacgaatgcataagaataaacttcaaacactaagaagtaagaaactaagaaccataaacgaatgcataagtttgaacttgactaactccatcgacattacatatccaaactagacacaagtgacaagacgcaacagaaaaattgatttctatctaaacatgtaaaagaaaaatgggtttctagctaaacccagaaacaatcatattctaaattctaaacatctatttcgtcatacacgattacaatcttaacatgtaatcgaaaaattaaaaagtacctctgattggtttctggaaaacgctgacgggagagacggtgtcgagagctccactagggtttccaggattgattcacaaatcaaaattatgattgataaaggaaagagtagagaataaagatctagaaacgggaaatgagaagtaggggttagggaagaagctaaatcaacaaaagtaaaaaacctaaatcgacataagggttaactggttaagggtggttaatgagttaatgtgtttggttcgggtgttcggtttaccctttcggatatcaggtaatacccgaacccgaaccgatacccacgggtacacttacataggacccatcagtgtaaaatccttatactcgtacccgccctgaatcgtttttttttgttcggttccggttcgggtatgcgagtacggtttttatgtcgaggcctaattttatctgttatccttattttgaaccgttgagacagtatcccaaaacaagcatgaatcagacagcaacacaaaacatgtataagaaagaaaacaagtcagacagcaacacacaagatgtatgatacaaaaaacaatcacattcgcaataaagtttttgtgtaagaaatcaaaggcataagaaatctatcgacttggacaaacctttgaaagaaagcgttgaattatataagttcttagcaagatctgaaatacatagaactgaaattagtaaagatccctaattcgtacactaactcgaaagaaccctaatatcaaaggaaatgaaattgaaaattgggagaaccctaattgagaagaaaattaattgaattaaaggataacaacggctatagattcatacatatattgtgacagagctgaagattgtgagatgccgatgcgacgaggatggaaatgaagtcgacaaagccgatgaatatatgaaatcaggtactcgtcggcgagagctcgaagaacgactgatgggggaaaaatacaaattccttccaacttttgagtttctgcaaatatcacttttttgtctaagtgttgggaaatattattttgttatggcgcttaattaatttttggtctaagtgttaacggaaaactgtctttttagcttcccgcaaagatatatttcggtttaacgttttaaaactactattatatagtctcatttccagataaaatactgttaaagcatttacaataattttgctatgcttttgtgctatcaatgcccatatttcttgtagtgattgtaccaattataccacttgtaatcttatcatacgtatacatgaaacctatctgtcctccacctcgattctaaatcgattcaaccttccattcaattgattaccaatgaaaatacatacctatttagcataacagtcggttaatctaaactttgcaaacccaaatcccaaactttcatatgaaatcatggaattcaactcgaattcaacctatacattagattaaggatcactgaaaatacctattcggcaacctaaaatcgatttatcttaactttacaacccgaacatcaaacattcatatgaaatatgagaatcttatataatttcaaaaacctaaactaacatcacaatgcagcaacgacagaggatagaggagaagaaactgacctaattcgaccgcctgttgcgatggatatccaggtcggcgggttgatggtggatgtttggaatcgatggtgatggaggaaggaaaaagcagaagaggaagaagaacgatggcgaagctttttttttaacactggtttctttttttttcttttaattttcttttaatttctatttcgaaattcttttttatttatctaaatcagttcattaaggataaaaaaggaataccacattgttggtggcatgtagattatatgatgaaatgctagttagcatttggttgagaaccaaatatatatatatcctatttaaaaatattgggtgtgtagtgtatgtgcgtatagcaccactacaacgtacaaagatgagaccacaaagaaggttggagatatatattggttgtgattctctatcaattacaagataccttgaactgcagaccggtgatgtctttacggtactgtttaccgcttgtcattttgatgagaacatattttcttttcctagaaaagaaaataagcaagtaggaaaagaaatctaatagtgtgtatcatccttgttacaccttgatcctcttataaaacaatcagaaatagaagttcaacgaattatgcatttgcaaagtatttcagatcaacttcctgatgctttttgcagataccaaaaggtagcaacatcatatataccagctgcaaatgtttctgctcgaattgaaataccacaagaatgtggaatatagatactacaattgagtccataacacgcttgaaacgtggtacaccatttggttctaaggataaaatcctagaaaatgaaaggaagttggaaagcatgatattcctagaatagtagaaagcattttggaagaagcaaatcaagagtctaatgacaatgatgagcaccatgagactgaaggaaattatgagatttttatcaactttatccataatggaaagatctaggatcaaaataaaatggatgatgttgatgatgttttctcataccttttgtcaaaggaaattgatgaggaaaatgaggatcgagaaccaaagtatgtatattaatgtcaaaagagacatgactagataaaatggaaagatgtaatataagctgaacctgattcactcaataaaagaaatgtatttggacctattgtactcacacctaaagatgtgagactggttggatattttaaatttttgtaaatccatttgtaatttccatttaatgcgttaattaacaatttttaatttaaaaaatatttattattattatttttataaatcttataattttatacattaaatttcattacacaatcacatattttacatttttatttttaaaattatataaaaatgtttatttattcatattttatatttatttttgttaaatattcgtagcccgcggaccgccaacaaatccgtggatataaatttgtctctagtatttatctgtttatataccatagaagaaagtatttatagaacatttttttattttttcttcttagcaactaatgcattgttaaatttaagttaataaaatttatttctctaatggaaaccacttgatggaatgaccacgttgtttttctgacgttcttggcaagtgaatttaaaaatatctactagatttggttaacagttatcaatattcttcgacaaaacttccttcaaaaactaaatatgacgatatttgctttattccaaagaaaaaatggcaagttaaatgacaaaatttcagctaaagatctatgtgatgtgggttataaaagcatattaaaaataaaaaaaatgtgtggatttgtgtcaggttggataatttatgataatatttgtgtaaaaaaattactagattagctctaattttagtcgaaacacttttactaagttcggttaggaaaaagataattacgaaaaatatcatttaaattttcagtgtgtaaaagacttataaaaatgctacaataaaatctgatttcttaaatatatgagacatgtttataaaaaatgtgttgactgattaatttggacatcaaactttttagactatgtctttatggaacaaactcaatataaaaataacaatgttaaggatatcaaaagaacattttcatttacatacaaatcgttttcgtccaaaaaaagaaatacatacaaattgtaatggagcccattgttaaggatgtcaaaagaacattgttcgaataacttcttttgttttagtaacaaattcatagaaaatctttatgatgccaaccacttaactttagatcttcaaggtttgaactcatcaaagtgacaattttgttactttaaatcttcgacaattgttttactttcaatcttcaaagattgtattcatagccccacaaaaatctaacagataaattgaatttgttaaaagatatatccgtttttgttacaaattctaacgtagctttaataattatttttattttagtaaaaaatagttaaatttaagtttctatgtatcatcaataatatattttaagattagataagaaaaacaattttgttctaggaaaatgaaagcttgcttacatttcatgccctatatcataaaataaggtttttggcgtgaaatgttttaaggattgaatacacgaataagataaaataggaacaagaaaataagaagaagtcactcatggcaatgattcaattttttattttcctttattttctgtaattttaaaatatattattaataataaacaacaaaatcattttttactaaaataaaattaattattaaactatgtcattatttatttcgaaaaatatgtttcttgatggaatcaatttttctattagtttatgtggatccgctaacgcaaaagtcgttttgaaggtttaaaataacaaaattgtcaccttgatggtttattgtaagagtgcaaaattttaaaggtttaaagtgtaagcggttaccccttgaaagtttttattaatgaaatgtgacacttacacctcaacgattctactcccaacattggattagactaatcatgatacttatacaaatgctgaaacagaggcccaactcggatggatcatatatgatgagagaggcacatacaaaggagcatgacaagcaaacgactacatggttaaaaaaatgccttcgaaattgaatgtcattgtttacttcatgctatgaaacactattgagaaaaaggttatcaacacataatatttttaaggagattgctactgactaaacgaatttgattagtaagttgatttttgaggaattggttagttgatttttgaggaatttaaagatttcaaaagtttagagattttaaaagttttaaaaaatcttatggattcttctcaatgagttgtctaaactctagcaatgattttcatggatttttgtttacttttcctaaacgaagttttacaagacaatattttttccctcttatcatttcatttacttgttttattttactcttttttgtttattaacctaaactaaattatatatttcatatgatataaatccttggcatattttttgtattattatcaattatcactatcgttaatgtaaaatttatgaacttagaatttctactgttatttatgttaacagatgaaagattgatttttttgggttttttgagttttatttttaagagattttgaaagttgtgtcgaagagaattcatgtcccaataacatgagaatttaatagaattgtaaaatcagtgataactaaactttttgaataacaagaaattgtggatggagtttaaaagtcatcaaagcaataacactagaatatactaagaatataataatccattaacgaataaatgtggaatctgaaaaaattttaaattaaaaattcatcaaccaataacaccttcttagcagcaaaactcaaaagttaggcgatcgaatttgattttgtctcaacttagcctgtgaattcaaattatttttctatgattttgtcccttaaattataactgatctacttcatatagactattataactaaaatcatttctagtcaataatagaagatgctacgaacaaaagcacttaattttgaaaccttaaataaaatacatagtataacgatttttatatacttatctattagatcacaaaaactaaattcaatgttaaaaataaagtacataaatttatttgagatatggaagaggtaagaaaatattatttgataaatatatcacaacaattattttgttaaatattacataaataaaatgacacacgaatattatcgaaaatagtcaaatatccaaaatagataatagagatagatcttttcaacttcatttccttgcatgatggtcaaaattgatattttgttacatgtatcaagacttccagtttacaaaggtgaatttgaactaaaataaatatgaaaatcaaagaagaaataagtataatctagtaacacaatataaataaagggttttgtgcaaaaaaaactgaaattgtatattgttgcagctttacccttcacgttaaaaaaatgcaaataatcctataaattttaaaaataatgcgaaatatagccatttttttgcaaatttacatatattgtaaatattttcatgatcacatacatttgtttttgaattagactcttccaatatagcaatctattgaagaaataagtattatttatcaaaaaattgaatttttgacaatagcaaaaaagttaatttgcgtattattttgaaattcataagtattttgcatttttttatgtgaaagataaaattgcaaaaatagacgaatttgaaagttgtttttgcacaaaacccaaaaataaaatacaacaatataggatatatagatcatagcctctaaaaataaatttaaaattagactcttccaatgatgtttcaacccatataacaacagaaaagcaaaacaaaaatatttaaaatttgagataggttcgaagatgattatctttggaacttggttttcttgatgtatatgattaaatttggtgcatatgtaattaagtgtgcactggaccaataaaaaacattgaaaccttatataatatatcttcttatgacacattattatttaaataaacaaacaaacaaaactttaaaagcgtttgcgttcagcgttcagcgttcagcgtttgcgttcgacgtttagagttggcacaaaatccaccaaattaaaaccattcaggcggaggattcaatatatctcacagtttcactctcaacatttcaatatctctctctctctctgtgaagaacaaatacagcgtttcttctgcgattagatctatttcgatactcacgaggattgcctcctgaggagactacatatactaaacaaaatacaagctgaggagactaaatatatttagttaataccaataatatatgatatacaactacatatttacaaacaaagaaaatatagtagatttgtaatatatacataattgagatttgatgattgattaaaccaagaataccgtgcgtagcacgggtactgacatagtatgtgtattattctgaacttcataagattatttttcatttttgatgtgaaagataaagttgcaaaaatggtcgaatttgaaggttttttgcacaaacccagaaataaaataaaacaatataagatatgatcatagcctctgaaaataaatttagaactagactcttccattgatgtttcaacccatataacaacataaaagcaaagcaataagttgaaagatgataatcaaaattaaaaaatgagtatctttgcaacttggttttcttgatgtatataattaaatttgttacatatgtaattaagtgtaaactggacccataagacctttttcatccttgtaagcttaatgggctttatcaatataatgttggccgacaaaaaaaaaaaaaaaaagacccataagaaacattgaaaccagtctggcccatgacccatataatttatctttaaaagagtctgcgttccacgtttgcgttccgagtttgcgttccgtgtttgcgtttagagttggcacaaaatccaccaaatcaaaccagtcgggcggaggattcaatatctcagagtttcactctcaacatttcattctctctctctctctcaacaattagatctgtttcgataatcacgaggtttccctcacttcctttccattgctaaaccaggatttgcctcctgcatttggaaatggacgcttctatgattaccaattccaaatccattacttctccacccgtaagcaccaaaacgctattaatttgaaattcgtcaatctctgtttctctgtttctctgtttcatgtctctgaatctgttaaatctgttatatgaagtctttagccttagggaagtcaggaggaggaggagttatcagaagttcactatgtaacttaatgatgccaagcaaagttaacttccctagacaaagaactcaaactctaaaggttagccagaagaaactcaagagagctactagtggtggtcttggtgttacatgcagtggtggtgataagattctcgtagcgaatcgaggtgaaattgcagttcgtgttatcagaactgctcatgaaatggggattccttgtgttgctgtgtattctactatagataaagatgctcttcatgttaaattagctgatgaagctgtttgtattggtgaagctcctagtaaccagtcgtaagtgtggaacaaaatgattgatcttgttgtgtagagaatgaactagtgttgaattcttgtccttttgtgtgtaggtatttggtgattccgaatgttctgtctgcggctattagccgtggatgtacaatgcttcatcctggatatggttttctttcggagaacgctctctttgttgaaatgtgtagagaccatgggatcaattttattggacctaatgtaagtgtcttatatctcttcaaagactttatagactttgcagaacttcattagtctcagttcagccctagctttcttttgttggagagaaggaagatttcagtatctgatttatcggtatttcgtcttttctatctgtagcctgatagcatccgtgttatgggagacaaagcgactgcaagagagacaatgaaaaatgcaggggttcccactgtaccagggagtgatgggctattgcaggtatttttttagattatcagtttagtatttcaagtttttgcatgtcaagagaagtcttgggatttgaatgttttattttgtcttattgcagagtacagaagaagctgtcagggtcgccaatgagattggtttccctgtaatgatcaaggtaatattaacttgattggatttggagttaaatttgtatttcatactttcttttatgtaaccgataaactggattctcaaaattggtctgcttgaaaagacacaaatttaagtatgtttattttatgctcagcttgtctccctgtacttattgatatgcttatagttacaaaaactgactgttctcacttttctggtttcaaggcaacagctggtggtggtggacgtggaatgcgtcttgctaaggaaccgggagagtttgtaaaactgttgcaggtatgacaatcatgtaaatctgaaccaacaattcctctgatagaatttttaatgagtccagggatcaagttctccataagcataattgcagtattgtcacagattctttatttctttctaactcagacaatgtaaaggtgtaatctcatgatgtttgccacatttcgaaatttagacaactgtatagttgtgaaagctggaagtgtagtagcttaaatctagtaatactgaccattgatatcaattaaacaaccagattgtatgctttccgcttgcctttatagtcacagttttcttaaatgaaaattccacaaaagattcgacttccctttattgaacttggcttaatttttttatcgacagcaagctaagagcgaggctgctgctgcttttgggaatgatggatgttatctggagaagttcgtacaaaaccctagacatattgagttccaggtatgcattttatcaggagaagttgttcaaaacagttgaggttttagcaaaagatgattcttgtgagttgatggtctagtgatacacattattgatcccaaagccatattttctctctgtacctcttgtatttcaggtgctggcagataaatttggaaatgttgttcactttggtgagcgtgactgcagcatccaggtatcttcctcttaggttttttataatttcattaccatcaattgttgcatagtgctccaagaataaatgtaactgaatatatgaaaacaggaataaatttacttcagcctaattactgcacttgcatgtcatatcccagctgcatgatctgctaaactgattttttcctgtactaattgctaagataactcgaacttcgatactagttctcagaatttgagtatacctcttgctgctttctttcaattcttgtatgacatctaaaaccatctggatcatttaattatatcttcccctgacaacagaggcgtaaccaaaagcttctggaagaagcaccttctccagcattgaccgctgaattgcgaaaagccatgggtgatgcagcagtcgcagcagcagcatccattgggtacattggtgttggtactgtggagtttcttttagatgagagaggttccttctacttcatggaaatgaacactaggatccaggttgaattttattatgactgctaagtatatttataagcatctgaagtatactgaatgcgaaccatttcttgaatctaaactcaggtggagcatcctgtgacagagatgatttactctgttgatttgatagaggagcagattcgtgttgcaatgggagagaaacttcgttacaaacaggtttgaatagtgttgtatatgatgttttgagtggataccaaaaaagttatttcaaaatttaattttgtttgtttacaggaagatattgtgctcagagggcactcaattgaatgtcgtatcaatgcagaagatccatttaaaggattcagacctggacctggtatatttcagtagacttttatatgttaacgtcttcgaattttagcagattggctttctttaaaataacgtcactcttacaacaacaggcagaataacatcatacctgccatctggaggtcctttcgttagaatggacagccatgtctattccgactatgttgtgcctccaagctatgattctcttcttgggaaggtaatatctgtcttttactttctctggatagccatttagtatctgtttggttatttaggaacaaattttgtggcttcatggtaaaataatcactcgggtgttttggaatcttaaacaaatattggaaaagtcttcctggtgttgttcatttgcttctatagcagcagcttactggaacttatagctgatgtgttgacacactaaatctcttgtagcttattgtgtgggctccaacgagggaaaaagcaattgaacggatgaagcgggcgcttaatgacactatcattacaggtatgtcgagtactactttttgttaattccatattgtttatgcttcttcattgtctgttttgtttttcttttattctgtgtaagatgtgacatttcgttacattggacatctggtggaatgttaaatcaaatttcgttttcttggtttcatcaggggttccaacgactatcaattaccacaaacttatccttgatgttgaggtgtgtgaaataagtaaagctatagtttagcgaattttgtaatgaaaatgttggtttttttgtaatccaattgttgtgttggtcacaggatttcaaaaatggaaaagttgatacagctttcatcgtcaagcatgaagaggagctagctgaggtaaattcgaatgtctctgtggtcggctaaagacacaggccattggatgtattcattttcaatgcttctaagttagtgggatatgaagcctttggtaaagctgaacatagagataggagaattgcatgagaagaatgaaactatatatagaggaagacagattaaattgtgtttgtaatagtaaggttggttaaaccaaatggtgggttctaacatggttatattgtatatgcagcctcaagaaattgtggcagtgaaagatctgacaaacgcaacggtttagaatgatacatcagctctgaaagaccacccaattattgcaatcttcgtctccttttgtgtgttcattggtacaaacttcggtaacgataagactgttttactagagtctgtggttttatcaatgttcttcttgtatcataaacaagaggaaacacttttgtttgtagtctctatgtcaagatttttcaataattttcatatatagtagagattatatgaacaaggcctatcactattaacaaagtaaccaaaaccaaataaaacaaaagacaaaaataattcacatttaggtgatctcatcgcgggccggacacttcctgagacgctatgtaagacgcagactgcctagagccgccactattagagctctctcgccggtggaagaccatagtttcactctccccattttgtccttcaaccatggaagactccgcaaacctcagcccataaaacctcaagaagttcaacgactccatcctcgggttccccaacggtatacttccttcgaacatacccactaccgctgccattgttggcctcaatgctggctcctcgtggacgcaacacaaagctatccgaaccaacttctcagcctcttggctcgttacccgaccctctagcctcggatcagcgagctccatatacctcccttgttcatgcatatccaaagcgtacaatgggaaatacaccaaaccagtactagtggtcgtagtcgacgagtggttctgattattatcctccgtcacactgttgctccgagatcgaaaagaacagtttttcctaccactcactagttctaacaaaaccattccatagctgtacacatcagctttctcggagatcgctgcgtttgttatccactctggagctaaatagcctcgagtacctctcatcgtagtgaacagacttgattcttcttgattaagaagctttgataacccgaaatcagatatcttaggttggaaatgatcgtgcagtaagatgttctctggcttcacatcgcagtgtatgatcttctggtcgcaaccactgtggagatacgcgagcccgcgagcagtcccgagcgctatatcaaacctttcttgccactcaagcaccggaccattcccactaaacagagtcttttctaacgagccatggttcatgtactcgtagactaagagtaactgcctcccgcgagcgcaaaagcctcgcagtttcactagattcgtgtgtctgatatttccaattatcgcgatttccgtacaaaactcttgtctaccgtgaagtccatggtttgtgattttcttgacagcaatgagtgtttcatctgggagagttcctttgtagactgatccaaatccgcctgatcctatctgcatcttgaaattctcagttgcttgttccagctcctcgaattcgaatttctgaggtaaccccgggatatggaaagatcctagatctcctgattcgaacgacccgggtctagttacttgcttctcacggatgctactgtatctcatcactgcacatctacgccaccagagaagccctaatgcaatcaaaaggaagaaaccagagcaaggtaagagcacaagtgcgatcacagggaagctagatcctcctctgttattgtttcccggaggctgagcgtttgtttttctgatagacaacttaacgtatccaataagatcatgattctctggtgagttctttactaaagacaaagaaccaaacgagtcctttacgagataacaagaccgagacgtgttctcatagaaaacaccgaggcaagagcaattcttactgcaaatatcatgacaagccaataacgggagaccgtgttccacaggatcggtgaaatgagtagagaagtaagacacaccaagacctagttcgagatacgaaatgtttcttgcttcacaagaaacaggtaaactcaatgattggctaaccggaacacacacacccttaccagcatccattcgcatctcatctggacatgaacagctctgattttccgaagcgttatcaagattacaaagcccgagcttaccgcagacaaacggaatctgacaagaatccataggaccagagaattccgtcacaagattcttcccggagaatctactaacgatgaacttacctgatgaatccatcttcgccactcggaaatcagaggacggtggtaaagccacgcggactacaaccaccgtcccgttccgtgccataagagctaatcctgaagtagtgaccgttagatactcaacagggaagttagaatcaacattagctcgtatatgcatccttagcttccaataattctgtcctctccactgcatcaaaccgtcggattcaccgaccaagaacttataatctccggtagagaaatcagaccgcgagacggatccggacaagaacatcccaagcttaagtctttgtccaagaacgatcgagtcagtaggaaaatcaaagctttcccatagagaaacgttcaagtgatcaagaagaaggagattaccggcgtcggttaaccgaagggacttaaccggagaagctaaaaccggcgttgaccaaactggtatttgacttttaccatcttcaataacagagattccttgaggagtaagattcattgtaccagagcttgaaacaggggaatctcgatttgatgaccagattgttgaaccggaatcgacatggacgacggagaagtagaaaccggtagaggaatcatcgccgccgggactgaataaaccggctttgaagatggaattacgagacaagaggaaagctcctttggagctatcgacgaatctgaggttagaagctgtgaaattagggtaaacaaactctatggaagaagcacatgaaacaaagacaaagagaagattgagactaagtaacaacaacaacaacagaaacgttgatttcatagagaaaccactctgtttgtttttgttattattacaagaagtggatcatcagagaagaatctgaatgagttcttgtttttttttgtgttgtgttgttaagtttgaccagaaacgtattattggtgtggtggtgaccattatcatcaccttataattgtttattttaggaaggcaacgtttgaatgctttgaaaattacacaagggaagatttagtaataaattgcggcgagcatttatgaagtaggccagttttctttcttacgatgactattaggttttatttattgctcaccggaacttatacgagtttgatgttgcactaataatttatttttttagtttcttagttaattttttttgcaaggaaaaacaaattattcattttttcttcacattaaatttcgtttcagaacttaaatttggttacataataattggtttatattttaaatgtagatttcaactctgttcgattcacaataaatattattttaacgtttttcacatgaatttaaaaataaaaacacaaattcaaatttaaattatattccttaaaatcatgatgacttttagtttttttttatagagatgaggttatattgaaaatataaaacgatatttatttttaaacaatttatttgtataaattgtactctttctacttcaaaaaattttatttataagttttttgcatatatattaagagatcatttattttttcttgtatatagataaaagcatcatttattatttacctaacacaattcaaccaactataaaataaactccaaaatataaatagtaaaaaaaacatataaaatctaatgaactttgtatagaaaactgaaaacatcatttaatctgaaacaaaataattatccgaaaacatcacatattattattataaactgaaacagaagaaacaataaaatttccatttttatctcactattaaagtgagaacattatgtagactttgccactagaccatgaacctttctagtgttcatttcttctaccttatctgttttacttccttaagaagttttcgattttaccttcagaaaatcaaaatggtaaaaaaaggatataggttttctctctcttttctctctcaaatttttcagagaaagaaaactgaagactcttatggtcgtccgaaattctttctggctttgtctctcgatagggattatcatctggcaactaccagctatttccggtgttggccagctcttgtcgctttcatatcgataatggtcggctttgccgtcagcgctcctttgcttcttttcatttttcttataaattagttttttttaatagaagttgcggttaaacctcatcggatctgtatattagtggtggcgtttgtggcgattctccactcaaaagggtcatacatatcctttaggtttacggtttatggaaaataattaggcaatttgcaatttagttgaagatccaaagcaatttcctcaacttattactactgcttttagctatttctttttattaaagcattgattggtttagttaacagaagtagattagtttgagatcttatctcatttccgttgctttgcgatgaatctaaaaaaaaaataatattgatgattaaagcaagtgattgagattaatggttccatattagatctttacttctgttttgcagttatcggtgaattacagaagaatctatactcgattcattcgatgttagtttcaatctccggtagaatcgatggcttcaacggcgaaagacgatgactgaaatcttttgtctcctcatgttacacgcgttatcaatgttgacacttgtcttgagatcttatagttcgatccaatcttcttcttaagcgatgcaaatggttgggctcgtgttgggccttatatgttttccagtttcagttttgtagtcatgggttgtgatattaataaaactaaacctttgtgaaaaaaaaaatcaaaatggtatatactcttataaatccgtatagattctgtggtatacaagggtttagtatttcttctttttttttttggttaactacaagggtttagtgttagcacactgtaaaacccaatattacatataaacagatttaaaactctgtttaaaaatatttggtatacaaccgctattgacaacaacaagtcttgatcttgaccaaaattagtttgccttgctcctcttaacgtatgttgttctctctttgatagtttctgacttggattttccttttcaagatgtagaactgttgtgcaaacttgagctatcagatccatattgtagctgaggatcacttataatctcctacataaggaaaatatatagtttaactaaccgaaacatgtttaaaatctagagaaggtgcttaatggatttaatacctgtatcgaagtcgcggaccctgagctcctgatcggtgaaggctgtcttacaccaaatttaatgctttcttcagctagatccctgagttttttaagctcaggcaaaacaatgttccctaagtcaggtctgtctttgcgtcttaattttgcacattgtagagcaagttttgctgcagccaaggcttcttcgaatggccagtcaggaacagcagggtctaacatctcagcgaaagttcccttttcaatggctttttcgacgtgatgagttaaacccattggtggcttagctgtaagtatttgcaaaagcataatgccgaatgagtaaatgtctgacttagttcccaacataccggtctgctgatattcaggatctatgtaaaagaatgttccagcggttgaagtcattctatattgggttgcagtgtcagcaacagatggagggacgagtctggccaagcccacatctgaaatcttgctgacgaaatgctggtcgagtaatatgtttcccggtttaaggtcacggtgcaccaaaggctccggtttcatctggtggaggaaatgaagaccggttgcgatttcagatgctatacgaaatcttagctgccaagaaaggattggagagtttcctcgtctgaagagacagtcgtctaagctaccattggccatgtattcatagactaaacatccgtattccggacatgcaccaagcaggagaaccatgtttggatgtctcatacaggttagtacttcaacctctcgctggaactgagaccttccttgtgccgcgtctggtcttagaacttttatcgccactttagtatagtctagtgttcccttgtaaacaggtccatagcctccttctccgaccttgcgactaggcgagaaatcttctgtggcttcttcaatctcctcaatagtgtattttctgtaccttaaagaagacaccgccctcttcttttcatctacggtttcaatgtgctttctcttttcagcttcaaggtctgataatttctgcgctgccactgccgcttccatagctgctctgcttttttctttctccctctctgccattgccatcgctgcttccttggaaagtctcacttcttctaatttatgttccttctctgctttccacttgagtaactcgttagcctgagaaagaaatgtattggattataagtttggtgagaatctgacagaaaaattagcttttgattgttgaaaactcatacataccgctttctttgcagagattgcttccttgcaggcactgttatacatttccattgtatgctttagctccatcttcagccttctcatctcggtttcaagctcatcctgtcagattttagaattaaacaaatgaaaaaaacatttctcatgtgcacatatctggtcttagagtagtaaaatacttggccctgtagtgaaaatgattgtctcccactttcaaatgaggttgaagagtttggtgcatatggtgagccaagatctatggactgctttgagtatgttgtagcaaaactcaatcgattttctccatactcagaggtgactgagagccgtggaacatccacatcgtcatacaaggaaggaaacatctgatccacactcggtcttccactactcacaaatgatatatcagagtctgttattgagggctggtaaacgccttcgtatcctcttctcgaaaagggagacctactcaacatgtgtgtttaccataagtaaaatgtaacttatggaaaaaaataaaacaacttatgtaggtaagaaacatacttgatctctatcttgatctcatcatgtgttctttgcattgtttgttgcctcctttcaactgcaacatgaaagacatttgatcagttaggaaaagctattttagcttatatgatgtccttgaaaaaacttggtcatatataccattcatattgctcgtctgagcgtgtgaatgatgtcgcatagatggcatattggaatggggaggtgaacttgtagctgatctcagaaacgagattttccctttagagataacatatactgtacagaaactcggtgcctttttcatgacagtgcttgaaacatccgctgctttgaaccttctatcaaataaaacatatatataaggatgctcagatttagtcttaagtaaggagaaaagcgtttgcctaatcaccttaaaagagtcatcttcgaagaaccgagtattaaagtctcgattgcattctgttgcacgtagtcaactattcctttagccgcactaacgtcctccacaaccacatcttggcagttgatctgccacagtaacaagataatgtcagtcaaatgaaatgaaatgcttgacaagataaaaaaagtgaagcgaaaagccgaaaacgcacatcttttctagcacagtagcaacgaaaaggaagaaacaattctgacggatcatcgcctggcttactaaagtttgatcctgcattgaatcaaccttatgttaatatgaatattaagcctcaaacaaagaagttaactaatgttaaaatataggctttgtcgtcataccagaatagggaagagaggagggttgtttgagtttaacatgaagaagagtaagagtctgtcctcggctaagaagattgctaaccgcccatttcaacgcgttttggctctctttgtctctgtcaatggcaagagtaatattttcttctcttttctcggaggttctcaccattttcactactttcttctctcggtttcggtttcgttctgcaacaaacaaatattcaatgagtttatatataaatgaaacagattttgagaaacgcgtttgactaagctaatattagcaaatgcatcccaacaaaaacctttttgactctctttcttattgtctccttatagatgtaactgacttcataaacatccagacttttcaattttcttttgttggtatagttatctaatagttgtgtaagtcaaaacaaaaatggtagcttcctctgcttttgaccagataagaacgaatatatctgaaacttgttgtttagttcaacagaagtaccaagtttgggtttagggtttaccaatatagataatggggttgttgaattgatgagatagaaaataaaacagagaattgtgtattggtgctgtctgatgtaatcttaaaggacattacaggtcagcaattagagatttaagtttcaccacaaacctattattggaatgcttttgatgcaaagccttctctttaccattcatctttcttttcttttttctctgttgtgtcaatccaactgtagctgtaaacatcacattgtccctttctcaaaggtttctcaagaggacgcgcctcatgcctcccatgcaggcgcgtaccctcagcgtatacaacgtcatggtaccactagtatgtctcctccttttcttctccacacccactcatggtctttcagattctgaggctatcctcaagttcaaggaatctttagttgttgggcaggaaaacgcgttggcctcatggaatgctaaaagtcctccttgcacttggtctggtgtcttgtgcaatggcggctccgtctggagactgcagatggagaacttggagctttctggttctatagacatcgaggcattgtcgggtttgacatccttgaggactctaagcttcatgaacaacaagtttgaagggccattccctgacttcaagaaactcgctgctctcaagtcactctacctgtcaaacaatcaattcggaggagatataccaggggatgcttttgaaggtatggggtggttgaagaaggtccatttggcacaaaacaagtttaccggtcaaattccgtcatctgtggccaaattgcccaagcttttagaactgagacttgacgggaaccaattcactggagagataccagagtttgaacatcagctacacttgttaaacctttcaaacaatgcattaacaggtccaataccagagagtctcagcatgacagatccaaaggtgtttgaaggtaacaaaggcttatatggaaaaccgctggaaacagaatgtgattctccttatatagaacatcctccacagtctgaggcacgacccaaatcatcatcaaggggacctctcgttataacagcaatagtcgcggccttgacaatactcataatccttggagtgatcttcttgcttaaccgcagctataagaataaaaaaccgcgtttggcggtggaaaccggaccatcaagtctacagaagaaaaccggcatccgagaagcagaccaaagtcgtagagacagaaagaaagccgaccaccggaaaggctcaggcactactaagaggatgggtgcagcagctggagtggagaacacaaagctttcattcttgagggaagatagggaaaaatttgacctgcaagatctgttgaaggcttcggccgagatacttggaagtggatgttttggagcatcttataaagcagtgctatcaagcggacaaatgatggtcgtgaagaggttcaagcagatgaacaatgcagggagggatgagtttcaagagcacatgaaaagattagggaggttaatgcaccataatctgctttccattgtggcttattactataggaaggaggaaaagcttttagtatgtgattttgctgagagaggaagcttggctattaatcttcatagtaagttttcgatatttctacacttataagtcgttagatttatcgatgcttacgagtcaaatgtttgtaggtaatcaatcgttaggaaaaccaagtttggactggccaacaagattgaagatcgtgaagggagttgcaaaggggttgttctatctccaccaagacctacctagcctaatggctccacatggtcacctcaaatcctccaacgttcttctcaccaaaacatttgaaccacttctcacagactatggattaattccgttgatcaaccaagagaaggcacaaatgcacatggcggcctatagatctccagagtatttgcaacatcgacgtatcaccaagaaaaccgatgtatgggggcttggcatacttatcttggagatcctaacgggaaaattcccggctaatttctcacaaagtagtgaagaggatttagcgagttgggtgaactcgggtttccatggggtatgggcaccaagtttgtttgataagggtatggggaagacaagccattgtgaaggacagattctcaaactcttgacgatcggattgaactgttgtgaacccgacgtggagaaaaggttggacataggacaggctgtggagaagatcgaagagttgaaggagcgagaaggggatgatgacgacttctactcaacgtatgtgagtgaaactgatggtaggtcgtctaaaggagagtcatgcgagagtatcagctttgcatgagaaagagacaagggtttgatcttgtgctgtatacaacaatgagacttgatggatgtgtagacatttttactaagggaattgaagtagatgaaagctgaacctgtgttatagcatataatgtatctgcaacaaacatgacacacaaatgcatgaataccgctgattattgtacttctctcttccatctttctgtagatcatgacatgatttcttcacatagttaccatatatggcatgtaaatagatcttgcaatagacccattaaataaaaatcattgtcaatgactcaaggctttgggcaaatataactatacccttactattaatcatgagatattaataaaataagtcttgcttgctttaacgacaagcggactaaacatactaaatcatgcagatttcatccaatatatgattaagtaaatgtaacatgccattctcaggaaatgagagaagtttgagggtcaaagtcagtataaccaacgtcgaatagacagagaccttcagatggagctggaggagctgtggctcgtctgcatgaagcttctagcagttttaacaatgcatcatcttccgcaccagcggcagcttctcggattgatgttgccacaagaactcgaaccatctgaaagttacatagacatgtataaacgtataagtagattattaggcaatgtaaaacaagacgagcagatacagatttgagagtcaaatatgactctgcctctttagggatgagatcggggatgctgttgtacaacttcccatacatgtgtctttaatacagtgtagttctttacttttttagagtttaaagtaaaccttttttacatagaaccaaacttgtaacttaagtgtatttgaagctaatattaggcttaaagtaaacaccttgcggagaaatcggttagccacaagctcaacacacataacccttcttccttccacacagtcctgatacaattcatcaaaagaagtcaattttagtttcacatgaggagcttatctcatctttaggatacacttgcaatgaacaagaactcgcaagaacgtttaatcaaaaaccaagatgcaatatacagttttgtatctgtcaagtctaatgttgatccttcagtagccaggattacaagtactattgatccaccaaaaacccatgccacaaaatggacgacctaatatcatatctatatatctgaaaaatatgagtttgagctaagccttaaattgttatgtattaactatagcgtgaagtaccagaactcaacaagtgatactagagtgattgggtgtgaagtaaagaaatgatagctaaaatgtgagaacagaatcgaacacttacagaactggacaatctaatttcggctgcccgtgcatggtacataaaacattctgtaggcggacctctgcaatgtcaagaaaatccaaataagaaaccatttacactacaaatctatgccactgtacaccatgctgataagaaaggtaaatttctatgctggtaaaacagtgatcaagaactgttgcgatgctaaaacgtaataataatgaccttgtgtgagctcttactcgtttcttgcagcttttgtatcacgcgcaaacatcttgtaggataatacttttccttgaaggtgctgcaaaagttgatcaaccttgcttacactaaagtcacttggtttttctactacttcaagcgcattgctggtttcctcaatttcaagctcatcatcctcgctcattattacttcttcagcaatctcttcacttaagagtccatttctttgctttttcttgttctcatcaaagataaagttctcatgattctcgccactttttcgcaatggctcagcatcatccaaggggaagatatacaagtagcgcctccattttgccgagaaatttgggtgaaatgaacgggaaacctgcagattcagttcatagttccaagaaaaaagaattagaacgtatttgtatctttacacatacttttgccagtaaactaaaaacaggaaacaaaaccatcctgaacagagagtataccttagagattgatacaacccttagcttcccagaagcatctttattgatagcatcttcaatagcaatgggttcaatgtcttttctccatgtatctaagagacaaatcttaaaattagacaatcttacaattaatcacattaactagctagaatggccatgtccttgaaaaaaacagtacaatctcgtagagattaacaactaactatagtaaaaacctacactcacgagcaaacaataggagtagtcatgcagaacaaaaatgcaaatgcttttatcttatctagtggtggttatactatattgttaggaatctgaatttgacgtacagaaagaacaaacttgattaagagcagacactcctttatcggttcttccagcgacaagtacacgtccttctaatggtttacattttttcttgagcagttgagctttcctttcatcaacaaatccccctagagacttctctactacactttaaaaaccacaaaacgctagaacaatcattttttcaggaaaatactaaagtacataaggaactaaaagtctttgaaactaaggaatgtaagtgcttgtgcgtctctaaataccttacccctgaacagtatgtaagtcaggctgtttctgccatccatcaaaagaagccccattatacgaaagaacgatcttgaaattcactctttcccacctccccgacctcccgtctttccgagtagaagtctccggttccgattcaagaagcatctcttcagttatcccatcatcatgaaccaaagatttctgaattttgaacaaatcatttacatcagaaggatgatacaatacaagccatcttgacacaactgaataaagacttgtacttggtgctaaaagatactaactttaggctgaaacaaactcaggacagaaagattcccttccactgcatttgagtagaagtcaagaacatgttgccaaggcctatcatacataaacctaaatgtctctctgccaaaaaacaaaacataaaagcatgtgtgaagctaaaattatccccaaacgactcagaagtgtttagtgttgtagtgtgttcctaattcaatgaacttgttctcgggaacaacaatcattgtccgagtttctccgataaggtttaagagaaaaaagaagaagaacaaacctggcgttccagcgagctttgctacaggcatcggcgtggtggtaatgaacgtaaactctgctcgccattgtctgattgacctaagccgttgctcgtttccgccgtagaagaccggtgttagttaagaagaagaagactcaggtggttatggtttggatcagagcccaatatgaccaggctttgtttattgggcctttttctcttacttctcttattctttcatctattttctattcacactaaatttctattttgttcttttaagaaaaattaaatttatttattcgattaaaaatatatatgatttaatgttttgtattttctgaatgtacaactcttatatctgtatattatttagtatacaattactatgtttgatttttactgtttaaaaatataggaacaataacgtatcgttcaatctaaattataattgtattttgattgttatatataggatttcatttgtggtataccgtctcgtattactatcaatccaaacccgttctaccatctaatcccgttcagtgaaactaaacatatctaatggatttcacccgtggtataccgtctcgtattactgtcgacccaaactcgtcttaccatctaaccccgttcagtgaaattaaacatttttttttgttattttgttttaataatactttaatttaaaagatatataattcaaattaatttaattttttttctttctaatggttatttaattgttattaaattcatacattataatattctaaacccgtctcaccatctaatcgagttcggtaaaattaaacattattttttcttttttgttcttataatatttttattaaaagatttataatacaaataaatttaaaagttttctttgaaatggttatttaattttatagatttcatataatatatattcaaaacgttttttcgttaaataatataaacttcttataaactttaaattattataatatttatctttaataaagtataatattaataaagttttaagatttctcttttttaaaaaaataattagaattgatggagatatattagataaggaaatgctaataattaggaatattaattaattgataataattaatgccaatagcatcccttgtaaataagtttcaactaaaggatttatttgttaaatggctgcaaaaatgtacatatagatatttttcatgttagttattgctattttttatggagtaaatgaggcttgtaaagaaaacaggatagtatttaggaaccgactctgccctggtaaaattctccaatatcattgtcattccccaaaagtagatttaggagtgctatacctagacttcaacgctattagaatcattagatgaaggattcaatataacaaaatgggattgtctttttaagcacggtcttaacataaggttccatagttatatacaagtatacagtcaaaatacatttgctcctcaatgtgatcaactacgtcaatggagtttcataaagagtgtgatagggtttacatatgatgatcgtcgaccttcaggactcaaatatcgttggagtatttcctagttttctatttttttctaattctatttaatttttatgcaattcgtttgtggcttatgacctaagccataagactaattcattagtcaaattgttttgtttctatttaatatatatatatatagctcatttgatatttatgtttattgaataaatgttttgaataataaaaagacatctttttatatatgctaatgtttatttttataagaaatgactttatatgtatttgtttgctctacaagaatttgttattggttagagaaagttagttcatgtttattccgtagagaactatgagtttttaattatggtacacaaactcgatttaacagaaaagtcggttgttacgtagcaacaaagatctgtctatttgaattaagtagttaatgttgaacttattcgaacgatgaataaaaatgtaaaatattgtatggctttaacttaaaattaaaaataatatgataattgttttataagggtaacattcaaattacaaaaacgctcaatcacatcagaacgatggaatattagtttactattcaaaagagactggaacaccaatcttgcttccaactctacgaagacaatcgttccatgtctgtttgcttcttggaatagatgcaatatttttatattcatacgatgagaataagattttcatcaatccaagatggcaatctttgccaatcttcaatatattacgacaacatttatctgtcactaggtttgtttcatccaacacgttctggaaaatctcacctccgcatatggagctcggcttttcaacgcaagcctctagaaaatcatactgtttttgcgagtaatggggaagcttcatttcatattccattgcgggtgaaatagctttttcgaatggagttggagatatgactacatcttcatgtacctcctgggataaaattggacaagccatgtaaaacattacaatggatacaagcatgaccatgagaagagattttgccatatttatttttggttttggatgtaagattgatgatatgaaacaaaaaaacaaaagatgttatatagggcaatcggtaagggtatttaattgataaattgtttatttattaatagttttatgttactacttcataaacttctacctttactagttttgtttagaagacgtttgcagtagagactagagacttgtaaatgtttctacaagttgtaacttacaaggtgtgacaactctttttttcttaaagttattacaaatcaaagtgatacattagatacaacacggttagatacaacacggttagatacattagctttccgaatacacgcgataagcacttctgtgcaaattaaatattttttaaattacttaaaatatagtatttttcacaaaataaatatcacactaaatattagagattaatatgttgttttcaaattttcaaaaaaagacaaaactaaaaacaaatagtaaaagtaaaatgttattttaacattttctaaacgaaaaccaaattatgaaataaaatattttatattgcaagaaaaatatacatttaattattatcatatacaaattttaaactgcataagtgagaaaataattcatatagttttgatgtaggggaaaaaagagaaggaaagaatataagtttatgagtgaatgttaacaaacatagaaggaaagtatcaaataaacttaaaaggtttgaagggaaaagctaaaaacatttatgtaaaataagtttaaataaaaaatcagatgtagtacatagggtgaacatatggtgagggaagcactgacagtttgaccaattgaggcttttagcaattaaagaatcttacaaatttgattttattttagaagggtcagctaatccccttcccttctacgtgggtccaccttcgatactatggatatgtttatctaaaaccatttccattacacctaaaaaaacagaggtatttaatttagagaaagatcacaagaaaacagtatagatctttagttatagaggatctagctagagacatgacatttaaatacatttaaatattctttatttgtttcaatattttaaataattaaactaaacaaaaatattattattaaattttaaaaacacacttatcggtagttaacagatggatatgttctaaagatccaaaaatcaaaaggccatagttatatgtttttgttgtaggatttgaacaaaaaaattaggacaaaaaagtgtcaccatcaagacggcgtttaaggtaaaggcccataaaaaatttaacctagtttagtaactattaccaaaaagaaatcaaatcgtcgactcgtcgcttgccttttacttttaccaactagaatatgataccgcgggttaaatattttttttaatcacaaaatagaatttgttgttgttgttgtttatgttaattaataattatcgataagattgtgtatgcttttttttagtcataattatgatattagcaactataatatgtgttattttatcttctaggataataggatttgacttgtgagagaccataccatgggataatattttattttttattcataaatagtttttaaaaaagttatataatttaaacttttggtgttttcaaatttaacccgtggaacatatataatttagtaactttgtattaaaattacacatttaaatgtatcaaagaagaataacatttagaggtgtcaaagaagattaacacttatactataatgttgattttatgtatttttgtaactaaaaatttaaaattgaaattgtatttgttatgttattgttatttattttgtttaggtatagttgtaatttgattgttaattttaggagtacacccgtagtatccaaatttgtcccatctaaactcatagtaccatataaactcgtctcatccaaacccgtctactatgtaaactcgtctcctctaaacccatcccaccatataaatctgttccgtgataactaaaaatcaatttgttctttttctttttaataatatttttatttaaaatactttttgtcaattacaatttcaatctaataaaaaaaattgtatactatcttgaaattttaacaatttcaatctaataagaaacaatatcgggtcgttttgaagattttatatcgaattctttgaacaaaaaataacacaatttcttgttaaatatgttgtatcttttaaattaatatatttcttatttttatttattatcttcaatatatttggttttgatatattttagaaaacctgttcaaataattattaaaatttgaatcccgatgatatttatgtgattttttataatttaaagatatatatatatatattgtttagatttgttattgagatctttttagtgtctatttttttgttgcctttgtttgtttgcaaagtgtatcataattaaggtgaagttacaaaaagatctgtaaaatataatatcgtttacatattgattatagaatctgtagattattttgaaaaacaatatgtaaattatatgtttaattgtaatagtttaaaaattccagaaaacaatattcatatcgatattaaatttattttggagtttcaaattttataaatatttgaaattaataagaaaatgacaaaattatgtttaacgttttatatatatttataatgtttaaatttcttgtaaaattaaatttataattttcaaaacttcataagttttaaaattataaatatttttaaaaatatttaaagctaaacttgataaaaagtttgtaaaattataatatttaacttttgataaagaaaagtaaaaatatttataatttctgaaactttgtaaagtttctattctttaaaataaagaagccgagtaagccggataactactttaattttggacgcctgataaatcaagcttcctgcttattcgtaactggaatcattttggtcatttttatagtatggctctgaaccaatgcccaattattttaagcgatgtgagacattgtacacatgttatttcttcatcgattgaataatatatgttcgttttaagaaatttaaattacatcatatacataaaaatataatattttattaaatatttatattttatataaattcaaaataaattaaatataagatcaaataaatttgatagaacaatcatatatttatgtttaaattaggtaaagatgttttagaaaattagttaaggtaaataacaaatatggttagtttaaagttattatatatattaaatttggtaattaaattaatttcatttttatttgttttttagaaaatggtgataaaaaccaattatggaagatccgattgaagattttcgggtcaaaatcaaataaaaaatccgacccaattgaattccttaaaatgtacttcaaaaatgttaagtagattttatccaattttgaacgtggggtgaaaagtgaaattgatgttacggtatatagtagaattagtagtggttggtttgacggcttattaaatcatgtatgatcactgtatattcataaataaaatctagtatttacaggtttaaaaatcttcttattattaaaagggaagtacaaattgaatttttgtctaatttgacctcaattttgatttcaattttggattttgttctttgctcttcaaaatcattaagggtaatttggtcttaacaatctcctaaactttatatgatccgattcaatctaaaccgttcaataaagtaattcccttcaatctaaaccgttcaacaaaaataagtaaataacaaccaaaaaaaattaaaaacattttaacacattcctcttatcactaaataagtccaaaaaacaaatcccaattattatttcgttatgtttgattaaataatttatattataagtttaggatatcaaatttattcaaaatatttaatataagaattaaataaaccgattgtccgtggtaaaccgcgggttaaatcctagttagtattaatttagttagcataagaaatataacaaaaactaggtaaaatttactaataataatttaataacaatcttaataaattaggttgtgttttttaatcgcaactttccgtaaaaaatattgacggttatttttctcgttcatgtcttttcgtcaaaactttccgttaacattgacgattatttttccgttagtgtctttttatcgcaacttttcatttgcattttttcattataatttttattaacatcgaaagttattttttcctttagtatctttttatcacagctttttataaaaatattgacggttattttttctcacttgtatcttttattgcaactctcttatattgcaattttccatgaaattattgacacttctttttttcgttcgtaccttttcatcgtaactttccgttaatatcaaaggttgtttatttcgttagtgtttttttatcgaaactttttgttagtatttttttatcgtaaccttccgttaatattgaaggttttttttttcttttgaatctttcatcgtgactttctgttaacatcgatggttattttatttgttagtatctttttatcgtaattttttttgtaaaaagattgacgtttttcttgattgtatatttttatcgcaatttttcgttaaaatatcgatggttacttttttcgttcaagtcttttcatcataatttttcgttaactattgacggttattttttccattagtattttttatcgtaactttttgtttgtgaattttgatcataactttttgttaacatcaacagttatttgatcatttagtgtcgtttatcgctattttcctaaaaatattgacaattattttttcttggttgtctctttaccgcaactttctgttatgatattgatggttatttttggtagtatcttttaatctcaactttctactaaaaattgacggttatcttttttcgtttgtgttttccatcgtaattttctgttaacattaatgggggtttttcgttagtgtttttatcgcaatttctagtttgtgtattttcatcgtaactttgtttaaaatcgacggtaatttaatctgtttgtgtctttgatcaaaaaatttcataaaatattgacggttattttcctaggttgtctcattattgcaactttacgttataatattgacaattaattttttattatctttttatcgcaactttccattaaataattgatgattacttcttttgttcgtgttttttattctaattttttgttaatattacaggttatttttccgtttgtgtttttctatcgcaacttttcgtaaaaatattgacggttttttttatcgcaacttttcgtaaacatattgacagttattttttctcggttgtatctcttcattataactttccgttataatattgacggttatcttttttggttgagtcttttcatcgcaacttttcgttaaaatattaatagttacttttttcgttcgtgtctttttatcgttactttctgctaacctattgacggttatttgttccagttgtgtttttagcgtaacttttcattaaaatattgatagttactttttatcgtaactttccattagcattgacagttaattttcctcggttgtgtcttttatcgtaaacttcggtaaaagtatttacgtttattttttccggttagttatatgtatacttttaaataattactaaaatttataatatgcatcattttgagtttgattggtttgatagaaattattatataaacaaatttataatatttttccatgcgatatcgcggaggatctgagtcttagtatttatagaagtaatatacattacataaaaaaaggaatgtagttattagtatttaccaaacgaatttaaaaatgaaattaaaatttagattaaatatggagatatgaaaacgaaatatgatagctttaaccgatagactacaattacaaacttaggaaattcggggcgatatctcaacgatactccgtgaacacacaagagtgcaaaaaaattatcagtaaaataattaattttccaggatggcgagttagttggatcgtttttgtttgtttatgtcatgtgcataaaagatattgttaaaatggtggagattttcttttagaaaaaatgtattaccctttatagagatatcattaagcctcaaaagataacgaagagttacttgcctaagtattggtcaatatttgataaggattgagttacaattctccttccttaatttccgatacaccgttttacacgagatagagccaccggcacatcaccgattcataactttcactcactctagcgacacatacgtcactgaacaaacatcaaacaatgcataaagcctaaccaaatgagaaactagtcttatatacaagtcattattcacacgtgcaaacattagtttcttcaagcttcttctctcacacgtgtggcttcctctgctctattgtttcttgtagacacattcagtggcttatcaattaatgaccggataatttttgggttaggtacggtaggttggattacttgaggccatatatatgaccactatacggtgagcgtcctccatatcgagtaatgaggtaacacatctaagctaattatcaagttgtctaacttttgtaagattgtatctaactatctaagcaccactaagtaattcacatataaattacacatataagaccaaatttaaatgatgagtttagcccgaacgtatacttttacactagcataagagtggtttacattaaaaaaaaaatgggcatagtatttggacttgatggaacttattatataaaactgtataacaaaaagaaaacgcataaagaaacaaacaagtctacttttatctttcagtcccacgctactaagcaggttcacatatctatcactcactttgtattatatataaatagagtggtcctcttgagtttcttctatatgctagttgctcaactaatatctctctctctatctctcaacaattctcttaagtttaattagttttcagaagaaggagaagatgaagatcctggtcatacttttccacagctttcttgaactttctttttcatttccattgtttttttcttaaacaaaagtaagaagaaaaaaaactttaagattaagcattttggaagctcaagaaagctgtgggaaaacatgacaattcagggttttactccattgattcacttgtcaagattcttctttccaaagatattgatttgaaggtatggttacataaaccctttattcctaaattgaagacacaggataactctttagatccataattatggtcagaattatggatctaaagagttattgtgattataatcactaaagtaccgaagacattaggatggtaatcatgctatagttaaatctatatctttaaataggtatgttgagttttgtcgtcgaaagtaaataaaagtttacttctcattccccttaatcccgtatcaatgaaggctacatatgataatttggttaattgtgatagtttcttactaaatcttcaaggttttgttttagatgttcttattatattggtactctgtgaaaggtttctaaatgaaaatgaggaacgaagtttctgtgagtttccactttccagttctacatgagaaaataaggtttatatgctgatcttttcttacattttggttggaaaaagatttatgtgatgtcactctaaccactccacctcaggcgcgatttactcatacgttttgtgaatgaatatggacatattattttggggttatatgtatgtatcccatgtgatatatatatatatatatatatctacatgcctccttcatttacatatatattagtatacaagttgtggtctctatgtctttattcacatgtgacacttgcacatatcatccaaattgtgtttatatgcatgtgtgatcatataattgtacatatatatacatacataagagtacatatgcatgcagaacatatttacatacatagagattgtatgacatgcacatgtgcatgtcctgaagagaaggaattgtcagtaatttaacttggagttggacttgtcttcctctgtcgattcctttttctctttttcatatcaaatcaacatactgtttccgtttctcgtaagtgcttggttttcctaatcagtttcacatatatgtcattttgatgaaaataaaataatacggcgcattgtatattgaaatggtaataaaatttgacagatataccgtacgtcttcttcttcatttgtcaattaaatcttcctttcattaatctgattatcaattattcatattatgttgataaaacaaaacaaaaaactatacattaacaaaaggattattagtgcaaaaaataaatgcttaagcaccagtcgatctatttgaaactcctccactatcttactaatgatatattcttactaatgatatattcttacaaaaggattatgcaccagtcgatctatttgaaactcctccactatcttactaatgatatattcttttcaaataatggaattttaatgaaaaaaatcaataatttaagttttggtccatccatttttaatctttcaactaaattatttaatgaattttcaatatttcatcaagttgaaacaacataggttcattaatgatttagttaaagagttaagaatagatcggtcgatacttgaagagtttttttcattaatatcattaaattttataaagctaaaatattatctatatatgtcaatgctagctactccaattcgaaaataaatttcaacattccattagtttatgtataaattttattgttttatatagattaatattttaatcacaaaatatgtggtccaagctacagtttatgcgatttggagagaaaaaaatagtagaagacatggagaaaatccgcaaactagctattcagcgcattatagaatgggtggacaaacaaataagaaaccagatttcaacaatccgactcgagggagaaaggcggtacgctgacgcctaccaactctaatttcaagtcatgacttaacatatgttttttgtacttatctcaaacaaacgatgcactagttgtaaaaacgtatttttttatatatataatttaacattcgattaaagaaaaaaaaaaagaaaaaaagaattaactactgtatgaaacatctaagacaaattatgaatttctaacaagaggctcaaatcgttcgtaactgtattatccaattctttggtaacgtagacaaaagtctctgtatatatttaatttaactttacatcgtactagatcgatcccgagattgtttcttcttacacatgtgagttaaaaggaatcctggtaataactgatgagaaatgaatattgtatagtgaaaaccaattattcaaaatagtaaaaactgttgtccttttgatttatttatgataaaaacagatctgtggatgattgcgttgttgtgggtcttgtttgttttccactgattccaaaaccttttgacgtgaaaataatttgattggctaataaaatgggatatatgagagagagagaaaatggccaacgctttgaaagtgaagcttttgtcaatttatgatcagaaaaggaacctattgattcccatctccttctagtatcaatgtagcaatcacttgtttttggagattgagaggtcgcaactcgcaagtgcctatatttgtaacacaatttggatcgaatctataaaaacttgagagattatacacaaaatatttcaagattcacatagatatattatgatatcttaaagttttaatacaataaagtgcacaataaatataacatatcgaatttgtacataacccaacaaatatatgagccaggcatgatgctgttatatgtttcatttatagaattatttgactttggtataacaaatataaatatagataagatagaattatatcttggaaaatataaaataaaatattaaaaataacttgatccgtgttagttgtatgtatatatcaaaacaactttttacaatacaaagaaaaattcacaagattttctttatctttaatttctcataaatgtaaaatggatactttgacacaaattttttatgccgaaccgcatcatatcacatatatcatgaattttttatcttcaggaatggtttttttgagcagcggcggaggtagtgcattggaaggtggttcaattgatccccataaaaaaaattcaatttttaattgctagctaaattttataataattactagctgattttgtcttagatttctataatgaccccatagatagtgatccaaccatgcttttgacccatgcatgttcatttctcatttaactttaattatgtttttcatctttatttctttttgttttgttcaaaataactaaaactttctaattttttcttatatatttatttttttcttctctttttgacatatcataatttatttattttgctaccttgtaaaaatttccgtaacatatatttttttgaaaacattctagataaacacaatatattatacattttgcttaaaatattgagacaaaaagtacttaatacgactgtaaatatcttttatttggaaagtgaagcattttgaaaactacaaaatatatttgataataagaaataataggtgattttgtttggtttttgttttgtcttaggtaacaaattttatatattcttaaacatttacactttaaatgtatcatttaatattataactaagtaaatatatatatatatatatgactctcgtaaataaaacctctggttccgccactgcttttgagttctaattaatatcggttgacaaaaaaaaattttaatacaaaaaacttcatataaaatatatgtgaaaagttttatctctctgtaaacttttagagaaaagagaaagcttcgagttatattggaaggagacaactatatcgttttgaagttggttaaaggggatgtacaaaacttttgagttcacaacaagattagagaaatcacgttctaggataaaaaaaaaaactctcagatgttaaatttcactagacaagaagatatagcaacaaggttgtagatcttttgacaaaggaacctctacttgatcacacaaactttgtatcatacttacattcctggtttcattgtaaacatcctccatgaggataggttttcatattaatcgaagccagctgttaaaaaacaaaaaatggccggatgttatcatgtcccgatttagtcggactttcgtccaacatctccagtttctatagtggtggtaggccttacgtcatgtaataggacttggatttaaaaccaaaccaaaccaaaccaagattttggttgttcggttcggtttcagttatagtggttaaaccgaccatcagcttttaaaattaaaattggttatttgttatttaggttcggtttgcctgaaccaaacggttgattaaaaaaaatataaccctaataatactcgttagtatagtacctagtcctaggacttcggttttatcggtttggttattttggaatttcagtttttcttttttaattttttaattttgccgaaataaccgaaacaaataaacgctttgattcgttttgattgttaacgaatttggttttttagatttttgccgaactaaaacaaaaatattattaaaaaaatggataatgtcgggtgtttaagttcattcggttaattttgataagtttaaataaatttagttaattcggataagttgtatattcaggagtcatgaccaatcggaaaggaatcccaagttgtgcaaacttgttttgttctgttcttgttctccttgatcaatgtcaaatttgttctgttcatgttcaaaactataactttaaggatgttttcagtttgtagtaagagttaaactggtccaaactccaaacagaactatctctttaaggatgttttcagtttaaattagacttgaattttttgtgttaatgaattgtcttaatgtcaatgatgaaacgtccatagagtcttaactccaaaacagcttgacaaaaatcaattaaccggatgagcattatcattacaacttacgcattacaacattgtagattatcacaaatcatcaatatagggaaacaatcaatttaaaaaagcaaaaccgaattaaccaaactttgattattgggtttttgttttgggcatggcccattaccatcccaacattttattttattatcttctaatcttattatataaataatttttaaagttaagtaactcatacaattgtgacacttatcaagtctatcaatatgagattttgcaatgtgtccgaattttttttttctttaaagaaataaaaaactaaaacagaaaacaaatttcagtatactaatttatatgtctatatttaaattttgttttcgatcgtgacacgtatcaagactatcgatatgagattttgccatgtgtcagattctaatttatatgtccatatattaggtattaaagttatatgattactagattctgacccgcacatacgtgcggggtttcatattttaagaaatatattggaatacattttttagtgaaagatattgtagtgtataaattataatgtgcatagaaaagtgtatagtgttatttatgatacaataactaatttttttttagtaattatattatttatatttcatttgtgttttgtatagtaaatcgaatgtcagatttgtttcgatttgcggaataatatagagatatttggaaaatctgtgtatttttgttagtttgatgtatatacaaattaattgtttttgtttgaaatttgataaattagatgatataatttaaactttactccgcggtacaccgttttaacttaaaattcgaattttaagttatagttgttttgtaaatattgtttcttttgtttaatgtttaagattgtataattgtgttaaaattgttatttctaagattacactcgtagattatcatcccgtatgagtatcaacccaaactcgttccaccagataacttcattccgtaaaattaaatattatttttgttttttaaatattcttattgtaatatattaaaaaatcaagggattgacctgtggtagatcttggattaatatatttaaaaataatttgtgatttataaatttataatattgaagtatataaaaccgatttttagtgtatacctttcaataattatataaagtatattttaaaggtcaaaatttgtataaattgatattgcaacctcatgaaatcgtagtgatttacccatagggtaccacgggctaatttttattttattttttataaactgataaatttgttgattttagttaaaaataaaaaataaattaagttatatttgttttgtttattgtttcagattgtataactatattttgattgttaattccatgattttatctgtggtataatattgaccaacacccggctagttttttgtaatctagtgttgatcctgaaagaaaaatccttaagaatacgaataaatggatagtaaaattaggagataaacatcattagaacatgaagtaatttacatatgaatctctatctattttttttaaagaatcaatattctagattgattgtgaggcaatatgaatgtatgcataacatttataagagatagattgtacacaaaattagattttaatttggattcaatcttagctttactgaaaaaaactaatctgaattacatattttaaatttaggatgacgaatattttttttttaaaagctaaaattagatctcaacgattttggtatgtttttcaattaaacttatccttatgcattaccacaaatatggtagtcattattgttcgaatacaattaatgatctgtcaaaaaaatcatattacatattgttctcattttgaatatttgcattaaaaattttaaacattggtatttaaactttgttttactgtttaaaaaaaagaaataatcgaatctagaagtatgaatatttcaaaagcttgtaactattataatacgtttaaaaatatattttcttttatataattcaaatttagcttagtgatatattttaaaataatgaaaattacctgtttaaaaaaaaaatactttaaacgtttatatcatttaaattctaattaaaatgttaaatatatactgaaaccattttctagataattacaaatctaaaattcaaaaattctcttttgaatatgctaaatcatagtttaaattttatgtgtactaatcagaaacaattaacatagttttgttaaggaaattgtataaaatctaaactaaatgagaatttgttattaaattagattgaagtttccgaatgatctaataacatattaccaaaataaataagtttacatatatacaattcaaattaaaatagcctaatatgttatggaaacgttttgaaatgatttccgaaaatattgtgtagatattaatttattgatttaattcgtttttttaagaaaaattcaagatatttatttagttggagtaattgttaatttacaaaattacccatgcaaaaaaatcatttacttagttttaaactacccttacaatgttgtagttcacacaatgcttcccaattaatagtataaatacttttgatctttttactaatcatattttttttttgtcatttttagtaatcataattaatttaaaataagtctaatctttctataaattaataatttaaattatagggtgtgatacttaataccaattttttaaatctttctacaaatatttattctcttaatatgcaaacttttgtaattcaaaactagatattaacccgcggtataccgcgggcctatatttttattaaataaaaaataattgaatattttttaggatgatttaataaatttatgctattgtttgatttaaatatataaatcactgcgagaaaaaattttataactcaaattttaaagttttaagttgtatatgtttattttgttaaatgtttaatattgtataattgtattttcattgttgtttctcggatttcacccgtagtaaaccatcccatattaatatcgaatcaaacccgtcaattctaggatttcacccgtggtagtatttaattgtataattatattttgattgtcattctatgatttcactcctaattctatcgcaaattattatcaacccaaaccatcaattctaaaatatcacccgtagtacaccatcccatattaatatcgaatcaagcccgtcaattctaggattttacctgtgatagtatttaattgtataattatatttaaattgtcattctaggatttcactcctaattctatcgcaaattattatcaacccaaactagtcaattctaaaatatcacccgtagtacaccatcccatattaatatcgattcaaactcgtcaattctagtatttcactcgtggtagtatttaattgtataattatattttgattgtcattctaggatttaactcctagttctatcgcaaattcttatcaatccaaacagtcaattctaaagtttcacccgtagtataaagtttaaatatttataatgtttcaatttcttataaaagaataaaaatgtgttttaaaaaaattaaagttttaagttttttttttaatattgttaattttctttagtgtttaagattatataattatattatgattgttattatatttttttttccatagcatactatcccatgttattatccactcaaacccgtcacaccatataaccccgtcccgtgaaattaaacacaaatttgtcatttaattataaatttcaaatatttataaaattagaaacttcaaaaaggattaatatcgacccaaacttcatcattgaattttgagtgttatatctaagatttctctcgcagtatatcgtcccgtattaatatcttttatattgtttaaatttcttgtaaaatttaatttataatttttgaaactttttaaagtttcaattttttaaaataaatagccctactaaacaaagcattttaattttggacacctcataaatcaagtttcatgctcattcgtaatcgaaatcattttggtcctttttatagtatggctcttgaccattgtccaattttcttaagcgatgtgggacattctaaaatcgtaattattatccacccaaacccgtcctaccatataacccagtcccgtgaaattaaacataattttgtcattttcttataaatttcaatattataaaatttgaaacttaaacaaatacaatatcgacccaaaattcatcattgaattttgattgttatatttaagatttttcctgtaatatatcgtctcatattaatatattttttatatatttataatgtttaaatttcttgtaaaattcaatttataatttcttgtaaaagttttaaaaattataaatatttaaagcactttttaaagataaactttataaatagtttttaaaattataatatttaacttttgataaagttataatatttctaatttcttgaaacattttaaagtttcaattctttaaaataaaaaatctgagtaaaattggataactattttaattttggacgcctgataaatcaagctt

SEQ ID NO: 763 - DNA, 50015 bp, Arabidopsis thaliana
aagcttcttctctcacacgtgtggcttcctctgctctattgtttcttgtagacacattcagtggcttatcaattaatgaccggataatttttgggttaggtacggtaggttggattacttgaggccatatatatgaccactatacggtgagcgtcctccatatcgagtaatgaggtaacacatctaagctaattatcaagttgtctaacttttgtaagattgtatctaactatctaagcaccactaagtaattcacatataaattacacatataagaccaaatttaaatgatgagtttagcccgaacgtatacttttacactagcataagagtggtttacattaaaaaaaaaatgggcatagtatttggacttgatggaacttattatataaaactgtataacaaaaagaaaacgcataaagaaacaaacaagtctacttttatctttcagtcccacgctactaagcaggttcacatatctatcactcactttgtattatatataaatagagtggtcctcttgagtttcttctatatgctagttgctcaactaatatctctctctctatctctcaacaattctcttaagtttaattagttttcagaagaaggagaagatgaagatcctggtcatacttttccacagctttcttgaactttctttttcatttccattgtttttttcttaaacaaaagtaagaagaaaaaaaactttaagattaagcattttggaagctcaagaaagctgtgggaaaacatgacaattcagggttttactccattgattcacttgtcaagattcttctttccaaagatattgatttgaaggtatggttacataaaccctttattcctaaattgaagacacaggataactctttagatccataattatggtcagaattatggatctaaagagttattgtgattataatcactaaagtaccgaagacattaggatggtaatcatgctatagttaaatctatatctttaaataggtatgttgagttttgtcgtcgaaagtaaataaaagtttacttctcattccccttaatcccgtatcaatgaaggctacatatgataatttggttaattgtgatagtttcttactaaatcttcaaggttttgttttagatgttcttattatattggtactctgtgaaaggtttctaaatgaaaatgaggaacgaagtttctgtgagtttccactttccagttctacatgagaaaataaggtttatatgctgatcttttcttacattttggttggaaaaagatttatgtgatgtcactctaaccactccacctcaggcgcgatttactcatacgttttgtgaatgaatatggacatattattttggggttatatgtatgtatcccatgtgatatatatatatatatatatatctacatgcctccttcatttacatatatattagtatacaagttgtggtctctatgtctttattcacatgtgacacttgcacatatcatccaaattgtgtttatatgcatgtgtgatcatataattgtacatatatatacatacataagagtacatatgcatgcagaacatatttacatacatagagattgtatgacatgcacatgtgcatgtcctgaagagaaggaattgtcagtaatttaacttggagttggacttgtcttcctctgtcgattcctttttctctttttcatatcaaatcaacatactgtttccgtttctcgtaagtgcttggttttcctaatcagtttcacatatatgtcattttgatgaaaataaaataatacggcgcattgtatattgaaatggtaataaaatttgacagatataccgtacgtcttcttcttcatttgtcaattaaatcttcctttcattaatctgattatcaattattcatattatgttgataaaacaaaacaaaaaactatacattaacaaaaggattattagtgcaaaaaataaatgcttaagcaccagtcgatctatttgaaactcctccactatcttactaatgatatattcttactaatgatatattcttacaaaaggattatgcaccagtcgatctatttgaaactcctccactatcttactaatgatatattcttttcaaataatggaattttaatgaaaaaaatcaataatttaagttttggtccatccatttttaatctttcaactaaattatttaatgaattttcaatatttcatcaagttgaaacaacataggttcattaatgatttagttaaagagttaagaatagatcggtcgatacttgaagagtttttttcattaatatcattaaattttataaagctaaaatattatctatatatgtcaatgctagctactccaattcgaaaataaatttcaacattccattagtttatgtataaattttattgttttatatagattaatattttaatcacaaaatatgtggtccaagctacagtttatgcgatttggagagaaaaaaatagtagaagacatggagaaaatccgcaaactagctattcagcgcattatagaatgggtggacaaacaaataagaaaccagatttcaacaatccgactcgagggagaaaggcggtacgctgacgcctaccaactctaatttcaagtcatgacttaacatatgttttttgtacttatctcaaacaaacgatgcactagttgtaaaaacgtatttttttatatatataatttaacattcgattaaagaaaaaaaaaaagaaaaaaagaattaactactgtatgaaacatctaagacaaattatgaatttctaacaagaggctcaaatcgttcgtaactgtattatccaattctttggtaacgtagacaaaagtctctgtatatatttaatttaactttacatcgtactagatcgatcccgagattgtttcttcttacacatgtgagttaaaaggaatcctggtaataactgatgagaaatgaatattgtatagtgaaaaccaattattcaaaatagtaaaaactgttgtccttttgatttatttatgataaaaacagatctgtggatgattgcgttgttgtgggtcttgtttgttttccactgattccaaaaccttttgacgtgaaaataatttgattggctaataaaatgggatatatgagagagagagaaaatggccaacgctttgaaagtgaagcttttgtcaatttatgatcagaaaaggaacctattgattcccatctccttctagtatcaatgtagcaatcacttgtttttggagattgagaggtcgcaactcgcaagtgcctatatttgtaacacaatttggatcgaatctataaaaacttgagagattatacacaaaatatttcaagattcacatagatatattatgatatcttaaagttttaatacaataaagtgcacaataaatataacatatcgaatttgtacataacccaacaaatatatgagccaggcatgatgctgttatatgtttcatttatagaattatttgactttggtataacaaatataaatatagataagatagaattatatcttggaaaatataaaataaaatattaaaaataacttgatccgtgttagttgtatgtatatatcaaaacaactttttacaatacaaagaaaaattcacaagattttctttatctttaatttctcataaatgtaaaatggatactttgacacaaattttttatgccgaaccgcatcatatcacatatatcatgaattttttatcttcaggaatggtttttttgagcagcggcggaggtagtgcattggaaggtggttcaattgatccccataaaaaaaattcaatttttaattgctagctaaattttataataattactagctgattttgtcttagatttctataatgaccccatagatagtgatccaaccatgcttttgacccatgcatgttcatttctcatttaactttaattatgtttttcatctttatttctttttgttttgttcaaaataactaaaactttctaattttttcttatatatttatttttttcttctctttttgacatatcataatttatttattttgctaccttgtaaaaatttccgtaacatatatttttttgaaaacattctagataaacacaatatattatacattttgcttaaaatattgagacaaaaagtacttaatacgactgtaaatatcttttatttggaaagtgaagcattttgaaaactacaaaatatatttgataataagaaataataggtgattttgtttggtttttgttttgtcttaggtaacaaattttatatattcttaaacatttacactttaaatgtatcatttaatattataactaagtaaatatatatatatatatatgactctcgtaaataaaacctctggttccgccactgcttttgagttctaattaatatcggttgacaaaaaaaaattttaatacaaaaaacttcatataaaatatatgtgaaaagttttatctctctgtaaacttttagagaaaagagaaagcttcgagttatattggaaggagacaactatatcgttttgaagttggttaaaggggatgtacaaaacttttgagttcacaacaagattagagaaatcacgttctaggataaaaaaaaaaactctcagatgttaaatttcactagacaagaagatatagcaacaaggttgtagatcttttgacaaaggaacctctacttgatcacacaaactttgtatcatacttacattcctggtttcattgtaaacatcctccatgaggataggttttcatattaatcgaagccagctgttaaaaaacaaaaaatggccggatgttatcatgtcccgatttagtcggactttcgtccaacatctccagtttctatagtggtggtaggccttacgtcatgtaataggacttggatttaaaaccaaaccaaaccaaaccaagattttggttgttcggttcggtttcagttatagtggttaaaccgaccatcagcttttaaaattaaaattggttatttgttatttaggttcggtttgcctgaaccaaacggttgattaaaaaaaatataaccctaataatactcgttagtatagtacctagtcctaggacttcggttttatcggtttggttattttggaatttcagtttttcttttttaattttttaattttgccgaaataaccgaaacaaataaacgctttgattcgttttgattgttaacgaatttggttttttagatttttgccgaactaaaacaaaaatattattaaaaaaatggataatgtcgggtgtttaagttcattcggttaattttgataagtttaaataaatttagttaattcggataagttgtatattcaggagtcatgaccaatcggaaaggaatcccaagttgtgcaaacttgttttgttctgttcttgttctccttgatcaatgtcaaatttgttctgttcatgttcaaaactataactttaaggatgttttcagtttgtagtaagagttaaactggtccaaactccaaacagaactatctctttaaggatgttttcagtttaaattagacttgaattttttgtgttaatgaattgtcttaatgtcaatgatgaaacgtccatagagtcttaactccaaaacagcttgacaaaaatcaattaaccggatgagcattatcattacaacttacgcattacaacattgtagattatcacaaatcatcaatatagggaaacaatcaatttaaaaaagcaaaaccgaattaaccaaactttgattattgggtttttgttttgggcatggcccattaccatcccaacattttattttattatcttctaatcttattatataaataatttttaaagttaagtaactcatacaattgtgacacttatcaagtctatcaatatgagattttgcaatgtgtccgaattttttttttctttaaagaaataaaaaactaaaacagaaaacaaatttcagtatactaatttatatgtctatatttaaattttgttttcgatcgtgacacgtatcaagactatcgatatgagattttgccatgtgtcagattctaatttatatgtccatatattaggtattaaagttatatgattactagattctgacccgcacatacgtgcggggtttcatattttaagaaatatattggaatacattttttagtgaaagatattgtagtgtataaattataatgtgcatagaaaagtgtatagtgttatttatgatacaataactaatttttttttagtaattatattatttatatttcatttgtgttttgtatagtaaatcgaatgtcagatttgtttcgatttgcggaataatatagagatatttggaaaatctgtgtatttttgttagtttgatgtatatacaaattaattgtttttgtttgaaatttgataaattagatgatataatttaaactttactccgcggtacaccgttttaacttaaaattcgaattttaagttatagttgttttgtaaatattgtttcttttgtttaatgtttaagattgtataattgtgttaaaattgttatttctaagattacactcgtagattatcatcccgtatgagtatcaacccaaactcgttccaccagataacttcattccgtaaaattaaatattatttttgttttttaaatattcttattgtaatatattaaaaaatcaagggattgacctgtggtagatcttggattaatatatttaaaaataatttgtgatttataaatttataatattgaagtatataaaaccgatttttagtgtatacctttcaataattatataaagtatattttaaaggtcaaaatttgtataaattgatattgcaacctcatgaaatcgtagtgatttacccatagggtaccacgggctaatttttattttattttttataaactgataaatttgttgattttagttaaaaataaaaaataaattaagttatatttgttttgtttattgtttcagattgtataactatattttgattgttaattccatgattttatctgtggtataatattgaccaacacccggctagttttttgtaatctagtgttgatcctgaaagaaaaatccttaagaatacgaataaatggatagtaaaattaggagataaacatcattagaacatgaagtaatttacatatgaatctctatctattttttttaaagaatcaatattctagattgattgtgaggcaatatgaatgtatgcataacatttataagagatagattgtacacaaaattagattttaatttggattcaatcttagctttactgaaaaaaactaatctgaattacatattttaaatttaggatgacgaatattttttttttaaaagctaaaattagatctcaacgattttggtatgtttttcaattaaacttatccttatgcattaccacaaatatggtagtcattattgttcgaatacaattaatgatctgtcaaaaaaatcatattacatattgttctcattttgaatatttgcattaaaaattttaaacattggtatttaaactttgttttactgtttaaaaaaaagaaataatcgaatctagaagtatgaatatttcaaaagcttgtaactattataatacgtttaaaaatatattttcttttatataattcaaatttagcttagtgatatattttaaaataatgaaaattacctgtttaaaaaaaaaatactttaaacgtttatatcatttaaattctaattaaaatgttaaatatatactgaaaccattttctagataattacaaatctaaaattcaaaaattctcttttgaatatgctaaatcatagtttaaattttatgtgtactaatcagaaacaattaacatagttttgttaaggaaattgtataaaatctaaactaaatgagaatttgttattaaattagattgaagtttccgaatgatctaataacatattaccaaaataaataagtttacatatatacaattcaaattaaaatagcctaatatgttatggaaacgttttgaaatgatttccgaaaatattgtgtagatattaatttattgatttaattcgtttttttaagaaaaattcaagatatttatttagttggagtaattgttaatttacaaaattacccatgcaaaaaaatcatttacttagttttaaactacccttacaatgttgtagttcacacaatgcttcccaattaatagtataaatacttttgatctttttactaatcatattttttttttgtcatttttagtaatcataattaatttaaaataagtctaatctttctataaattaataatttaaattatagggtgtgatacttaataccaattttttaaatctttctacaaatatttattctcttaatatgcaaacttttgtaattcaaaactagatattaacccgcggtataccgcgggcctatatttttattaaataaaaaataattgaatattttttaggatgatttaataaatttatgctattgtttgatttaaatatataaatcactgcgagaaaaaattttataactcaaattttaaagttttaagttgtatatgtttattttgttaaatgtttaatattgtataattgtattttcattgttgtttctcggatttcacccgtagtaaaccatcccatattaatatcgaatcaaacccgtcaattctaggatttcacccgtggtagtatttaattgtataattatattttgattgtcattctatgatttcactcctaattctatcgcaaattattatcaacccaaaccatcaattctaaaatatcacccgtagtacaccatcccatattaatatcgaatcaagcccgtcaattctaggattttacctgtgatagtatttaattgtataattatatttaaattgtcattctaggatttcactcctaattctatcgcaaattattatcaacccaaactagtcaattctaaaatatcacccgtagtacaccatcccatattaatatcgattcaaactcgtcaattctagtatttcactcgtggtagtatttaattgtataattatattttgattgtcattctaggatttaactcctagttctatcgcaaattcttatcaatccaaacagtcaattctaaagtttcacccgtagtataaagtttaaatatttataatgtttcaatttcttataaaagaataaaaatgtgttttaaaaaaattaaagttttaagttttttttttaatattgttaattttctttagtgtttaagattatataattatattatgattgttattatatttttttttccatagcatactatcccatgttattatccactcaaacccgtcacaccatataaccccgtcccgtgaaattaaacacaaatttgtcatttaattataaatttcaaatatttataaaattagaaacttcaaaaaggattaatatcgacccaaacttcatcattgaattttgagtgttatatctaagatttctctcgcagtatatcgtcccgtattaatatcttttatattgtttaaatttcttgtaaaatttaatttataatttttgaaactttttaaagtttcaattttttaaaataaatagccctactaaacaaagcattttaattttggacacctcataaatcaagtttcatgctcattcgtaatcgaaatcattttggtcctttttatagtatggctcttgaccattgtccaattttcttaagcgatgtgggacattctaaaatcgtaattattatccacccaaacccgtcctaccatataacccagtcccgtgaaattaaacataattttgtcattttcttataaatttcaatattataaaatttgaaacttaaacaaatacaatatcgacccaaaattcatcattgaattttgattgttatatttaagatttttcctgtaatatatcgtctcatattaatatattttttatatatttataatgtttaaatttcttgtaaaattcaatttataatttcttgtaaaagttttaaaaattataaatatttaaagcactttttaaagataaactttataaatagtttttaaaattataatatttaacttttgataaagttataatatttctaatttcttgaaacattttaaagtttcaattctttaaaataaaaaatctgagtaaaattggataactattttaattttggacgcctgataaatcaagcttcctgctcatttgtaatcagaatcattttggtccttttataatatgggtctgaaccattgtccaatttttctaagagatgtgggacattgtacacatattatttcttcataggttgaataatatatgtccgttttaaaaaatttgaattacatcatattcagagaaaaatataatatttgattaactatagatattttatataaattcaaaataaataaagtataagatcaaataaaaatgaaagaagaattatatatttatgtttaaattatgtagaaatattttaggaaattagttaaggtaaataagaaatatggttagtttagagatattgtttatattaaatttggtaattaaattattaattttcgtttttaattattagtttttaggtaacttttccaaaaattaatgttatccaagatcagaacagaattaaacatgttatccaggatccgaacagagttaaaccgggtaaaacccatccatttgaattaattgttgaattatggctcaaatcttcaatattatgttcaaaaacctcctacaaaaatgtatatatagatttaattataatgcataatatttaatacttaatgtaaagccatttactttttagagagagttgaataaactgcatatatgtataaatataatttaaaatgagaaagtagagatatttcaaatttatgttgactatctttaaggcaaaattttgaaaacattaatgggtagactaaaacattgaataacaaagaaaaatcatctaaggtttttaaattattcaaaattggacggtagagataaatctaacggctattgtttttcttgtaaacaacaacacatcatcctaatttcttttaaatagaggattatttgtacgctcttcttcacactcaaaaaatcacataactcataataagtttgctacattaaccattttttgttagtaacttttctcttaattatctgcttctctaacgctacattttccgttagtaacctattggccatttgataactccaacaaggactaatcaaacgagaaccatttgatgatgttaatggtgaaacacaagacccatcagcaaactctcctccaatggtcacaccactacaaaacattagatcctttaatgactccaacaaaactcttatgatgtgggtgctagtgaggccagtaccgtagttaatattgatgtgtttttggtctgactgtctacaaaagaaatccacatcataagagctgttgaaggagtcattaaaagatctaatggtttgatcattagaggagggtttgttgatgggtcgtgtgttgcatcattaatatcatcaaatggttctcgtttaattcgtatttgttgtagtcatcaaatagccaatatgttacgctatgtaccacgaaaatgcatcttcctcttctaaaacgcttcttccttttctaataatggggattcaagatttctcgttaagataaatatgtggtgtttacttctttttttttttctttttctaggtgataagggtgttattggttgctaatttacaattttttttgattactttaataatatcatagatagtaaattaagattttaaactattgatagagagttttctataatcttgttgattagtttttcacaattttgtaaagttttccaaacaatctctctattttgatgatacattttgactttattttggaaagaaaagtgtagagagtcataaaacaataacacaataatttaatttattaacaatcatagtttttttttttaattgaataacaccaaacttttagtaacttcatatttttttaaaattataaggtaaaacctcctaacacagtgaccaccatgttatgtgatatatttttgtcttttaacccatgtatgttcattttgtcatttaatcttatctttttgcatttctttttggctaaaaatctagtttttactattaaaaaacccaagtaatattcattaacaaatcaacattttcttcttttagacatatcctattttaatttctacttcttttcaaaatactaggttttgaaccaacgctacgtgttggtttatttgttaaaaaatatcttatacaattataatgtgcggtttctaagacttttcaattattaaagcaaaaattacatttgacatataaaattaaaaaaaaactataacatatataagaaatagaattcacttatgtaaacaattttcctcaagattggctctttggagcccttaataatatctgatgaaaaaaacaaatatcagaaatagaaagtacatgtcagagagagtttaacaatttaatttaacagtttagaggttgttggttcgagtgacgcttggaacggaactaatattacatgttgtgatttcgagtctcagaagattacagactttatctcaaattctgagaacctcttggtattcgaaaataaaaaaaccacacaaattacattttcttcagaaacttcctctacatcccactttgactctcttggatctgttttagtcttctgccaatgaactcaaattgagagctgcttttctcttacttctcgctactcgagtactcactgatttatttttagtctctaactctcattgcaacaaacttggttggttctgagctttaaccacattaatatgaatttcctaggttttgaatccaaaatttgagttttttattttctattttggaatttgtggaagatcatcaccaatgttagtatatgcatgaatgtttttgtttctcctgttctagagactcaagttataagaaattagaatcaatggtgtttaaaatcaaatttgatgataaaaaaaaatcatctatcaatcttgttttctcatattcaattagccgccaacacatacgtcttcgtatttttcttcaccttcatcatttttgtactcttttattccttctcgtcatcttaattgtcaaatatttatggctattgtcatcgttacttttaatgtatgtttcactatactcttcttcttcctcttccctactatcttccttcttctatgtaacacattagttaaaaacagagcaactaatttaaatttactaaccttacctaaccatagaactccataagcctattaattgactatctgaaacaacatcattcgtttgatcttcttaactcgaaatttgatgcctatttaccagaacttagttccatgtctccataatactcttcaccattctacctcgagacaataataccagaaacctcgatatcaaatttcagctacatataaacaaaatgttttcgaggtcatgtcaaaactatttttcatttttattttttcttataatataatccaaatttgtcttatggtgtcacaatcagacctcttctccctcacaacaatggctctctccttttatctatctttcgcttgtcgcgtgtctatccgtgtttctcttgtttccttcatttttttaacataaaagcaaccatttttgttacctaaattacaacgtcaatttaggatttcttattttataaagatatctaaaacaattaaaaaggttcattttaaaatatttcctagtcattatcataacgaatttttgtcaacttaactttattttatgagaaagaatatatcaaaaatatagttatggtagagttaacattttaatttatgcaaatatgcttaaaatgatagcattaacattaattttagttatctttcttactttcatatgttgtttttttggtgaaagatatctaatattataggaacatatttagataattaagactttagaacatatttctttgttatgtttcttttaacagttatattgttaagtgtcttgttacccggctactcttaacaaaactgaaacgatcattttaaattattatttttttgtaaatattcttttatccatcaactttcggtaaaagattttttttatgctttgtgtccactaacctattgcttccaattttgtaattcaataccgtgatagatacgcaatcattttgattactcttcacaaccgtgaaggagaagagaggagaaaaatatgatctacaccaaaatactaataagcatatacaaaaatagttcatatattaaataactcgcaaaacgataagacaataatcaccttagatatgcttgttctcttaatctgttctataagagattaaattaaaactaaacattagaataacaaacggaatattactccaatgtctcaattccatgtccttgacctatcacgtttgaaaacttttctaggagaatccaaaacagaataagagatttagagttaaaaaaactaagattaaaaaaaaacaatacaatctgctaaaatataaaaatgtaaattaaaggaattcatgaaaaataaatgataatctttcacatatagtcaactttcttccacacacgctatttcgaaaaaggtaagctcatgagccttttacgttctcttaaagatgttgtgtcaaaactgttatttcctctaatctgtagttcaccacatacaactctaactttggtgtggatcatatgagcactttacgttcttcacttcattcccctaatttttttttatatgccttctcgtcattctacggtatctctttctatttgcttccacgttttcttctttttttgctttctctctcttttcttcttcctttcacttcctttctcattgaggtttttcttgtttttcctttactcttcttatttcttctctagttcttttcccaaatctagttctcttcccagatctcttcctctccacctctttctatcacttcatcaatggaagtacaacgaacaacggcaacgttgattccttgacatagtgatcaaaacagtggcgatgaaaccggataacaaactcacaaacttaggtgaaaacgtacgtcgacggagatgatctcaatgacgatgacttgggtgcatgatggatatgtgataacactagattttaaccattttaagcccttgtttttcatgcatttagcttagtttcatgcttcttttcatgcattcatagtccattttctttccttttcacattttgcattgcattgcatagcatatttgcatttggagtgttttacaggtgaatcaggtatttttggactcgatttggacattttcgtcacaaggagtggacttgctcgagtttgtgcaacaaggaaggacatggagccatgctcgacgtatatgctcggctggagatcaagtgacacacatggaagaagaagagaagctgctcggcttgaagtcgagtgatatgaccaaagaacctgctcgagatttctgctcgaccaagacccgagtggtactgcgccgacttacttattttgtatttttcctaattagggaatcctagaattacctataaatagactctttctgtttttgcccaaaatatcttagctttgtctgttggatattaggcttttctagatttctattgcattttccttctattgtgttaagaatctaagtttgatttcttctacaaagttgtttatcttgttgagttctatcacttgctaagtttataatgatttctgggttttatgatttttctgggttttgttctatgatgttctttattgttcgtgagtagtgttcttcaaagttcttgaatatgggttaggtttaggtagatacctctgttcttttagctagctaagtttataattgcatgatttccttctgtgttaggagttcttaatgctatttcctttctgatcaattggaaattgatttcagactttctcaacctaataagtgtttgatgaaatgtctgaaccaactaatttcagagatttgtagattctagcccaagacattggatgtttagaaaacttatttttcatcaatgaaagttgagattaggaagtggtaaagttatgaggatcattgtcatgagagtggattgatcttgttttgaatctattgtctagggatagcttgattgagtttgttagttagctaaatagattgaggagtccactagaaccaattaccccattcttaagagctctgtttcgttttattgtgcatgactcgtgtctttagtcttctgctcgttctgtttagtttcttgtgcaaacttggtgtttttagtatcttgcttgaccggtttaatattatgctcggccgagtactttacttggtgcttggtttactttctagtccatgcatttgatagttcttggtctttaatttcattcgtgcttctatcacttgtgttctttactttctacttagtatagtttcatttctaaatctgatttgcatgttaatctattgcttaggtttagtagaacactaaacccactcatacttggcttgacttagtactctatgatcacatcctgattgatagcaataccacccaattggattaacaccttaaatgttgcaatgacataagatgcatttagggaattgacacacaaaattattgtatcaatatgacacgttgacgcatgattcacttctctctcgaagttatcatggctatgggtttccatcacgtatgcaacacatacaacctaaaacgtaacaatgacttaatattttacatcatcagtcatcactaccaccatcatcgccagcataatcacaccttcgacggcaaacacaaatctgtgtcacttctattatagaggaaaaacccaacattttccaatgacggtgattttgtttgtaaccgcgcattctaaccgggctaaatttatttttttcaagaaaagaataattagttttgttacctattttgacgatgatttttctttcaagtttatggtagatatcattttttttaatttttttttgttaagttactttgaaaatatatgttaaatatagatgtggaccaataaatcatgtttttaaaattctatgtggacgattttttgagcttataatctcaacttttatataatgtagactaggttttgaccccatgctacgcgtgaatactttttgatatattttggtgattgattatagtttttaaattaaagtaagaatttcatttcaaatacactatgaaaaattataaaagtcattagtatttaaaaatcaaatttaatcaaaagaatcataaatcaattttgttttctcatattcaattggatgttaacacctatgtcttcttatatctcttcacatttattgtttcttaattttcatatttctttttgtcatattaattatcaattttttggggggatttgcaaaaatactcttttctactacctttttgcaacaataatttttttgttgtccaacacctcttaagatatttataaagtctttaaatatatatgtaaatactttaaaccccctttaaaaacctttgtaaatcattttaaaactttttacaatgggtttaaaagatttacaagagtttttaaagagttttgaaaggactttcaaggattttaaaaatatttgtaaatccttttaaaatatttttaaaactcttataaagtctttaaatcattttttaactcttaaaaattatttgtaaatattttaaaactcttgtgaaccttttaaaatcttttaaaaacctttgtaaatcttttaaaatccttgtatatctttaaactttttttaaagggttttaaaacccatgtaaatcttttaaaactccttgtaaatcctttaaaactcttgtaaaccatttaaaaagcttttaaaaacccttgtaaaccctttaaaatttttttgtaccatttgaaaactcttgtggatcttttaaaaatcttttaaaaccccttgtaaatattttaaaaacccttgttaaccctttcataattttaaaactattttaaaactcttgttaacctttataagaggttttaaaaagatttacaagagttttaaagggttttaaaacccttgtaaattctttaaaaatctttgtaaatctttgaaaatcctttaaaaatcttttaaaatcccttgtatatctatttcccgcaaatatttttttttgcgggaaaaatcttttgggaatttttttttttgcgggaatctttttttggtgggaaaattttgttggcggtaaaattttggcgggaaatttatttttggaatattttaagcgggtaaaatgaatattttattttgttaacctaaacttttttccaaataggggtaaaatagtcattaaaaattaaaagagggtataaatgaaaatgacaacatgaaagggcataaatgaaagaagtagtggtgaaagggcattcttagcaagtattcattttttctattgtcatcattactttcacctccgcttcttcgttatagtcttcatcttcatcttcctcgttatctttttcatttttttcctcatcctttgcatattattctatataaaatattcgttattatgtagctaaaaacagagtaagaaatttaaacttagtaaccttaaccaaacatagttcaataaacttatgaattaactaataaaacgacttagttcatttcaccttctcaattcgaaattcgatcccttagttcccatctcccgtatactctaccaaatttcagattattccgagtaagttggaattttgtttgttatctccacatatttggtcagatctgaaatttgaaagaaatcttctcgaacttgttgaagaagttgtttcaatctatatcccaccattcaacctcatgacagtaatatcagacacctcgtcattatgttgagctacatatatatgaactaaatgttgtcataaagatgtcatgtcataacattttctcattttttgtcatatttgataatgctaatttatcttatggtgtcaaccgagtttctctctttctctgtcatttttaaataaaaaatcaaccgtctttgttacctaaattttaacgataattattcataatgcaaggaaactttcatcaactaaatttattaccactttttacgccttactaattcctttttcttttttggaattggtactcagttagatatcatccaacccaagtatataaaacctaagttcaaaaaaagaaccacgcaagatgttgttttattgtccataatgcatccacttatcgtttaacataaacaattttaacaattttggtttagaaatatttcccaagatagattcctaacacgatcttacatgtatgttccttatcttctatcgccaccaccacttccctagatttattagctcgtgacacttttagggcacattgatgatgcattcgtcaaaaccgacgaataacaattcataataatttatttttaagtacaatatgatttgtttcccaccaaatcgtctgaaacctccaaaatcataatcattgtctattttctcgtaatatttttgcaatttaaaaccaacagagccaccacatgcactcaattattgatagtttcacacttatactggatttaggtttcagtctaaattttaatgctacaaaattaaaaattacttgggagtgtatagctactaaaacatgtatttttgtcgccgttccttcttctttatgcccaaaaatttacttcaattaaggtcttacaattcataaccaatatgaaagagcacaaaattctacgcaaacaacatcatacaaaaacacatgttttacgacttatcgaagatataaagcagaaacataccgacaacgagataagttttcacaattgcaaaagttaaaaaaataaatagaaagaaacgccgtgaaaagtagtaaccaaccctaaccgttactgatagctcaaagtttacaatgttaaaaaatatgatagaattagatgcatcaggttattatttaatattgaaaagatatagggttaattgaatatattttttgttggaaaatatgaagattaacaaaataaaaatataagtttaatgtattcacatattgttcttcaaaaatttacattcttttttttctacagattttcttttcatattcatatattgttttccaaaagtttacatttctatgttttacatatatatttttttctttcataaatatcttaatctatataatatataatttaataatattaattaacgtgatgtcaaaaatatcaatagtgattcgattaatcgggattgttcacttataaaaataggatagattaatcaaaattgtgagattaatatgaattatttaatgtattataataactaaatttatatacatcttgcttccatatattgtcatcatttctcatatttattacaattcattttctttcaatattttgtttttaatataaaaagcgtaaattttaaaaatatcatttaatgagatacttattgtgattaaatattgattgtaattatctatgaagcactaataaatttagagagactaataataaattatttattttcgtttataaatttaataaaatagaaatttatattttgataatgtttatattatttggtgacaaaacatttagaaacttttccatattttaaaatattttttttattttcatatattggtttttttctattttacaaaaaatttaaaaaatagaaaaagaataatttaataaatgttaattagcgagatggctaatctcgattggttgtttaaaatctatgtggatgctctaagaagcaaataatctcgacttttttaagagtatagactaggttattaacccccgctatgcgaggtttgttgttatcgattgtcttaatatatgttttttgtttagtaatcattttagtagctaattagctatacattgacatatgattaggagtgtcaaaatgggtaagtcaactcaactcaacttataatcaaatgagtttagggtaacaaaatgagttgggtcaacccataactcatttaatttgatgggttgagttgttaaatgggttaacccatttaagtaataatttaattaattattattacaaaacataataaataattatcattattaattcattatcatcaaacttaggatatttacgtattacactttttatggatttacgtttttgacgataaaatcatggatttacgttttttgcgggaaaattacggatttacgtttctggcgggaaaattacgggtttaagtttttggcaggaaaatctcgggtatacgtttttggcgggaaaatcacggatttacgtttttggcgagaaaatcacggatttacgtttttggcgggaaaatcacgggtttacgtttttggcgggaaaatcacgggttttcgttttttggcgagaaaattacgagtttacgtttttggcgggaaaatcacgggatttacatttttggcgggaaaattacgggtttacgtttttggcggggaaattatggatttacgtttttggcgggaaaatctcgggtttacgtttttggtgggaaaattacgggtttacgtttttggcgagaaaattatggatttacgtttttggcgggaaaatctcgggtttacgtttttggcgggaaaatctcgggtttacgtttttggcgggaaaatctcgtgtttacgtttttggcgggaaaatctcgggtttacgttttttgcgagaaaatcacgggtttacttttttttgcgggaaaatcacggatttatgttttttggtggaaaaattacgagtttactttttctcaatttcattgcttgtatatttaagaaatttggaaaaatattaattttattaaattggtttagatgtgttggttaaacctaaattggcattggtttagagattttagttggttttattcaattttacaaaatttgatgggttaattggataaaccatggaaaccattaaccattacaacctaactcattttactcatcaaaccaattgactcatcaactcatttgactcatcaactcatttgagtcaaaaatttcaactcattagggttcatgggttgagttgagttgagttgacccatgaattttgacccattttgacacccctacatatgatcataagttaataatcaaaaattactattgataactttttaacggaattgttttgtaagtttcatttacgttatttatataaaaaaacataatgcaaaagtactaatgtatagttatttttatttttaataatgcaaaaatattactgtaatactttttcattcttatcaatattttttcttatattcaattagccaccaacacctacatttcatatttctcttcacattcattattttcttgctcttgtattccttcttatcatcttcattgccaatttttcattgacattgtcatcgttactttgtatgtatgatttttgaacatttaatgtgaatcccaaccgactataggactatcaagaagttttcaaactttttaaaaaagatcttgaacctttaaagcaaatcccaaccgactatagaaccatagtcctcttccttgttgatgaagctcttctcgtgccggcgaaaatctaggccataaaagcctcttcaacatcacctagtatattgaccgtgaccatctttttgaccattgctttgtgaatgaaccgtcgataaaccgtgttatcacttacgccaaatttttccctagtgtttgtttccaaactctcacgaatccttatcgaacttttttatatatcactttgtagcattggaaagtatctttgtatgctttgtcttaaacttagacatccttgttctcttggtttttttgaaccttgcttgacttaaatgaagttaaaaatttgtagttaaaaatagaaaattttactaatttgagttcgattaatcatagtctagataatttgaaaaaaattaaaataaattttgaaaatactatatgtttattttttaaaaataatttactaaattgataagtgatattagattagttttttttttcttttttaaattttgaaaacctcacaattattaaattgaaagattcaaaatgcaatgttagtttttaaaagtttaatcacccaaacggataattgacccgaacgactaattcaggtcgtatacgggtacagtcaaataacccgacccgaaatgctcaacggatctgcacggacgttcgcatcgacgattcacggctttcgcgaatcgcatcacgagccttccttctctcctacgcctctttcatcaacccttctctgcgaatccaattctggtatttcacgattctctttcgactacgcccaatcgcaattccagccgtacgaattttatatattgattatgatcttgatccttaccttttcgtcgtttccttgatcgaatttatgttgatttatgctgcgaaatcaaaattatggatacagagtaattttgtatatatggatgtgtaggagctaaaattagcaaacaatacgtaaagtaattgaaatcgaaatcataaacgtttaaggaaagaggtttttactaagtctctgaataatctgattgatagcttgtggtcaatggatcagataaaagtttgtaaagaatgacaaagaaaatgagaagagtgggcaagtacgaggttggtcgcacaataggtgaaggaacctttgctaaggttaagtttgcgaggaacacagacactggtgataatgtagccatcaaaattatggctaagagtacaatacttaagaacagaatggttgatcaggtatgttctggattgttttttacatggaaactaaggttgttgcgtcaatggtatgatctttgatttcgtttaaagctcttttacagataaaaagagagatatctataatgaagattgttcgtcacccgaacatagtgaggttgtatgaggtatgtttgtttgtttccatgcatctgcgaaattttatctctgaagtgtttttgcatcattgttcttctgttgtttttttgtgattttcccgatgtaggtgttggcgagtccttcgaaaatatatatagttttggagtttgtgacaggaggagagctctttgatagaattgtacggaacttccatacttgtaggcagcgtccattagttaaaacctctctacttaattttttaatatatgaaatctttcatgcaggttcataaagggaggcttgaagaaagtgagtctcggaaatactttcaacagcttgtagatgctgttgctcattgtcactgcaagggtgtttaccaccgtgacctaaaggtaaagacgtgtttttgtttaccaatattcctcagaatatctcactgcgttgcaatccagacttgatatttttgtgtcgctatgttatgttatctagccagaaaatcttttactcgatacaaatggaaatctgaaggtttcggatttcggactcagtgcattgcctcaggaagtaagtgctcttatctctgcttcagcagtctgcttacgtggtcattaacttgttatatactcaatcagggagtagaacttctgcgtaccacatgtggaactccgaactatgtagctccagaggtacttagtggacagggttacgatggttcagcagctgatatttggtcttgcggggttattcttttcgttatattggctggatatttacctttttccgagacggatcttccagggttgtacagaaaagtaagtaacatatctttcgggaagaaatcatgaattccttgtcatggcttttgtcaaaccgtttattgatttggttttgcaatttcacccttagttttgagcttttacacattgttatttacagataaatgcagcagagttttcttgtccaccgtggttttccgcagaagtgaagtttttaatacataggatacttgaccccaatcccaaaacagtgagtattttgctttgttctctcctagctatcaggttttggtgatatttaatgttctagtaattatatctgtttatctattattgtttctcaattagagcagcgtattcaaattcaaggaatcaagaaagatccttggttcagattaaattatgtgcctatacgagcaagggaagaagaagaagtgaatttggatgatattcgtgcagtttttgatggaattgaggtttgtgcttcgccttcattatatgctctttgctggtcaattccatttaaatgttaagatctcttaggaacgtttggatgaccaagaagaagtgtttgctacaggatagaacaaaatagtaggcatgtgttagttaccaaacctgtaaactgcttctttattcaattcgccaaaccatagaccttaggaagacttagatttacaagagaattctctattctcgaccaaaaaccctagacaaaatccagaatacccctagggctaattacaatgttcatgtacctatcaatatatatctcctgctaagattgtcttagctttggtatagcctagatatatatagataccgtaatttctaatgcatatttagaatgttttacttaaactcaggctcttgctcttctaaaacttgtacttcaattgttaaactaaaacctcagtatctgtcttagctaaagttacttttacttgtttttcattaagttgacctgtcaattgcacttgttcacagggcagttatgtagcggagaatgtagagagaaatgatgaagggcccctgatgatgaatgcctttgagatgattaccttatcacaaggcttaaatttatctgcactatttgacaggcgacaggtagtacctgattttctattactggtcatagagatctccatttcgaataaaagaatgtcggtagcatctattcttcagactgcccgttttgactgccttatgatgctgtgttcttagtttgttataataactataagttcattagatgattggttgcatggcattagtagatacaaatggaatccaaaatgttcctgcatattgatggctgatcctttgatctcgcaggattttgttaaaaggcaaacccgttttgtttctcgaagggaacctagtgagataattgctaacattgaggctgtagcgaactcaatgggttttaagtctcatacacgaaacttcaaggtaacgaattcctagcatattacacttatcacagagattatgcattattttaaaactctcaactgttaaacgcatgtgtagatagattgataagattgacaaggaaacttagtttatatctctggcgttcaaaaacgaaagtcctagtgtgaattatcatttttaatgttagcagagagtacaattgttatgatttgttacgtctatgtgctcaacagacaaggctcgagggattatcttcgatcaaggccggacagttagctgttgtgatagaggtaattattgcttgttgtgattgtaatataagtttgctttgcttcagtttaagggtatctagcaaattgaaattaacctacatgcagatttacgaggtggcaccatcgcttttcatggtagacgtaagaaaggctgctggtgaaactcttgaatatcacaaggtttataaatatatatccaataacaatagttgcatcattactgtgttgcggattagagtgatattttgttttgtggtatcgcagttctacaagaagctatgttcgaaactggaaaacataatatggagggcaacagaaggaataccaaagtcagagattctcagaacaatcacgttttgatcccaacttaaatccaataaaaatgtacacttgtgtaataaatgacctaattattcttcagggagattggaagatttgcttcttgagctagtattctaatttgattgtgtcttgtagtttgctttggccattggtttggatccctctgttctctgtgtatggcaatacttctcaaaacttgtcctgcgaagacatgtactaacaaaacacatccaatatgagtttgcttactagactacatgagctttatgcctttatttagtcaagactatacgagtttaagctaggcagagcatttggtttggattctttcgatagggttttgtcgggtttttttttgggattagagaaattctacccaaattaattaaactaaattatggttctttttggttatattttactatataaaccttgatttttaaagtcgctaactcatatgatcatgatacatgtaatatcatttcataacacaaacatcaattcatacataacacaagtctcaatctaatactcaaattaatatcgttatttttgttggtgtcgaatctcgaactatgtgttcggatccatccgaagcttgccacctaaaagtcaacaagacaacggtcaacgggacatgctctcgaccgaagcccatagttgaagccgagcgaaccgaagagtttgtacaacggagcgaaaaggagatgagtttgagaatgggtaacgggccgagcattcggaggcccatgaagggttcaaaggaattcaaatgaagacgttacaacattgattagagaatcaaagcgaacacttttaagagcgcttagtacattaattaacaaattaatgtaaattataaatatgagtcccttaaagcataagggggtacattgatttctttctaaatatctaatattatactattttatcttcatatctttgcatgcattttgataatatatacaaagtacagtatatacacttgtattatttttttaaaaactagatgaacatacatgcatgggtttttgtttttaaaattgttggaaaaaattttggttatggttttttgttgattttgatattcatttttttttttccttctaaaacctttattagtgacgagtgtcataatcattgtttacaagagacatcaaaaatacaggacaagaatgatacaaaagaccagagatttggacctaaaatagcttttttcgctaatagatcggcacaggcattttgttcacgatgggtgaaacagaatttcgagtttatgaaaccacttctccaatgttgtattgtccccatgtagtgtttgagtcgaagatgagcaccgtacgtattaataacttggttgatggttttattatccccttcgaatattacgtttcggtatcctaatccccacgcagcctgtattgcccagataagtgatgtacattcagcttcttctatcgtatttcgtccttcaaattgtcccataccacagtccaacacaaagccattggaatcacgaattatccaaccaagtcctgaggctccagctccttcatgatgcgacgcatcataattacatttcacccatcccctaggtggtggtagccagttatctcttcttgttctctgtgtgtgaggagccggaattgtgttcacttgtttaatgacattctcaatccactcctgagtgtccgttgttgccagttcgagcgtctcccgtgccggaataagctttttgttgaatattagatcattacggcatttccataatctccacataatccaaaaagggaggtacctgtgtaattcatcgacattcctatcgtcgtgaatcctaaagaggtaccttaatttgtcttccaggggtgtttgcgagttacatggtatggtggtgtctaggcaagtggtcctccataccgcttccgcatgcggacaggaaaaaaagatgtgattccctgtttcagcttccgtgcaacagtgtgcacggtatggattgatgatgatgttccgtcgccttaggttatcggcaaccccgagagcaagcgaagctgtcctccacaagaaatgcttcaatttggggacaatgtttagtttccataaacggtcggcaatatcagggtgtgaagatagcggcagagtgataggtggctcacttgtgctctttgttgctgctacccaatatcctgatttgacagtgtagcagcaatcctttgtaaagctccacacatatgagtcatgtgctggtataaggggtacatatattttccggataattggatggtcaatcggatcgattagtgcggtgagtttctgttcatctcattgagatgtagtcggacagagtaaagccaaaaccgttgttttcgggtccgtcgttgctaataacagaggtggccggggtagagtggttggtagtcacggctcattgcccacttgggttgtgtaaccatctccaatgttcttctgtgtcccgagattcaacaattcacatccaaaccgaagggaactccatccataagacggtctcgtgcctcgtgacgcactaaggaaattcccatgtcgaaagtatctggctttaagcattctatagagcagactttgtggtctttgtagcagtttccatacctggcttgcaagtagtgcttggttgaattggtacaggtctcggaatcctaaacccccttctctctttggtcttgtcatttttttccaggaaacccatgacagtttcttttttgttgccgtagtgccccaccaaaatctcgttatcatactattgaggtcggagcaaagttccattgggagcgcaaatacattcatcgagtagaccggcatcgcaaaagctactgatttaatgagggtctctttccctgcagcagtgagaaacttattttgccaaccatttattttcttacggacagattcggaaatgtattggagcatttcttttttctttcgaccaaattgcttgggaagtcccaaatattttcccccgcccccaatatttggtatttgtagagtctgcattgcatgatcccttgttttttggtagacacgactcccaaatgttattgatgatttatcaaagtttataatctgacctgacgcttccccatactctttaaaaatgttaagaagattgaggctatttttgcgatccgcttttaggaaaaatagagaatcatcagcgaagagtaaatgggatatggagggaccaccattactaacttggattcctattattttccccgtctgttgtgcgttagtcatcatggaacttaagacatcggagcatagtatgaagaggtatggtgatagaggatctccttgtcgcagacctcgggaaggtgaaaacttcccgtatggacttccattgatcaataccgagaaggaaacagaacggacacaatccatgatccattggatccagcgagttgcaaatccctttttttttagaacttcttccaagaaactccattcgatccgatcgtacgccttactaatatctgttttgaccgccatatactcgtttgcacatcgtttcttaactcgtagtgaatggaaaacctcatgggcgatgaacacattgtcagttatatgacgtccaggtatgaaagcagcttgattttcagagacaaccgacgagagaactgcttttaacctctgtaccaatattttggagattatcttgtagagaacattgcataaactgattggtcgaaagtccttcattgtctttgggtgttcgatctttggtattaaacagaggtttgtatgattccatggagtttccatctgtcccgtttcaaagatttttttcacttctttcgttatctcagggccaacaatatcccaatattgacgataaaaagatactgtgaacccgtatggtcccggagctctggttgccccaattgcaaacaaggcagaacgtatttcctttgtagtaatatccgtcaacagaagctcgtttgtagcaggtgacaccaccagttggatatgttgcagaattgctgtcaagtctcgatgattagaactactaaacagttccccaaaatatttctcagctttagccgcgatgtttccattaccatagatgtcgctaccatctgaatcttggattgagagtagacgatttcgagctatgcggttctttgtagaagcatggaaaaaacgggtgttaatgtctccttcattaagccattgtattcggcttttcagtttccaatacatttcttcttcacgataggaaagtagtagttcccttctgagattacggagatgatcatttgaaacagagaagtcagtgcttgcgttatcaatggtcacagtcagctccgccatccgtttagcagaatttgtgttgtttgttctcttccaacttgatatatgagatctgcagtttcggattcgttctacaacagagcatctagaagcgggtatatggttccaaccatattcgacaatcgactcaaactcaggtctgttacacaatctggagtcaaaacgaaagcagcgtgtaccttgttctgttgttttgcggatcttaatgatagcaggtcgatggtctgaatcaattaactccaagtactcaacctcagaagcagggacacttgttttccattgatcattggccattgctctatcaagccagcattccaaataatgagttttccttttgccaacccaagtcatattgtttcctgtgaatggaagatctgatactttgcatgtgttaaccatatttcgaaaatccacaaaactccaattttgacgaacacgaccaccccttttttcactggcatcgagtatttcattgaagtccccacacattaaccaaggcccttgtctatgtattgtgattctctcaattctttcccatagaatatgtcttaactttctgatcgaatggccataggcacaagagaaacaaaaagaagcttctttattacttatcttacaatcaatgagtcttgcatcaaacgaaaagaaattaactgatacagacttcttccacatcaaagctaaaccaccgcctatgcccaaaggcgacacacacttcacattatcataatccaactgagctgccacatcccgaacaacgtcatccggattctttgtctcaatcaaagagagtaagtccggggaataagatttcttaatccctttgaggcgtcgaactaccagggacccttttaagccccggtagttccaaaacgctgtattcatggcggctccggtggcttctggcccaccgtgccctctcggtaagtgtgtggggtggttgaagtggttctcccattgttgttgcgtactgtacccgatattttatgtggtgccatgaaccagttccagacttctagcacttctgattctctcctctgtcttttggcaacgcagtgttgggtatcctctgttgcataggcttggcgcatatcacaacacaccaaaggaaagctatagtcggtctgagaagtagaagcgttggttttcctctttttggaagcattatggtgctcttcttcagtgttctcatcgggaaattgctgattcattggatcgtgtggcagattgggatggacatctggtacatcgggatggtcatcatcagcatcattatcaacatcgtcatcatcatcaccaggctgaggaggatcctgatttccagaggttggacatttagcagcatcatgattcaacattccacatgtggtacagaaattcctgagtttctcatatcaaaacttcaagacacatgtctcttctctaaactggaaaatcctctgaaagcgtaacgggtcctcgatgttccagaggattatgacccgtacgtagtctgtgaggaccacgccatctctaccaaagtctgtctcaaggaacaatcccatacgctcaccaattgaaatgatcattttcaaggtgaggaatcgaagtgggattcctctgatctgaatccagaaagggattcttttgaattcaacaaccgtatgcaaagcagtccatcgttgaatgacacacatccaatcgttgaaagaccaaggccctcgccggagaattgaggacatggattcttcagattggaaaaggaattgaattttttgattctccagaattctgcctaccacctcttcacctacgccccagaggcgaggcaaagcactcagcattgcccgaagattttgtttccttgggttcaccggttttgcaatgaaactaaattgagtttcctgaagagcctcatcacaaattttaatcgggagattgattgcttcctcttgtattcctaacgcaatatcttgcagttgtcgttggagattatctgccattgtcaatatgaacaaaggaatttgtgtactttcactctgatcaacccaacgagaacagagacatgcgcagggtataaataggtttggttgagaagcagttatggggtccacaaccgttctaccgttattcatccctgaagtaaccgccggaaactggcgaagaaaactctcggcgagcgagagacagccgtaggaatcgaagagatgcaatcgttcgtcgtatcgcctctcttctctcatttgattttgatttagagagagagagatttttcttgatattcattttttgtgtgtattattatgtaattaataattttatatctattttatataattataattttttattttttttagaatgagggagactagtctcccatattattaaaaaacaaaataaaaaaattacacacgaacattccgtgggcgcgtagcactactagcatcctcaaaaataatcgaagtagcaaaatcaggcctaaggggaaaactatgaaaccccaaaggtaacaaaaaagcatggtttgctaattcatctgcgagacgattagcttccctatacacatgagtaattcggacaatctagtccttcgaaatgaagccataacataaacgtactaggaaagacagagaatgcgaatcgctaatccatgttttaagaaaacccaccaccatatctgaatccacttccagctacacccgcgtagcctttttctcccaagctatgaaaagcccgtaatacacacctcataacttaactaaaggagccgaacaaactccgagattcccgcaaaaccaccacaccaaataccctcattatcccgtaaaacaccaccagctattgctaaacccggatttccacgtgatgcgccatccgtgtttaacttcagccaaccatctcctggcggaactcatgctatttgtctctccaccctagttacattacctcgattactcccaagcagcgagtgagcctccaccacctctttcgctgaatcctttaggaaacgaactctatctcgacatttcctattctccccaaacacatttctgcagcgccgtttccaaccccaccatgctgccaaagcgaataaagtagcccacggataacctccgacaagttcttgttctcccaaattactgtatacccattcaagcaatgattgtgtaaagaacacatataaccgcctagggggaagcaagcgactccaaatgcttgccatcgcctgacaatctctcaagacatgtaaaatagtctcttcgccactcttacatacttgacataaatttgtgtcacaaatatttcttctctttctttccacattggtcataatatcttggttaaccactaaccagagaaaaatcctcacacgttcttgtaccacaactctctagactcgctcaaacatcctccatgattgttgacgtggtacttcatctctcgtaaggattgagtgtgctgacctcacggtgaagcgaccatctggactatcactccaagataagcgatctcgagcacctgtcacaacatctaccacaacagtagacaacatcaatcttatagattctggaatatatggcaatacttttgataggtccattgtatcaagccaattgtttctagaagtttgaagaagttggacgaaatcttgaaaataataataattgttgttagacaaaggaagaagagggaagattagagaattatataacttgatctgtctaaatcttattgacatttaccttcgtttgcgtgagcatgatgagcaacattctacaaattgttcatcatcttgcaataatatttgtgttgcaagaactaaaggtgttttgtaagaactaaaggtgttttgaaagatttaaaggtgttttgaaagatttaagtgtgatgatatgattttcttgcataggttggcgtattatttatacccattagggtaacacgttctctcgtatagagatgatgaggtctctttcatctttttcagatggataatacgtcaaaagttgttggttattacatgtattaaacacatcatccgcactaatgtgagcaagttattcacacttaccttttgtttttttggtgggggtaaattcttacaaattaacttgatggaatgaaaaaataatttctacctactatattttatatatacaagataaacttaaaaaaaaaaaaaattgtacatacttaattgcatgattgaccattaggcatttagccttgacgaaaagaaagaacaaaacaaaaacaagtaataatatttttccattagcaataaaacaatcatactgcatgttttcgtagctacatatctctgactctgttctcaataagctcccaaccacttatctgtccaaaaacgaatattagaaccatcgccaatcacccatcctaaacctggtaggattacttcacgtaaaccagcccctacactacgccatgtggaagaccaattgctttttaccactgtccacgacttatcatgtggatctccaaccttatatttgcttctcaaaacctttgcccaaaggctgtccttatcctgtaaaagtcgccatccaacttttgacaataatgctttattcatagatttttctgaccgaatacctaatcctccttccatctttggtctgcaaactcttttccaagctagtagatgttgcttcctttgtcctgtatgacttctccacacaaaatctcttgacactctatccaaacttttagttatagcccccggtaatgcaatcgtactcatcgaatggactggaatagatgctagcaccgatctggtgagagtgactctgcctgccatactcaaaaatctccctttccatcccactaaccttaatgagatcttctctaacacatctccataggtgtctttattaatccgcttatggagaatgggcattcctagatactttcccaactctctcgtcgcttgaataccactttcatcactcatcaacttaaccaagtctcgatgcacattatctgaaaaaaaaaatttcgatttttccagacttactttctgacttgataccacacaaaatcgctgcaagattctctggattatccttatttgtgccatagaggcctcaacaaataggataagatcatctacaaagcacatgtgcaatatttttggtcccccctcgataggcttattggtttccattctttcttagcaatagagacatcaataagctgacataaccgttccatacacataataagtatgaagacaaaggatcaccttggcggagtcctcttgaaggcttaaaaggctccgtcttttcaccgttccacaaaacgctcattgaaggaccctttacacattgcattatccaagtaatccatttcaccggaagacatgatgcctctagagtatcctccagaaaatcctatctcattctaagctttctccaaatcaagcttcaagagcatccagcccgtgagccctttctttgtctcatcgaatgaacagcttcttgaacaaccactatattataagtgcttaatctgcgtggtataaagctagactgcgctggaccaatcagttttagcatcactttctttaatctcatcaccatggccttagtgatcaccttaaacaacacattacataggcttatcggcctaaactgtgttatcttctccggctttcccactttgggtatcaacactactaaggcataattcatctcgtctactaaaaccgaagtctcaaagaagtccaacacaaacttgaccaccgaaggcttatcggcctaaactgtgttatcttctcataccgcggacagctccttccacttatgcagctgagaattgtttgttcaactcccttaaatcatcccttgatagtctcacaaatccttcattaggcaacttatccaccacctcatctatgtctgccataaagtaaaagcgtttgtaatagtctactgcaagcttgtcaaggtcatgtgcattcacaacccatctatcctcattatcttttaacgcttctattcgattcctgcatctcctaataatggtagaagtatgaaaatacttcgtgttccgatcacccagctcaacccacttctctctcgatttctggaaccagagcacttcttcctactcaaggaccaaatcaaattccctcattagcaagttttgtttttccaacagagtatctgtctaattcacttctaacaggtcttggacaaccttgatttcctactgtaacatatcttttctcttttgcacatctccaaaaacatcacgattccactgcttcagctttacccgtaagattcctagggcctctgggttctcaactcaccctgctaagacgacaccaacaaatctttaaaactggtatgtgttagccaggtcgcctcaaatctgaaaggatgtcaacttggatttcctcttgtcactggacataattgcacataaagaggtgcgtgatctgacggggagaaagggagatgattaactactgcttcctgccatcttaatcgcaaatgggctgagcatagaactctatccaacctctgagcaatgtaagtctgttctgctcgacctcttctccatgtgtatttgtttcgtttgaatcccatatcgacaaggccaactcgttaatccagctcctaaactctagagaatctaacgacaattgaccattaccacatgttcgctcatccaacctaacgatggtgttaaaatctcctccaatacaacacttgtccatcaattctttggataacctctcgaggttgaccccatagaccacttcgtcgactcgccaaaggagccgcgtatactgcaattaggttgagcacatcgccctcattcaccaccttaacatgaataaattgcttagccgattcaactatctccacctcgcctagtcccgatctccacattaaccacagtccaccactctgatccactgcgtctacttgataagaattctcaaagcctaagccatgataaattcttctcgccctatcaccacctgcgtgagtttcaaaaatagcgagaatgtttgtgctaaacttcttcagaatataacaaatcgacctgcggaaagtgggtttattgccccccccccccccccccccggcaattccagaatagacaattcattgataaattccaaaacaagattagaacccaccaccaccaccttctcctctagattctcgagcatgagtactctgccattcgacccaataccatctggatccggttgcgaaatctgatctccttccactccatcacgatgcgttttgaccctaaccatatgctgtccattttcactcgtgaatctacctcctagtttgctcaagctcaccccctcgactctcaatctttttcccgagaagaccaattcactttctcttcgtgttgggccatacaccagacctctggtcgggcgattaattttaacttgttttaattttggcctattcggcccattctgtttacctgagcccatccctttcactttcggcccatctctggccctacttttaccattatccaacgacccaactgtccttccacctatgtcttgtgctgcacgtttaccatttcctctgtgagctccagcgttaaaaattttcatatctgctcctgattgaatattcacttccctcaagtccggaataatcaaatcttcctctaatcctccaaaactattagataaggcaatattctcttgaacgtttatttttgggattttcttaagaaatcttcccgaattgccacctgagcttcccgttgtaactacctagttttttactagagcagccatcctactcgccgatcttcttaccgtcgtaaaaccatcttcatcatgcactccacccttatatatctcaacaccattttttttaggtacctccgcattattcgatggcatcgctctgctttcctcatggactctctgggaacatatgtgaatcaaatgtccatacatcccacaacccgaacatatattcgttagtccctcataagcaacataatacctttcaccgttcaccattatcgtcccttttaaaggcttagatagattcacctctacacatactcttgcaaatcttcccctttcaaattataaggtcgttaagttcaccttaatcggtttccctaacccctttgcgatacccatcaagatggacttatgatacaagttcaccggaatgtttgattacctaacccagacaggtgtagtgatgatatcattcctcataggatcaaattccggcgcccacgcttgtacggtaagctagctcccaaacactctccatggacctccagtcaaggctgccaagtactcttcctccaactcaaagcggatcataaaacactgacgaagaagatccatcacatacataacccctcttggtttccacagttccctcaacttcctattcaacaccgcaatcgacatgctttttccaaggacttttactatcatatactgcccccagaaaccgttcatcgcctccagaacctcttctccgatagtaacctctggttccccaccttctccatcacgaaactcaagttgcatccttgccgagacaaactcatcatccaaaatcccaccaacagcactaccaaccacctttcaaacccacgaaccaataatgtttggtgggtcccccggaggtctccccctatccccgatatccaccatgttcgtatcctacacaccagtgaccgtaaacctaggggcaccgctcatctctttttttggattcggaaaattagtctgattagttcattataattttttaggattaaattcatctataactcgaaatatcagttttactataatatgaatatttctatatttattatcctaatttttcactatcatgaacacatacaacaataatatataatatattttgataaaatgtatgtaattatgttacttatgtggtttgaaacttgtctaacttaattgtaacaaataattcattcttcatctagtacaccaaccgcatcctaatatgctagtaatttaagtcaacatagatctctttctttgcatatagccatatagagtctcgtttttttttgggtatgtttaatgttttgaggaccattacatgtaaaaaaaactgtatattaatgttaccaagttatcagaacgcacaaaaatgaaaagaaagaaggttatacgataagttatattcacaaaacataactattaaaaactatccaagtaaaattactaaattaatatgacgttaggtagcaaatatctaaaatacaacccaagtaaattcttagccattatggagtaatgattattgataaaaaaaattttaataaaataagtagagtagaatgaaagtagtgcttgatagattattatgattttttatttcttaaatgtttttagaaaatcatttaagagtgagattaatacataatttaacacaacaaaaagacttttaattttttatcatatagttttgttaatctttttacttaattactgtagaatgacacatgtcattttcttgtgtgataatgtgtcactcatatggagagagttggtcaacctttatatatacaaggttctttttttgttaaagggtattcaatgttataaataaggcccaatgggctatttccggatttaggcccatacattttttctttaggcccaatccacttacatttaaccagactaaaccatctattacaaaaccgactaggttttaccaaaccaatctaaaccggaatctgaaaaccctaatctcagatcgtaaaacacgatctgagctgccatccaagaattgcagaatctcgccggaacagaaaacctccggtgagcctagacgacgcgcgccgaacgaagatggtgatccaggatcgttgccatcccgccaccgtaaagcaattttgaggaggaagaagcaatccgagttgtcatcatcgtgaaactcttagctcagtcatgagagttgatgccagtagagagtagatctgaggaccatcgacggtggtatagcctcaccggaccggagtcgacctcccccgcgaagcagcgatccaatgaaacctcctgaatctctagtcttccaatctaactcccgtcaacccttgttcttcaccgtgaagtcttacccttcctctccgcgaagctacaccgccaatatagctcttaccagcggtgtctcgtggaatcttctccccttcactgctccctttattttgaatggattgatttgccgagaatatgtagcggatcacagttgaagcgccatgaaccacagggtctcttcatcgccggaatcaacgaagaaacacatcgacagagcaagagtttgtgatcagaagaagaagaagagttgagagagaaatcgccagcgcgtagatctcactcgcgcgactctctccaattttacaagtgttattattttattatatatatgaggttagtggtataatttttgttatagttttgttaccaatcaatgtaaaaaatatgatatgtagaacctagaatgatgtcttgaagtaataataaaggataatcacatagagagctatacattcatcaacaaccattatataaagtgttatattggtgatatggtgtccacatcaacatccatcatccatgtcatcatgatttattcttttgtgggctccatatattttatttattaagacaaaaacattaaaactagaactaattcacacattaaataaaacaataattttaaaaaaattaagaaaatattatgaaaaaacgaaaaataaataaatatacaacttaaaatatgaaacttttgaatagatattaaataaatataaattagatcattatattttaaaatataatgactaaatattttaaaatagttggagatatggaaaaagaaacttatcatatattttaatggtacaaatttattttttaagagttacaattatttagtagagtaaataaaataagagttaaaaataccaaatttgaaggtttttatttaaaatagaaagcaattcatttctgaaaaatagacatttaaaatttgagtaccgattaaaaaaaagaagaatttagaacatattattatttatgattatattataatataagtagttacattaataaagtttctatattattaatgttttctaaattaaaaagtgaacacctaaaagagaaaaattaaatattatttagtttttttaagaaattaacatagattgaaaaaaactaaggtgatttgaaataaaacaaaaactatcctaaacatcacaagtaaaaataaaataatcttatcgaacaataaaactgtgtaataataatatttaagaatgctatttggaaactagaatcttaatggtagattgaaaagtttttcattagaaataaaagcattttttttaaaaaaaatgtattttaaaattagaataatatttatgagttcgttagtgtcatattttagaaaatcaatattaagaatactatctaaaatcataatatacgttaaattatatatgtcgaaagagatttttgattttccaatggtcaagataaagtacaaaatttcactttgaaatcctatgtaattgtgaatacgaaagagtccatatatgagatttgtttctataaagcaattttagatgcagcaaaacatggtaaaaaaaaacttatgacaaacatctcctcagatttctgtttctgatgttcattataataaaaggatcatgaaacttatttaaaaaaatgagtattgaatgatatcaaggagaaaatagatacgatctaaggagaaaagagagacgatgtcgggagacgacgagtgaatcataaaagataacgagaaaatttttaatgaaaaatgtgagaaactttttactactttaaaaagataatgcacatgggtaaactaaaatcttctaaaattcaaatgattatatttatactcaaagaataaaaaaaaatttaaatcccgcacaactcgcgggtacaccatctagtatctataaaatagaataaaaagttcagctcgatttggttctttacatgtctcttcttcctaaatgtacaattgcaacaagtagttgtggaataggttttaccttagccttatcagtgaactgcatttccacaaattctttccattgatcttcaggaaggtttttcccaaacaagctctacgaaactgacatttgacattctgttctttcaacatgtgttatttttcattttgaattttaatacaataaatgtttattcaattctttttataaaaatagacacaataaaatatattgtgatattttaaattattatattaattcacatgaacaaatttatttatattattccaaaaatttacattcttaataatgttctaaagttttaaaattttctaagaaataatacattaattctccagaataatttattgagcttattcagaaaaaaattcaataatattaacaatggtaaacggttaaaacccgttaattgtaaatgaatgtttaaataatccatgtcatgtgtcataaactcataatatcttacatttacattatcaatgcattttacgttaagaaaaacaaattaaaacataattaatgcattttcacgttaagaagaaaaatcaatgcattttcttatgtgaaagttacattttaattcacacaaatttattatcagttaccataacaaatatttacaataccacgaatctcaaatgactatataataatgttccatttcaccaatagaagaatctcctttcatttggtcatcacttggaataaaagcctacacttgctccctacactagcctacacttgctcggaacccatatacgaaatataagagtaattgcatgggcaaatccttggatagcgattgatccttgtgaattatacgtataaagtttccttgttttaacacttctaacagttagcaaaaacgactctcgtccccatggaaacttgataaactcgtctagatcactatgcatgtttactacctgaggcaaaataacagtataaatgatcgtgggacacaaaattccttcaaccaggacaagaagggctagcctaaagcgctgcacatcatttagttttacaagttgtctaggtacgagtagcttagtcctcataatcgcttccggcgttggttttcattagtcaaaaacaacgaattccaaatgtctcccatttcgctgctttctgttttctctttttgtgtgcagttcaaaccagttacataagcaaagtcttggatagcatacctcatgggctttccagcaaatgtccaccacagctcaaactcttttttggttaccaactgcctagtcagtatgtgatgcataacccggaccgagttcaaatgatccaccatttgcagtatgcttccaaactgagaattctccaatttcttcaaatgatcatcaattaatacgggtttgatatccttaatccagtggaagacagtgtatgcgttaactttcttcgtcccctctatcgttccaagctcaaatagccgctccgacaattttattggatccatcctgtaaaattagagccatcaggcaattctacccagaaaaagtctcgacttttgttaacaaaaacaacgtatataaaagaccacactcatatagaacagaatatagtggaaatcatttcatagaatggatttcgcgaattccagctaaaatagaatccaaaattcgtcgcatactaacctagaccacacttatatagaccagaattcagtggaatttatttcatacaatggatttggcgaattccgtctaaaataaaatcgaaaattcgtcgcaaactaaccttcgccgctttgtttatcgctttgcgtatccttccctttgcaaaataatttcccccaatttaatttgaaacaacccgacccattttttttaaatataattaaatattcccataaatgactaattaacccaactaataaaataacaattaaaccgcaagtcaaaaatactattttatgaataaataaataattcgaccaacaaaaccaaaaataactaacaatcctaaccgggttccaataaccaaaaaaaccaaaaataaaacaaacgagttcttagatcatcctctcttccttgccatgattccacaatcacactttatcttacctgcattaacaacacaatgagatgcgtaagtattatcataaatatttagtgaggcgatcctcccatctacgagctatacacacaagcaaataaaatggtataatcacaaatacaatacaaacaaaccagtcattaacaattcatccaaaacacattcaccacacctacatatcatcacacagaacaaatcacacaacccaatcgctcagataagctcatggtcacgcactcaccttaacaaattgattctaataacaattaaactcaggagagactctccttgagtctgaaacagtccagaaacgtcctacaacaagtcacaaccaaaaacaacctttgaaacaaactggacacaataaacagaaacaaactacctcaaagacgaaaccctaaaatacaaactaaccgttaactattaaatatctccggtgaaacgttagccctagacgtcacgaagtttccacaaaatatcgtcccgatcggaaaacatacgagaccacgatctcaatttcaatccccgctggtcttaattcgcgtctgagaaaacgtgtctcacgaaattgcgaataactcaaccaattttaatccaaatccaaatcaatctttttatttaattaatgtagaatgacacatgtcatttttttgtgtaatgatgtgtcactcatatggaaagagttgcctaactttcatatatatgattattagaagcataaaagaattaatcaaaataagaattagaaaaaagtaattctaaagtgaaatacacaaaaaaaaaaacttttgacacataaggaattggaacatcaaaacaactggactaaagcactaattagtaaagaccggacattaaaattaatataaacgaaagaaacaaaggcaaatgaatcactaatacaacaaacacaaaacttagaaagtgttcttgagcttggagattttgggagagaatttaaagattttcttttaaggattttttggtgtgtttaaggtaaagagattctcagatttactctttggtatgcgagaacgatcgcggagagcttgagtgggaaacctggctcgtcggaaagatgatggtgggtgatctagtaagtggacatcactttgtcaacaaggccaatgcaatcaaggagccgtacggtgattcatacggttatctgtaacccatcaatcacagtttcaaatcggaccttgataatgagtaagaggatgttttttgtataaattttggacatttaaatcatcaactcaaaatgtcatttacaactagactatgtactagcctagcacatgctaattattatttttattgattaaagtttgtagagtttgacctggaaagtaatggagaatcattagtataaaagttaaattgtatctttttattttttgaaggaaaaaataaattgtgttcattaaagtatctaatattggtattgggtgtagaggtgaacatatttatcgttgttacattataaatttgttccgaaattgtcgatataaacaatttttggatttcaaattgagaacggacatgacgagacaaaaccgaattagatgaattgttatattgtgtatatgtcgtaattaatatattagttgtatatgttatatattagtgtatgtagttaacttagtaaatttgttaattaactaatgtgtttataagtgaatagtttaccagaaagtgcacgacaaaacacataatttggataaaaacttaaccaaaacacagactattgttgttttaatggctcatgtgtattttgagtgttgttaacttcttatctatctcttctcggcaaagtgttacaataatatctcaactagttgaagaaactgatatgatacacatacctttttaatagatagaaaaatagtgataaaaacaatagaaaagagatactagatatctcttctttggagcaagagagccaataataccatgtaattatcattaaattcttgttttttattgttattatcaactaattgaaaatttatttcagcaaaaaataaagtggataataatatgctatatctttagaaaatcttaagactttaaactaatgattttgtgtcaaatgatttgaatatccaaattttagatacacaaaaaacttcatcttactcatcatcaaggtacgatttgaaaccaaaacatcaccttcagataacaaaaaaaaaacgaaaaattatcacatatcacacttaccaataaactttgtttcttattatttgtcaatatccattttacaagttagtcactcttatcaataatgtccatcaagaatcataatccattagaggatatataatttagtaattttcgctccacaagaaaagaacaataatataaaagatactaaaacgaaaaacataaagttacactcacacatatgaaacaattacatataaggctgagttaaatatctatgctcagaaaaagaggaaattaaaaaagtatgcttgataattctgtatttaaatttctctcttcctctacaacaatctctgatgcttttatccctatcaacatcaaatattattaaatatgtaatgatgcggcaacatttaatgcttctgaaaatatctgcataaaatcttggtgtcggcattgggaagggaaaatagaaaaactaattatttacatgacagttatttattgggttgcgagatatcatttatagactttggactatttagtagcacaatattgcagttggaggaacaaaacagatctagtaaactaaaaagcttagcttcagagaagttattacagtttctggggaaacaccaaaaatcagtcaacccgaaaaggtatgagttaaagctctaacgattacatccataaatgtacttcccccgaaaagtcattacatgtcaccagtttcaaatctaaccatgctaacgactatattatcggcgaatatatttgcaggtgcactatggctttcgttgttaggttgatcctaggagaatggaaacaagatgaaaatgggtttttcgaacacgtcggcgagttggaagggtttagcgtgggcgtacgactgagggagcaggatgggtacgcaagcttggtgaatgttgtgaaagaaaaatccagggctggtcgagaagataaagtcgaactgagttatcagtggccacactggatgatggggccagattggaaacaagctaacccgatctacataacaatcgacgaagatatgacattgttcagggcaattagggcggattcgaaggaagttcatctaaaggtgaagattatatgggacgagactgagcacaactttaattcctaccggagtaacatggatttgggagcgttaacatcaaagaaattatccacttcttgcgcattcccaagcttgaatgggacagactctcgggtctccacttcaacatcttcgtcttcgccatcagactcatagtcaatagtctcgcccattacaggtccttcctgaatagctggtgctgcttgtaagacaaccagttgcatcgcgtataacagaccccctggacgacaaaaaaacaagtggcgagttgttcaatatccctctctttaatcgatttaatcatcttcttaaatgacaatataccccatggaaaggcaagaaatgcattgagatcctccgctatttcagcgtgggccttcacaatttttggataatgggatgtcggcagtagaaagccatcgacgagtattaaatacgcacatcccaaccttatatcaggattagaaacaatcttcttcttcagcagggcgattactcggtcaacagtgacatcatcttctaaactaaacaacttgttgtagaaaagttttatcttcccaactgtgcctttcttcttcttctttgttgtcgggaacttaccacaaggtaaaccagtaacaatcttaaactccctcaatgaaaaacggattggggtaccagcaaaaagaagccaaatctcattcggtttctctaccggtagaaaattccaaaattaggagaccacgccgatttgttaggaaaatccaaaagatctccgagagaagaccgcgatagttcatgtcgtttatcatcgtcaagcgcgttgaggatagcacacaacattttcatcttctggtacacattaactcgctcgccgcgaggttcttccttaaaagctatgagacgaaggggaagatcaagcgttcccatctagggaagtaaaaccagaaaccctagttattacaaaatcgatctcgcaaaataaaaaaactttgtaatcaagggttaaactacttaccgagactcaattgattattacaaaaacaaagacatatgaactgaatccttttcgcagtcgctaaaggacgagagaaagagttgaagaattttttttaggaaatatggtagagaagaaggaaaccagcaggtaaatatagcctgaaacaaaaggacgcatcaattaattagattcttttcgtctgacagcataatgccataggagctacaatgaatttcatttaaattgttaaacagtagtgttgaaatagttgaaaagctggagacttaattatggattggtttggccgtttgggcatacccattcatatttgcctacatacaaacacatatatacataaaacctttctaaattgatttttt

SEQ ID NO: 764 - DNA, 87459 bp, Arabidopsis thaliana
gatcttttttaaatgagtttaccttatatatattattattttaaaaaaacttaatgaagtttgttttaattaaatgtaaatactatgttaaattttaatcaaaccaaccataaatttaaacatagaaaatttggatttgaaatagaaaaatatttttatttaggctactgtttaaaatatgaggtggctatataaaaagattaattattcaaaatttagtcttagctttgtttgttttaaaatttaacgaaagataagtcgatatacattttaaaaattaatttatattagagaaatatattgttacgtacgtgatatcacatatgagttattataacataaaacatccataaaacttagttttacagttttgtaaaaatgtttacaacctaatggaattggttccacaattattttaggtataacactaaaacaaaacaaaatgaacagaaaatatgatattttacttttcatcaaaaatatgtgaaaatattatatattctctgaaaagtgtattttactttaattgtatatttttcatcttgacttatctgttttatctacttattatcctagatttctcaagtcaagttcttttattaacctactaatacaatgtgagctatatatactttggataccattatcaaaacctgcattaactgagacagataaagtacggcccaactcggcccaacgtggcccaatacataccttactcctcctttctcatttcctgcgcgtggatattctctgaaaagcgtatcttcttctctctcgcctctctctgaaattaacttcgctagggttttgattttgtgtgtatttcaattcttgcaaaaacattccaattcagcaaaaccccaaaatctgggtaaacaacaattcggttatggattctcgagattcgttatcatccgacgccgttagagatgcgtcgtcactctccgacgacgcagctgttctctctgtaacctctacactcgctaaaaccgctctttcctatttccaatctggaaaattcgaagagtgtatcgacgttttgattcagcttgatcagatgaaacataacgatcccaaggttcagttttttttttcttcctcttctttggattcaatagttttgattttgcctttctacaagtttttgtttgattcttacatgtttagatcgatactatgaataaagaagttaagtttgacttgatatagatttttactaagtttagatctgacttatccgaagttattgattttgtttctgctcaagtagtttcgaagtagagctagggtttattgagcaaagccttcatttttcagtgattggatttagaattataacaagtcatgcttagatttagagctactttccaaagaatgttgagatttttacttttctaggtttgaaagcaatggcttatgaattgtgtttgcaattgatcaaagcaggttctacacaatatggcaattgcagagtacttcaaggatggttgctcgaattccgagaaattggtggaagtgctaaaacgtgtcaaggtatttgtgttgagaattctacttttttagtgttttctcagtttatctgcaagagccatctatctacttttttagtcgtttatgagaacgtttagatgatttcaaattggagttgtcgtttttctatcttttttgttaaatctggactggaccaggacattaccttacggaaaaatactggagaaagtaatgttattagtagtctttatgtgaatatctgtgacatagtttcttcttctctttttttttttccttcagaaacagagtgaacaactttcttctgcagcaaaagaccaagtggaagctgcaaaccctggaactaacgtctctgtgtcaaaggatcattttgataggacagtaacaactctcaacattgtatgttctgatgtattcccttgattttttgagtctcagctatgccattcgcatttctcaaggttaagtattgatgttcattggtctccctgcaggcggttacctggtttcatctgtatcactattcaaaatccttttccattctagaacctttgtttcaaaatattcagcggctagacgaggtatgtatcctcctttttgttgtattttgttaaacctgccctacaggctttaagttgacaacttgctatttatatgcagacaatcgcacttcaaatctgcttcttgttgctggatatttcactggcttgtcgtgatgctgtaaattttttggtaagtgttgtatttactggtctcgaagtcttgaaatatagtccaactgatctcttccgcaagtggaaaattcaacctatatccatgggctgtttttaaaggtttcttcagatgaaatttaattgttttgtctctatatttttctttcttaggtgagcctttgtcactgaatttaaaacatgtctgcattctatacttgccatgaagaacatataggatatatctataactgtataatatgccgtgcaaattggaaagcagctggtgtcaaaatgtttttactagaatactgtaataggtgacagataattctacctagctattatctgatagggaaggttggacttttagttcattgcgaggaatttgattttcgcttgaatgatataccgggacatttgtgaacgactctttgaattgatcagttaataatctcattgcttggagtctctccgtagatgtttccttctctctgtagcttacaagtattatttacaggctgtgtttgactatatggacaaagcttttggtgttggttttggaagtcatgaagaaaatggaagcacaatgcaactttcttcaaatcaggtatccaggacatcttctctcctgagcagctcggtggcgtcagatactttgagatctgatttaacagccgctgaaagtagtctgtgcgaggaaactctagactatgaaaatgttctagcagaaattgaggcagagaaacgaatgaagctagttggccatattccggcaaacaaccttctcaagacattaagcgagaggtcgttctcgactgctgatctgaagcttgagttgcagctttacaaggtccggtttttgcttctgaccagaaacttgaagctggcgaagcgcgaagtcaagcatgcgatgaacatagctcaaaaaagggactcttctatggctctcctcttgaaatcccagcttgagtatgctcatgggaatcatccaaaggctatgaagcttttgttggtctctggtattcataaagaagcagggacttcagggatctttaacaacaaccttggttgcatattctatcagcttggatgttatcaggcttcctctgtgctattcttaaaggccctaaggagctgttcatcacttagaaatgggaaaccagcgaagacattttctctctcacagaataagtctatgttaatcacatacaactgtggtttgctttatttggcatctggaaagcctctacttgctgctcaatgtttccagaaggcaagccatgttttccgccgacaacccctcatttggctccgtttagctgaatgctgtatgatggccttacaaaagggtcttttggaagggggaaacagttctttggatagatcggaaatcagagtccatgtaattgggaaagggaatcggagacaactaatgattgaagaaaatggatacgttgaacttgctggaagtaaccaattgtcaaagctttcattaccactagcacgggtctgtctctcaaatggtatatatctgctcaatgagtctctctcgaatgattctaaatcagatcttggatcaatattatccgtggggatgaatgagaccaaagaaggatcatcctctgatcatgaggaaggtaacacgaacacagactcgaaagaggcaaaaggaggaatgagccaagaaataattcaaaactcactctctgcttttgaggatattcgtaatagagaaaagcagttgatgagacaggctctctttgccaatatggcttatgtagaattggagttggcgaatcctatcaaagccttgtcagctgctacttcactcttgcaacttgcagattgttcgaagatttatgttttcctaggccatatctatgcagcggaggccctctgcttgctcaatcgacccattgaagctggtgcacatttatccgcctatctactcggacaggatgattttaaactgccatatgcgcaagaagactttgaccagtggtggaagcacacaagttctgattgtgaagagacattggatccctccacgggaaatacccgggattcagttttccttaagccagaagaagctcgtggagcacttttcgcagaccttgccgcgctgcttgccacacaaggacatcacgaccaagcaaaatctttgataacgcacgcgttaactctcttaccgaacaatgtacaagctacagttacagcagtctacattgatctcatgttgggtaggtcacaagacgcccttgctcggttaaaacagtgtacccatgtgagctttgttccagggagattggaagtgagagcctcatagaagatttgtactctaaattggtatggtttgttcttttttgaaattcaagctttagaaattagttggttcgataaatatcagagaataaacttttgtacaagtttttttttgtttttaatttcttgtattagtactgtgagatgatatttgcactcgtgacttagatttgggtcttgagggattagtcgatttcttgttcaggaacaacataagattgttagaacaaacaccagtttttgtacttttttttaaatcttgtttaagacagacccccttattctatggctttagtagatttgtttatttttgaacaagaaagtgtggcgataaacaggcaatgaccaacgcttagcgtttagaacacttagttggggtttacgcgattttaggtggtttattcgtttacgatattatagataaaaattatgttaaactatatattagaaaatattaaatcgaattctaaataaaaatttgacaaaaaatttctttaatttatatcaaacaatatatgaatgtttataaccatgtgtgtagaagtaaaacttataaatttaaacaatgtagttagaaataagaaaaatatattaaaataaaatttatgttattttaggcagtcgatacggttttagccgtcagctgaacgcctaacgtatagtcggaatctaaacgaccgcctagaccactttttaaaacactgcttttgaatctttcaaacttcatccgaaagcaaaactaaagcttctagaacatgtgaaagcttgtcaagaaaccctagttttgaactcataaaacctagttcagaagagttataccgcagcattcttttttttttgtaatacaaagtctctctttttctcctttctaatacaagatgcaattaaacaaaatgttcctctagttataataatgtagaaaaatacgtgtacgctagaaaatttctcgaccaacgtaaaagagggtcctagaacggtcaacttcgacacgtggctcgtccttatgtctttctctttgtgtacagaagcaatgtaaatgcaagcaagcgtgtaagaactaattgagtcattgacacatgagagtgaaaaaggcaatcaaaagtcatcaacacatttctcttttaaatttggtatgcttgtttcgtggaagcatgtttggtgagggtagaacaactttggttttggttactccaatgatccatgcagcgaaggtgttcgatgaaatgcctagaagaggctttggggaaattacttcacctgaagactgaagtctgttagctataagggtttagtgattttgtcttgatgagaattccatttaacgatgataaataatgatgcgacctacaaagaatctttgccgccttaagttaccattgtttcttgtattagcgttgttgctgatgattggaacgggtaaaagatatacatgcatctaaagttgttaaggataaacagtgacgtggtggtcttgtcttttgataatcttgttactctttcctcactcaatggctacctcttgcgactgaaacggtaaacctgttatcactctggctttgtgtgtattcatcagtatctggtcaggttagaacaaatatattgcttattaaccgatcaatctgttgctgtcctgccctgcttgtcgatagtagacagtttctgtggtttagtaatactagagaacttattacatgagttaaggtactgtgtgtttactctcgaatttgcttatgttttatatcaagttacatttttgcaaacaacaggtttcaactatgtctcctgtctttatcaaaaaaaaaactatgtctcctgtacaagtggtagacaagttgttacaattattcttcatgtgtcgcatctaatttaataatccgcactataaaaagtatgatttatttaactaaaaggaatcactagagtctagaggtggtaatcgatcagtaatcataatatatattattgtttagaaatgtgagaaccctcagccatacggttgagttggagtaaacttttagctgcttctagatctaattttccgagctgatttatcgtaggtgattgtcgacgagtagttatggctgaaggagttgtgtcgtttggagttcagaagctttgggcgcttcttaatcgagaatccgagcgattgaatggaatagatgagcaagttgatggactaaagcgtcagctgagagggttacagtcgctgttgaaagatgcagatgcaaagaaacatggaagtgatagggtgaggaacttcttggaagatgtcaaagaccttgtttttgatgctgaggatataattgaatcctatgttctgaacaaacttagaggagaaggaaaaggggtcaagaatcatgtgagacgacttgcttgcttcttgacggatcgccacaaggttgcttcagatatcgagggtatcactaaaaggatctctaaggtgattggggaaatgcagagtttagggatacaacaacaaatcattgatggtggtcgttcgctgtctcttcaggacatacagagggagatccggcaaacgtttcctaacagctctgaaagcgatcttgtcggggtggagcaaagtgttgaagaattggttggtcctatggtggaaattgataacattcaagtggtttctatatctgggatgggcggtattggtaaaaccactttggccagacaaatctttcatcatgatttagtccggcgtcattttgatggattcgcatgggtctgtgtttcgcaacaatttactcagaagcatgtttggcagagaatcttgcaagaacttcggccacacgatggtgagatcttacagatggacgaatatacaatccagggtaaactctttcagttgttggaaaccggtagatatttggttgtcctcgatgatgtatggaaagaagaagactgggatcgaataaaagaagtgtttccacggaaaagaggtgagctcttatggtacatacatgacgcactttataaatgcttttttatccgtaacatagacacaaatattttgcaggttggaagatgctacttacttctcgaaatgaaggagttgggttacatgctgatccaacatgtttatcttttagagcaagaatcctaaatcccaaagaaagttggaagctctttgagaggatagtccctagaagaaatgaaactggtacactttcaaatttaaaattaagatcaagaatctaggaaattttatttttcagccaacatgttgaaatgtattaccttgtgatactatgcagaatatgaagaaatggaagccatcggaaaggaaatggtcacatattgtggaggactaccattagctgttaaagttttgggaggcttgttagctaataaacatacagctagtgagtggaaaagagttagtgagaatatcggagctcaaatcgtaggaaaatcgtgcttagatgacaacagtctcaattcggtttaccgaatattgtctttgagttatgaagatttgccaacggatttaaagcattgtttcctttacctagcccatttccctgaagattacaagataaagacacggacattgtacagttactgggccgcagagggaatttacgatggattaaccatccttgatagtggagaagactacctagaagaactagtgaggagaaatttggttattgctgaaaagagcaatttgagttggagacttaaactttgtcaaatgcatgacatgatgagggaagtatgtatatctaaagccaaagtagagaacttcctccaaattatcaaagtccctacttccacctctaccatcattgctcaatctcctagtagatctcgaagactcaccgtacatagtggtaaagcctttcatatactaggacacaaaaaaaaggtcagatctcttttagttttgggactcaaggaagatctttggatacaatcagcttcacgcttccaaagcttaccattgctcagggtgttggatctgtcttcggtaaaatttgaaggagggaagttaccttctagcattggagggctcatccatttgagattcttgagcttacaccaagctgtggtatctcatctaccttctactattcggaatttaaagcttatgctctatttgaacttacatgttgctatcggggtgccggttcacgtgccaaatgttttgaaagagatgctagagttgaggtacctttccctacctctggatatgcatgataaaaccaagttggaattgggtgatctagtgaacctggagtacttgtggtgtttctcaacgcaacacagtagtgtgacagacctcctccgtatgaccaagctcaggtttttcggtgtatcttttagtgaaaggtgtacttttgaaaatctatcttcatctctccgtcaatttcgaaagctggagacacttagtttcatttattcgcgcaaaacctatatggttgattatgtgggagaattcgttctggattttattcatctaaagaagttaagtttgggagtacatttgtcaaagattcctgatcaacatcaattacctccccacattgcacacatatatttattgttttgccacatggaggaggatccaatgccaattctagaaaagttgcttcatctgaagtcggttgaattaagacgcaaggctttcatagggaggagaatggtgtgctcaaaaggcgggtttcctcaattacgtgctctacaaatatctgaacaatcggagttggaagagtggatagtagaagaagggtcgatgccatgtcttcgtgatttaattatacatagttgcgaaaagttggaggaacttcctgacggactcaagtatgtaacatccttaaaggaactgaagattgaaggaatgaagagggagtggaaggagaaattggttggagaagattactacaaagtccaacacattcccgatgttcaatttttcaactgtgacgacgaacaaagagaataaccagtagcaggtaaaaaataaacggtataataatgttcacttttcaaagtcatgtggacagtctcaacttttatacattgttctaaaatcgatcatcttttaaatagatgcaggaaagaacaagaagctagtcaaattctcttatattgggagagatagaggctgcttcacaagagtcatctactgataaatctctggaatacagattctgaagtactactgattacgttggagctctcgctttcagtgcatcgttatgttgtggctcagaactatatgctttttattgatgtttgttttcggtgtggatgcatggaacgtgcttgagaactctttcataaaattgagaaacgaaccttgttttttttgtagttcattgtaaaaattggatatttatgtttatacgaatttgttttgttttctcgtttgtgatttaacacagttagctagcttttgtaagctttatttacatcaaatctggttagatttgttttttatcacatttaggcttaagttttgttagttttgcacctcttttactgtgtacgcatagtgaagtcatggttgaaccaagacgagcaaaactgatgtacaataaacaaaacaatctcattttgtacaagttttttgtttcattttaatttcttttatcagtactgtgtgatatttgcactcgtgacttagacttgggtcgttgagggattagtcgatttcttgttcaggaacaacataagattgtcagaacaaaacaccagtttttgtacttttgtttttaaatcttgtttcaacttcagacagacccccttattctatggctttagtatatttgtttacttttgaacaatgttcaaaaaagtgttaggcgataaacgggcgatgacccaacgcctagcgtttagaacgcttagtcggggtttaagtgattttaggtggtttatccgtttatgacataaaacattttaaatatgatattatagataaaaatcatataaaactatatattagaaaatattaatcggatcctaatcaaaaattagataaaaatgtttctttaatttatatcaacaatatatgaatgtttataaccatgtgtagaagtaaaacttataaaatttaagcaatattagttaaaaataaaaaaaatatactaaaacgaaatttatgttattttaggcagtcgagatgattatttaggcgtcaactgaacgcttagcggcatataaacgaccgtctagaccgctttttacaacactgcttttgaatctttcaaacttcatccaaaaacaaaactaaagcttctggaacatgtgaaaccttgtcaagaaactctagttttgaactcataaaacctagttaagaagttttttttttttgtcggcacctagtaaagaagttataccacagcattctttttttactttttttctttaatacaagatgcaattaaacaaaatgttcctctaactataataatgtagaaaaatacgtgtacgctaggaaatttctcgacccgcgcaaaagagggtcctagaagtttcaactttcgacacgtggctccttctcagtctctcttattaaagtctttaaattatataatcaccaaaggcaattaatggaattaatttactttgaggactaatattccatctgatttcccaagataaaacataaagtccttattacttaattatgaatgtaattattggattacatgtaattaatcaccactttataaaactgaacaaaaatagtaacgaatataaagagtttaataatgatttttgggtcattttccttcaccaaatttttaattccgcataaagtaaaatatcctgaaaacagaaaaattcagtgttttcggattctcctttaaaaacgacaaaagcatctacagagaaatctgaccgcaataatggcgaataacgaagattcaaactccaatggactagactcgtttgatgctgttaaacaacgtttcaaagatcgatcaaaggtacaacatcagattcgattttcaccatttttgatgtttctcttttgttccaattttgttgattttgactttgtggaccaattgtttttgattttgacagaaagttgttcagacgagagagttgttgtctaaacaagcggtacaaacgcgtgagatcttatcgaaacaagccgttaagatcgctaaacaagccgaagaacatgagagattcatcaataaggttaggtttctctcttgattcttcaatcatgttttgattttaagttactttggtttgaaaatgtttggttctgtaatgttttaaaggtgacacatctcgttggtgtgcttggatttggaggtttttgtttcctacttggtgcaagtgagttcaaagaaattgtgttttttttttgttttttttgtgttttgttcttaattcaatgttgttgatgttgatgatgttttcgttttcaggacctcaagacattcctttagtttactgtttcttctatgtgatctttgttcctcttcgatggatatattaccggtttaagaaatggcattattatcttctggtaatgtctcttttgaggatttggaattaagaaacagtcgttttgattgttattgaaacaatttttgtgtatgtgataggacttttgctactatgccaatacaatcttcttggttgatcttcttctgtatcctaagaatgaaaagcttttcatggtttgcttttcctttgctgaggtatgctttttaactacatgtatgtatatgagtcttttgtgtcattgtgtgtgctgatttattttattggttgtgtcttgtgctgcagggaccattggcgtgggcgattattgtctggcgttgcagtctggtttttagttcgccggataagattgttagtgttcttatacatctcttacctggtgagttctataatcttcttgttgacagaagaagatatgttattgattcatattgctaaagttgacggctttgattaaagtagttgtatgaattcttagcttgttgttcccctctcaaccgtttttaattcaaacacatggttccttgttgtaatgcatatgatagatatagttaagctttatgctctctctctccattgtttctttattattgtaatgaattttggtttcagggctcgtgtttttcacgattaggtggtggaatccagcgacttttgcagctatgcaccctgtaggcactgatcgtagggtttcatggccttatgttgaagacaaagcttacctattcacatggctgtttctcgtccccttagtcgtttatactctttggcaagtgctctattttctaatcgtcaatgtcctgcgtaggcagagactccttagagatcctgaagttatgacttcttacaggtatctcttgtctacgccgtatgttaatgttctcctcatattgatcgctaaggtcacagcataatgtaatgtgttcttaccatagagtgaacacttgtattgatggaatcctttggtatgtgcagagagctgtcgaagaaagctgaaaaggcaaacaataagttgtggcagctgagcggtctgctaggggatcagaatcgtatatggatgtacatcctattccaggccatcttcacggtggcaaccatggcattgaccgtaccgatcttcctatcttatagacttcatgtgatctttcagatcctaaagatttctgcggctgtgtggaacggagggagctttttactagaggtaatgccacggcaagtgatccagaaagagaagaagaagaaagctgagatgcagccgatagaggagcagatactacatcatgaagctgtgtcacatccgactgagaatgagccaaaatctactgaaacatgatcatggttctaacaaaaaggtacatgtaaaataaagttttcaaaggtgaatcatgattggtgttttttttgttcctcatgttttgttctataactgtttgtttctcttgttgctatacatcattctaaaagcttaatgtatgtgaatgatcttgtagtttattttttctaaagaaacttgttatttactctttagccaaagttttgatcctgtttcgctaggacattctggccttaaaattgcattatgagagatttaactatatttttaacgcgttttcgagaaaggaaaatcttcggatttcagcgaagtagattgggataagttctccttgagacgcggattttgttttctgtttctgctgtacaaaacaaccatcactaaagatcataacattcatgtgtttgatagtgcatagttctcgaacatgtcgttaccagccgcggaataagcttaataagtatgccgatagcattatgaaatccatcatgtccgatacgactattgttcagtggagatgaagcttaataacttgagttccgccaaagaattcactcaaaaatcgaccatgaagaggattttgatcgatgcaaatcgcccctgtaacgagctgatttggaagaagactcaagaaccaccaatttgcaccgtacggtcaaattgagtcaaaccaaaccgaagagccccctgatgtacttgaagactttctgctgattatattcaccctcatgaaaagactacacgacgtttagaagctgcgactttaacttagctctcgacgccatcaccgaagatcctccattatagcctaacggctagaatcatcacgctcctctctttatttcgcattattcggtttccttttctaagttttagaccattgttgtacttttcaatttaagctctttgattctctactttgtattcacgctttgatcaattgaaattcagtttgtttcttgcttcaatactttgtatcttgaatcaaatctgttcttgcgagttctaggttgtttgtagaatcaaatacttctcatctaaaagcttccatcgctcgcttctaagcattggacccgtgagccttgtcttggtggaatccaggacgtgtagtcgtgtatcacatgaaatgaatggaataagattttgattatataatctacaaagtaggtcgcattaagatacatgccaaataccgcactgaacagagaaagaaaacagaaaatcaatgtaaatattgttggtgtgtccttgactacaatgttttttgaaaaattatcttgatcatgtgttttgtcaggtccgagttgtccatgatatcaatattcatgatggtaatcgatcaacctttgagagtatagtaacaacacttggcatatttctcacttacgctagtctcattttttgttcattcaatgaaaaaacttaattttatgaataaaatttctcgaaatgcgcttaagaccttgacagtacgacaatctatatttactaaactgagaaaaaattgccaacgctgttaaggaggttgaggttggacatgggtggtggccggaaccagcaaaactgatccactagcacggcgaatacaagaccttttttttgtgacactatcaatgggttcgagttgactattcggtttccgtctctgagccgattctagcgacttgcttgatccgcaataaatctcccaaaatgctaattaacatttttagattctaatattttgttataagcttttgagactgtacacatgagattttaaacgaccaaagctatctcgctaattaacattattatagattctagttattttttatattaagatttttgtataaaggaaaaaagtaacatatgaaataagaaaatatatggattttggaaaatatttctgaatcttattatataaaatatggttttcaaaattaataactcataggattgtgccacgtgtcaaatttattgatcagatattgacatgtgtcagaagagatttaacttttgtttttcttagaaaaatagaaaaacaaaaaatgaaacaaatctaaatatactaatttatatgtccatatataaaataaaataataattttttttcctaaatgaaaaagaaaaattaacaaatttagttatcaatgtgttattggtcatttcaatttagcatgtaattttaaaaaaaaaaatcatttacgatggataataatactaattaaaaaggcccttaaagtttaaaataacaatataatttatttaacattaatttaagagccccttaatttaattggctataaaaaaacaaaaaagcgaaacaagtctacatatactaacttatatgtctatatctaaaagaacaaaaattattaacaaaaaggaaaattaacaaaattctttttacatttgttttggtcaattaaattagcatgtaatttatttttaaaaattatttagtatagataattatactaatcaaaaagcccagaagtttaaaataacaatataatttatttaacattaatttaattggataatattgtatttatctttgtactatagtgtttttattcgttaaatcaaaccataaaaacaaaaatgaaaaacttaatgaggttataataataatgttatgaatacttatgttttattctaagaattttaacacatcatgtgatggagaaacttgcatcctttcatgtggtacagcaagcttatacttatattttattctaaaaaatttaacgcatgtagtcgtaagtgaaaacataacatttttgaaataaatagcttataatatttgagttttcaattacttaatgagagttagtttattttttactcatttcaaattattttgtatgaggtaaaataaacttacgagattatgatatacaaaaataataatttaaacaatgtttgttttccaaattattttgtggatttctatatttttttattaatgttaattgttaattattttgaatactaagtaatatttatatttgatctgatataaatattattttgatatgaaattgttatcacttaagatgaaatgtgtagaattaaaatgagtttattgtgatgaaatggattgttaaagtgtattgcaaaattgaatgtgcaagatagaatttttctttttcataaatactaaattaataactatttagaattcaaatattatcaataagtgaatgtgtagaattaaaatgtatgataaagtagaatgcataagactgaattttttttaaaactaaaaatatcaaattaaactagattttaacctgcggtacaccgcgagaacaatttattttttaaagctagtgtacataaaagtttggaaattgtatctatctataaaataaatattttatagtttacaattgttattaagggcctgactggtttaaacgcagcgggtgcggttgcggttgcgggagtttgcagaaatgggcgattgcggtttcaagctttatcaagcgttttgaacgactgattgagcgtttgataatgggtgcgtttgcggaagttttatgactggtaaaccagcgggtgcgatagtaattaaataaaaaataaccaaaataaatataatatattactattaaaataaataaaaatataatatattagaaaattgattttttgaccaaataaaaatagaatatatcatctcgtccgaccaaatgattttctaatcgagaaaacaaatcgaaacatgtattcaatcaaaaaactcaaaagaatacaaaataaaataaaaacaacgatgccatgaaatagttaaaaaattacactagctaatgagtgaataaaaggatagatgatacttatgtttgattcttgatttttattttcatcggatgccataattgagagaatagagttacaatatattgattagggttttctaataaaaataagatatataaaagattagattattttaattatagtgattagggtttgggtgtaagccacagttattttaattaattaaaaaagattttttatttttaacctaaccgctaccgcccgcaaccgcaaacgcttgcgggaaggagcttttgaaaactggcgatttcgagcggtccaaagcgatatctagcgatttctatgattggttccaatcgctaacaaccgctaccaatcgtaaacgctgcgtttgcgggtggtaacgtcctgccaaacctgtcccgccaacccgttccgtaaaaaaagcaatttattttattaatgttgattttatttatgatatgtttatgaattattgtctaaatattttgtaattttgtattaattaaatgctatcaaatatctctgcggtttgatgattataatcgaattattatagtcatggagaaaatcaatatcaaaaatgataattttgtagtaattaaatgatattaaaatctagtggcaatcattgtaaataagtcttaactacaggatttatctcacaaaatgactgcaaaaatgtatatgtagatatcaaaatttttatagattactattttactactcaaaattaaaatactatcgattaaaatttaaatgtatatattacacctgcctgtttaggcgggccttatctatgttacaattaaagtgtatatattataaacttatatatttaagtgttacaatttaaatgtatatttctatcgattaaaatttaaatgtgtatattataccacatattaatcctcaacgatggtttgttctcaatgttacaattttggggaatattattttcattttgcaattttgtattctggttaatagaacttgattaatctgatgaaatgtgacatttatagataaaaaaaagaagaagtttgcacaaatagaaactctaaaacagagagctgaaaacatgtgtgacataataaaagaaatttcttctagccatctcactgattaacatttagtttacatttttaaattctaataaatttctatattaaaatattgatgaaaagaaaaaatatataaaaaagagtaatgtaaaatttttaataaataaaatatgaaaaaaacaaagaatgcaattttttgttaagaatgtaaagaatgtaaaacgattagacatctcacgaattaacatcttttagctattacgttaggttaatttttttaattctaataatttctatattaatgaaaaggaaaaaagcaatatatagaaaaaaataaatggaaagctttttcaaagaaaatatatggaaaacaaaaaatgtaaaattttgttagtaggaaatgtaaaattttgatagtagtacatataaaataatatcattagaaattaagatattcataaaatagaaaaaatatataacattacaaagaacatttggaaaaagaaaaatgtaagattttttagaatatatatgaaataatatcatcattagtctcactaaatttgtcaatattctcttttaatcacaattaggggtgggcgtttttctttgatttagagttaaattgacttggttagataaggaaaaatacgactaaataacaaataaataatattcaactaacaacaccaagaaaatagtttaatgatggtcgaataaactgttagttaaaataaaaataaaaacatctatttagaagcaaaaaggaaatctaaaagtttctaaatgttgaagtagtgatttatgtataaatagtcttctaaaagtgataatgcaacaaagatacttgacagatcaaataaagagctcattgaattacgagggcattgaaacctttaatctcatgtataatctttgaatcaacaactcaaactaaaattcgaagctataagctcctgaaactttccacgtagattttaaacacccgatctcgattttccatctcactcattaacatttttaaaattatgaaaattttatatattaaaagtattgcaaaacaagaaaaaaaatacatgggataattaacaatttcaattcagattaagtaacatttagaaattctaataatttctttactaagaaagattaaaaggaaaaaagaacaattcatatgtaaagaaaagaaatgtaaacattttgaaaatagcatatggacataagatagtgatcgcatatatggaaattaaattgagttgattttcaatcatcatgtttaatacatttggggttgtgagctattatgatttggttttgttgtcaaagataatcatatgaatattctttaagacatttagattttggtacatatctaaattaaaaatatagatttacatttgaagatgagatactcaatatttaccactttatcaaggttgttaacatcgttttaaaaaatcaagggtataagctttcaaggttgttcatgtggaattttaaatgactaatcgcagttagacatctggctaattaaaattttgtaaaagggaaacaaagtcgaatctataagcttttgatgcagtgaaacatggatagactgcgacaagcgagatagataaagagagagagctattgtcgtgagggaaaagatgtctgattgtgacactataagataaacttgaatatgttcagataggaaaaagaaaaataaaaaaacagttgtgacatgacatttttaaggcaatgtttggttcatatgtagtgacatatagagagcgagccattgtcgtgagggaaaagatgtctgattgtgacaccataagacaaacttggattataggatagggacaagaaaattgataatacatctgacatgatgtcttaaaggaaaagtttggttcgtatgtagctggaatttgatggcgagatttttgatattactatcttgtgattgaatggtgaggagtaatctcgagatgtagaactaagttatggtagtaggacatcgaattttgagttcaaaataatgttgtttaaggtagttaattaataggctatggagctatgtttgggtaaggttggtcacttaaattgttttgccctattttaaacaattgttttacatagaaggaagaaagtgaggaagaggaaaaataagaaagaaagcgaggaagaggaagaagaagaataaaacgaagaagcttagctaacgttgaaagtaacgatgacaacggtcatgaaaaacttataatgtagataacaagaagaaagacaagagtaagaaaatgatgaatgtgaagagaaatatgaagatgtagatgttggcggccaactaaatatgcgaaaaattgattcatgagtttttctacaagatttgattcttaaatattgattttttatttttttttatatcttgagtcatcatagcaggataaacaagaacatccatgtaataatattagtgatgatcttctgcatatttcaaaaaagactgaaaaaactcgaatttagatataaaacttagggaaagtcagacaactgcatttgactctctgaaagaagttcgatgcaatgagaaagagactggatgtaaataagtgagaacttgagtaatgagaagtaaaagaaaagctctcaaacctgatttcaatattggtggaaaactaaggctaaactattaagttctttctctcttagatttactaacttcttttgttaagctaaattgttaagctctctatctctaacatttactttttatatctatgttataatttttcaaatgtgtatttgaaatgaaatttgttttttcatagtaatttaaaacttttaaaaaaaacattataatttttaagataatgtatataataattatccttaatcaaatataattttaactaaaatatatattaaaaaaaacatacgtagataacattttttagattttaaaagttttctatattaagattttgttttttaaaggaaaaagttaagcatatggaattaagagaaatgtacagaaaattccttgataaaattttctatatacaaatatataatataaacagattaaaatttaaaattttattttgaaaattattaaatttataaacgaaaatatataaaatatgggaaatttacaacattcctcattgtctactgtaacattcttaaatgtgaaataagcaacttcatcatcttcccacccattgagggaaaatggccaacgatctgagaatatctcaagaagagcattatgtaggaggtctctccaatgcttgtatttgagataccgagctcccggatgtggtaagaaaattttgtttttgatagtatctattgccaccataaacaattccaaatcattggaaaatagagagtagagattatcttccgatgtgtgttcctcctcagtaaaactttctagagcaagccttttctgacacttggttgtcaaagagttttttttttaaaattcccaatcccaaccttcctttgaaagaaacaacattttgggaggattactactcccttgccccaaaccaaaacggccacaaactagagattttgtagcaaatgaattcatctttgaaagaaagagaaatttcttgaaagaatgaagactttgaaaaagtgtttgcaggagagattgaaagagtttgaaaaagtgtttgcaaaagagattgaagcttcaagattatatttaaagagatatgaaggtaatttaaagagagaagagttcacagatctcctagaatttactcgatacatgacaaatacccaaattctcttttttttctgtttcctgagacttttccttgaatcctcttccctcctaccaaatatctggaaatttggaaatttttctgaatttaatataatcaaatgtaaatgttttgattcacaacaatatcgatttaatttcacacgtatcgttatgttctcgagaactataatttgttgcttctaacaatagaatcattaaggacaacttctatctttcagagttgtttatgacatttaacatatcacaacaactttaaaatcttagttaaaagttaaaactcacatcatacctaatacttagctgaatatctcctacaaattttaatatttaatatatattaacaattagaaaacaatgatttcagtacacaagaaatgagatttctcacaaacttaagcagcctaacaaaagaataagttcaaaaacttaagaaagtaatgcagataatattagaacataggaaaattctcatttatggtcaagaattccagttattgatagagctaataacaaccatttctaacctagatcaacaatatcaacaatttaggtttaatatcaataactatgaacattactagagatttgtagaggtaacctagcaaattgagatcggtaaaaaatttgattaccaaagttagagttcgcccgttaatttatctaaaacagaacaataacaataatcgtacggtatgagacagagtagataacaataagcttccagagaatcatgaatgttttagagatttgtgtagaaagtatcaatacaatatggtctctgaaacgttacgatgactgcagctgcagagaagattgagacgacatggttcgctcataactttggatggaacttgacaaaaaaaaagatatgagcctctttcaggaacgaaaggttataaatatacaagattcaatattcagttgcgagaatttcgttgtatggcgtatgggaagttagaataaaaataggaatgtgcgaaattgtagggaaaatcaaaacaaaaatattgaaacgtcgtcgtttgagatgagggaaagagaaaaaaaaaaaaaacccgcttcgtcgtcgttatgtttttgactagaaaagtgtagaaagaggggaggagaggagagacgaacctgattttgagtgtttcttgttgatattttgttttccatagaaaaaaggctttgagaagattcacaattttagagtctacacgttacttgcctcagataacatcttcagtctttgaaccaactgtttttggagaatttatccctgaatatagtatttcttttattgaaaacaaaaagtaaagaaaatgtataacgtacgagacttaaaaacaaaaaatggtttaatataaattatcataaatgactttaacgaaacgtaattatcttccattttcttatttcctgccggattcccaaaacgaacaccttaagtgtgttggcctttgatgccattgttgttttgaataaaagtgaatgaaatgcgagaagaaagggttgaaagttaagagaatggtataatgtgaagggagtgagagaacccttgccatgtttatagagactgagtcctccatgggtaatcttcgtcaaagttgtgatgtaagaactcttcaagagtttttgtgcaaagtttcttctttcgtgttctgatgaagaacacacacaaagccttttacagagagttgaacggactcgttttggtgtttttctttttctttttttagtctcatcccttaagattcaagattttaaatgtagaaaaggatttatttaggtgagatttatttttggtaatagaagattttattagatcatttatgatgtacctttggaaaacatattgtagagaaaataaatcttgaatattgtcttgtttcatataaatacaccatgtgtcatgtgatgatataatagtagcaaactgtataatatataactatttgacattttttcttaagttcttaattttaaaatattttatatcagcattaccaatatgttaaaatcgtatttactagaagagcccatcatagtcaacatagataatctgagttcagattaaagagatgaaaaataaaatcgtgtttatatatcaaccttacgtgtacagacaacaaatctttgtttggaaagcatataattcaatatctatattatcagtaacgatgttgaatctcatacctagaaattgagaagaaaattgtatcatatcggagcatgtttttcacacatcatgtagaactcattatcctcataggaaaaaaaaatcaaaccgagtaaataacagaactgattggaattggactgaaccgttcctagaatatgagagaacataagcgaaagcgatgctaaaatttttcctcaattcatataaaaaaaaattagaaaagaaaataaccacaatcattctaactaaacaaaaacataaagtaaaaatcaaaagactaaatttaaaacgtaattgttcttcctttcgctgttaaaaaatcattacccaagctttcaaagttcacatctttaaccaactcccttttcatagacaaaatagccaagtcacttaatctctcatgtgacatatttgagcgaagaaaagattttatcaacttcaattttgaaaaacttctttcagcagatacaattgacaccggaattgtcaacagtatttgataagcaatctatgaattcggacaatattccttgacattcttcaaaaaatctagcacttgaataggtctcttaaaactttcaaaactttcagctcaaaatagagatcattactaacaatatcagaatgatttccaaaggttagagaagcttcaagattggtacaaggtgccatcaaactatattttctcgccctgactgcaatttcttcaaatcaaataaaaagccaaatatttgtccatacctctgagtggagagcttgatccataatttgaatatagtggtcaattctaaagctctcctctagtgacaatactacacttccttcacccttctcagatttttcaccataatgtctttttcttctaatgatctactttgcttttttgggaaatacaacctcaatctccacagaatctgctactttttagcttccaactttgctttctcaaaacatgtatctctgtacttttgaaattaagaaactatccccttcaactaagagataacatgattgtcttactaacaatgttcacaactgaaagaaaattgtacctaataaccatagaaaccaagaactcaaaacttccaatttagtgtgtttaacttgtcgcaagacactcatcatcacttttctcttttagatcatcactattctcagctatgtaaactaaagcttccataattttaggagcttgaaatcgtattgccaacatgactctcccatcgagtatgtgataatggcttgagtgttaggcctctcaccttatcttcaaatattttccaccgcttaactgaagatgcaaaagatagtatgtgcgctgaataattccgaaaacgaaattgcctttgaagaagtggttgtcatatcacaaagagcaagattaagactatgacaaccacaagatgtataaaatgctcttggattcatctcgagtaatcgtttctatactcctttatgcttctctttatattagagccgttgtcataaccttgcccccaaacatcatcaactttcaagtcaaaagtagccaacacatcaagaagctcacctagaagtccttcgccagatgtatcatcaactttcaagaaagttaaaaaaaattctactatattagttgaagtggctcaaacatctacacaccgggtgacaacagtcatttgttcatgatggctaatatctggagtgcagtcaataataacagaatagtaccttgcaccttgaattttcttgattatcatagccttgatctcattagctaacaaagctgtcaactcattctgaattttattgatgagataatgaaaacgagttgcacgagttttaaatcttctaagatgctctatcattacaggatcaaaatcagcaagaatctcaataaagcttaaaaaattcccattaccatcttctccaatcttcccactacttccacaaaatgctagattttgtctcgctagtgtctttaccacaaacattatcctaagcaacacttgtctccagtgaattctatctttattaagttcatcttgagcatatttatcaatagtctgatttttctacagtctgagttctaattcagtcaactgactcatgcatacaatatgtttgtgaccagattcatgctctctaagccttgtcaaaaaatttcccaatcactgaatcaggtagatgctagatgaccattatcacgcttattgaacaacttacaacaaaagcagaagattttgttcaatgactttgagtacattagccaacgtcaatcttgtttactctcattacccatttctcttgtgtaatagaaatgtgagaatctaaacaccatcccttggaaatttataaccaattggcactctttttcttggactttgtacaaccataaaatctctccattcattcctaccttttttaatagttgtccagtttcgaggatcatacatatccaaaaatccgtcatgctccttgagatcatctttttcacattcattcttatttacatcttattttttattcaaaacctattcattcacggctttacattctctgcctcaggaaccgtttattctttgttttactcactcatattctcttgttcaggaatttcttcttctctgttatactcatttatattttcatccactccatcatcttttgaatgttgtttagcactgttttctgcatatttatcaagagttttaggtattttgaaatacctgaataaagcattctcttgagatttcactagttcttcatcttttttctctttttctttttttatctttaccacaaggttcctttcatatgtttttcggcggcttctctctgaaatttacaaattacttttaaattagttaacttaatttggacaattatattatgtagtatagaatatactaatagataatctagcgaacacacacaatatatatatatatatgaatgtatttgtttacaagactctagtttcacactttcgactaatttcactttcaattcaatactctaaatagaaacaaaatctaaatatcagattaaacaagtcaacaacattattataaaccaaatacttaccaattgattaaaaataccagaatatcgtcaactgaattttgaaatcagcgatgattaagaaactactttaaaaggcgacgaataaagaagacgatttcaagaagttattgtcaaaaataaaaaactgttggatgtgtattattgtttattgtcctaattttctattaaacatttaactaataaaaaaatcccttaatcataaaaataaacaaattgtgaacacacacatatataacacaattataattatttattataacaaatgtatttgatgcaacaaccaacttaaataaacttagttttaaactagagagagataaataattgtaccattaaatccaaacacttggttatttttagatataatactatcttaatattaactatgaaaataattctaaaccctatgaattagatatagttaatattgttccttaaaaataattgatccatagtgttttcaaattcaaacataagagcatctcgaagagatactctattccctcaaatataaaattttatgttcttcaagagatactctaatatttcataatttacagttgagtatcacttttcaatattctaaatttgaaatttcatctttttatttgcatttgagtccttaaaattatatgtttcataaataatcttataaattattttgtttatcatttagtccttaaatttttatatattcaaagtatttaacataaaccttataaatttaatttttacatataaaattaaatatatacctttcaaataaaaataaaatattaatatttaaaagtataagatagaattaaaaacaaatattacacaacaaactattatattaaaaatttaatacaaaatcaagcaacacaatgataataaaattacatggatgcatattctccacttgggtgatgcagctctttagatttctaacaacatatgtaatgctaccatcctactctataaagatctgaagcttttgatttcccaaccttccagtttttttcgtggtagcttttacttattttttcccagattggttattactaccaattggatcttgtgatatttctaaatatacacaacataacaactcatcttcatattgattgaatgatgagcctctactttttttcatattttttaattagaaaaagagttggttgaattgtgatatatatatactttggaagtctattatttatacacgataatagaaaactttagatgaaatgaatggccccaaaaattcttgtagattttcttatctaaacttttggatatgattcaatccaacggttggtaacaaatgagatccaatgagtggtgtagataaaatttgcaggattttcttatctaatatctaggataagttatagtttggagagaatttggttgatgacaagtgcaatctaatgaatgacatagattaaatttttacgattttcttatcattttgaatagtgttatcttatatctatacaaatacacatatagacgatagacaaacatcacaacatcaccactaaaataaaaatgaatttaaataatggagatccatcttttcattcatcttcctcttccgattcatttggtttgatgaatggttggtagatgacaatgcagcaatggggagggaaaatcaaattgcggtcaatttattagtttacaacaatcggcttattcaccaactcactcgaaatagcaatcacgtaagtcatcgaggctctattcttggtcacgcagtaatacaccctgataaagaaactgctcatcataatttgttcaatgattattttttctgataatcttttgtatggtgaaagagagttccatcgtcggttctgaatgtcacaaaggttatttcttcatattgttgatgttgttaaacaacttgacaactactttaatcaactttggcagtttctcggtcgtagtggatctcccacaattattcttgaagctattgcttattacgatctatggatatgacatgcctattttggtatgccaatcaacagtaataacatcaatgttttgaaggaatccaatttattttcgaagctttctcaatgtattgctcctcctgctaattacattattcaaggaaagaaatataatatgggttattatttagatgatggtatttatccgaaatggtaacctattgttcaaactataagtaatccccaaagtccaaagaaaaaaatgtttgcagcaaagcaagaagcatgccgaaaagatgttgagcgagtctttcgagttctacaatctaagtttgctatcattgcaagatcatctaattgttggaagaaatgagtattgcatgatataatgtcaacttgcattataatgcataacatgattattgaggatgaatgtgatatcaacacactgattagagaagaaagatcatcgccgaaagtgactgttgaaatgacagtaaatgaaaacattcaatttcaaccatttttggcggtaatctacagattaaaaataaagatactcatctagctcttcgtaatgcattgattgatcatatatgggagcatatgaaagcattatggtaataattttattgagtaatttataattatatgttaatttatgtatttattaatttttattataaatgtattgttttgttaattaagattatgtgtaatattttaatgtatgttttagagttatttataaaatttatatggttttaaaattattatgaacaatataaggactataatgcaaaatacacattttaaaaacttcatatttgtattatactcttggaagacaaactactcatactttatatttgaagtttgcatactctatatatgaagtattttttggagtttctctaagtttataccaatataacataaaaaaaatttgttggaaaccaatacacttttagcttaaattcatagtatatttttagtttggataggtgggagtggaaaattctcagctataatcaataaaaacatacattggaagaagattttggaagaggaaaaatatatattgcacaagactcaaaatttctctaagcttaaggacaagtgcagaactatggtgcatatgtgattagtaagttctttcactataatatctctacaaatattttgaagtggcaacatagtagtgtgaataaattttcagcaacaatcaataaaaacatatattggaggaagattttggagactggagaagaatgtacattccacaagggtgattcttctaaacttaaggacaagtgaagtaacatggtgtatatgtgattagtaagtcttttcactataatatctttagaaaccttttaaagtgacaacacattagtgtgaagaaactttcagctacaatcaataaacacatatgttggaggcaaaatttagagatgtgaaaaggtatattccaccttgtaattcctcttagcttaaggacaagtggagaaccatggtgcataagtgattaataagttttttcactataatatctctagaaatattttgaagtggcaaaatagtagtgtgaataaatttttagctacaatcaataaaaacatacattagaggaagattttgaagactggagaaggtacattccacatgattcctaattattttgatgtgacaacacattactgtgaagaaactttcagctacaatcaataaaaacatacgttgaaggcagattttggagatggaaaaaggtatatttcagaagacttataattcctttgagtttaaggacaagtggagaaacatggtgcatatgtgataaatcactataatatctttagaaatcttttgaaatggcaacacggtagtgtgaagaaaataggagactttaatgatagtccttccttgtaatcgtagttttgtattcttgcatgtagaattttcttataacaatactttctttttaacaagctattattagtttattaaataaatcttttttatgcatgaaaaaacaaattttgtgttgttaccaaaattgttttcttatttatgtggactccaagagctcatcgataagtttggatggttaataatcataaatatgaccattttttataatgtcgtcattttcaagatattaatgatatcttgattattattgaaggtccatacacaagtcgagtagaacattgacgaacatgaattaagaaaatttttctttggtcttttgtggagtatgaaatttgtgatacctacatcgtgtgaagttgattacatgtcttattcaatagcacatgttagcatgaaaatatatatgtttttacacaatcatgaaagattgttgtttaacaaatactaatataaaatatagacatatgattttggtttcttccaatatggttttgccgagcttaagattaattacatttgttgtcagtattatactaaccaatgtatcgtgtctaaattcataagcgaactttaaatttgataatcaaattagttaccgatctaaatttgctaggttatccctataaatctcaagtattgataatagttattaatattaaaccgaaattactgatatttttgatctaggttagaaatagttggtattagctccatcaatagctgatattcttgaccataaattagaattttcctaggttctaatataatctacattacttttattaagttttcagacttattcttttgttagggtgttttagtttttgagtaatgtaatttattgtgtattaaattgttttacaattattaacatactagtattatacccggtgctatgcaccgataaaaaggaggagaggatggggaatatatattatttcttgtatttgcggatttggttttttcacttgatataccgagagaattgtagtatgcagacaaaattaatagtcgtccatctatttgtagagatgattgtgaaaacaatgattcaagtctagtcataaagagaaaaaaacataaacttttagcttttgtacatctatttgtaaacgatgctgaatatcacaaaaaagaaggtttagctaactaataatttttgcttcaatggattgtatatagaagatgattatagtcaagctttggaaaacattatcacaatagaatattatggcttgcgtgacgacgattttggaagctgctttgttgccatctttgcccgctaaagaacttcaaggcatcggccgctctcctcatccttctcatcaaagtcagttccttttctactctcattctttaattattatcctcttcgtctttcaattaaaatttttgagaacaacaatgcccaattaggaaaagccaatttcatcttctaggattttgctttgtgttattttatattacttgtgaataattattagttggaagtcttgtttagtgtagaaaagcaatgacttcttttagtaatgatagtttggaagttgtgtttgtttatgtgttggaaaatatcattaagatagctcttatgcattttaatgttgaacttgacttatctgtttatgtgatatgtcatagattactgctatatataaaaatatatagcgaatcaaaaaataatatagatatgagaaatcaaaaaataacacaggttcagtaaaacacataaaaacggttcttaaataagtttattgggcttattgggctgtggaagataccctagctaggggttctgaacaaaatcttgagatacagtgtactcaaggtggcgattcaatcccttctgattgggagaatctcgttgatgaggaggtggaacatgagaaagaaatcactgaggaggatttccgattaatgaaggaactcgaaaaggagatgatcctagatggattccttgataacgatgacttgcttcgagaagaaatgttggcaggtgaaattgagggtttaatcattgatgatgatagccaagagatgacaatctctgagcaagatgttcctatctctcaccggatagaggaaattccggcgacttcccaatccccatcaaacaaacgcaatcgatcacctagccgggaaaggaaagtttaaagaagcagtaggattggtgggccagagaatggggagacatgcccattagggcaaaaaggggtagctgcatcaaacaaaaatgagttcaaaaaggctattattccccaaagcccaaaaacgttcgtggcagcctccagaaaattaaagttgtttggtggaaagatctcgcctaaaaagagatcgactccgacggtttctaggactcatggagcggttccatcaaacactgataccaacatccctcagaatgaggtggttacaacaaagaacaacaagaacaataagaaagacacaaagaccttgaagcttaaggatggtgtggaggagtcccggatctcccccgagccacctacatgaggactttagcatggaattgtcaaggggcgggagcaaaaaaaactcatcgtcgactggttgagatgaaccggatgtactcaccaggttttttttttttatcggaaactaagaatcagaaaatgtatctgcaagatgtgcaagttgagttaggttttgataacctccaaactggggaaccagagggttctagtggtggtttagctttattgtattcgaatgaatttccggttaagtttttgttgttagatgaccggctaattgatatcgaaactattattaatggaaatcgggtctttatgacatttatctttggagatcacgttgtctcaaaccgtgaatatgtatgtgaaaggttgatgcgtatcggagtttctagatctgaggcatggtttattattggagattttaatgagataacaggaaaccatgagaaaagaggaggaaaaaaacgttctgaagcttcctttctaccatttcgtgctatgatccattcgtgtggacttattgattttccctttcatggaaatcaattctcatggattggaaaacgggaaaatggtaagattagatgtcgtttggacatagccatgggaaatgaagaatggtataatattttttcccacagtaatgtggagtacttaaaaatgtggggatcggatcataggccactactgcatctatacaatcaactccgagaaagatctcgagaaaatttatgtttaacaaaagatggattggcaaacccgggctcaaagaagcagttgtagaaggatggaacggaattggtggtcaggtaaatcgacccattatgaaaaaatccaaaactgtaaacgagtaatctctatatggaagaaatcaacccgaacaaattcggagatacttattaagaaactccatgataagattgagaaaaattatgctgacaataatgcttccttggaagatcttcaggaccttaaaaaaatattggaagacgcctatacagaagaagagatatttttgtaccaaaaaagtagccaaaattggctggcacttggagataaaaatacaaaatattttcatgccttaacgaaacaaagaagagcaaaaaacaagattctaggcatcctagataatcacgggacttgggttgataatgaagaaggcatcgatagaattacggtagattatttcaaaaatttgttttcatcctcaaactcggaagatcccgcctttgcccttagaaatatctctccatcggttactttagccatgaatgagagtttagtaagaaaagtcaccgaagcggaagttaagcgcgctttattctctctaaatccgacaaaggccgggaccagatgggatgactgctcttttctttctacggttttgggaagtaataaatggcgatcttaccaacatggtgaagaatttttttagcttcggtatttttgatgggaagctgaatgaaaccaatatttgtcttatccctataggcgaaagaccgagagaaatgtctggcttttgtcctattagcttatgcaatgtaagttataaggttatttcaaaaatcttgagcttgcgcctcaagaggtttcttccggacttaatctccgagacacaatctgccttcgttgcaggaagattaattaaatataatattttgatagctcaggagaacttccatgcacttcgatccaacccggcaaatcggaagaagtttatggcactaaaaacggatatgagcaaggcttaagacataatagaatgggggttcctccgagctttgatgaaaaagatgggtttcaaccatcgatgggtaaattggataatgcaatgcattacctcagttacataccgcatccttattaatggcgatccaaaaggccgcattaaaccatatcgaggcattcgtcaaggggatccaatttctctgtacctatttattatgtgtacgaaagcgcttatagctcacattagaaaggctgaggggtaaggaaaaattcagggtcttcgaatttcatgtgcaagcccacatgtctctcatcttctatttgctgatgatagtttttttttctgtcaggccaatgtccaaaagagtaaagaagttattacattatccgctcttatggtaaggcatctggacaagaagttaatttatctaaatcatccattatgtttggtaatgaggtcccaccccctgttcggcaagaaatcaaaacaattcttggaattacacgtgaaggagggatggggacatatttaggccttctagagaaaatccatgggtcaaaagcccaagtcttcgcgtctgtgagagatagattacaaactcgaatgaattcttggtcatcaaaattcctctcaaaagggggaaaagaagtcctaattaaatcacaagcacaagctcttccgacatatgtaatgtcgtgttttctattgcctaaagcaatatgctccaaactaaccagtgcgattgccaacttctggtggagtaataaagctgagagttgaggaatacactggatagcttgggaccaaatctataaccatctatcagatggagggttaggatttaggtctttggaagattttaatcttgccatattggcgaagtaattatggagattactacgattcccggaatctctacttagtcggatccttaaaggacgatactttcgatattctagtccgctagagatcactgtctctaaccgtccgtcatatggttggagaagcatgttggctggcaaagacgttctcaaatatgggattcgtagaactattggctttgggtttggaacatgcatttggactgatccttggattccagatgcccaggctcgccccgaagggaattactttggagagagatccattgatatacgtcaatactttgattgactttgggacgaagcaatggaaaatggaacgtcttcgggaactatttcccccggaagaaattaccctaatactagggataaaatcgagccttaatgtctcgagtgatggacataattggaccatgacaaagtctggcaattactctgtcaaatctggatacgaggccgcgagagctatttctcgtcctgtttgtgaccacccttctcaggaacctagtgttacgacacttaaggcgcaagcttggaaattaaaaactacgcaaaaactaaaacacttcgtgtggcaatgtgtgtcaggttgtttggcttcgtgtcaacgactatctcatcgtcatattggtaaagataaaggatgtcctagatgtggagcagaagaagagactattaatcacttgatttttgaatgtcccccagctagacaagtctgggccctctccaatatcccatcatccccaactttgtttccttcatcttcactttacaataatttagattatttgtattggcagggtaaagaggtgggtgcagatgaggaaggcctaaggacttttccatgcatcatgtggtatatttggaaggcgcgaaacaaaaagatttttgattatttgggcgtaccacctcaagaaactttggacttagcaattcaagaagaaggagcatggagaagagcaaatcagcgagaagatagccagccggagatgaaccccagagtacaagtgacgtcaattccagcaaatatacctgtttgctttattgacgggtcatggcatgaagcggaggctaataaagataggtttattgcaagagttcgcgggttctgtttttctcatgtaagttcaatggtacctgattggctctatttagtagagagttcttatccgtgaattaatatatggtgtttgattggcaaaaaaaaaagataggtttattggattcagaattggtctcgtagcctagttttccattaaaatgactgacctatagttttaaaatgacccaattataataacattaaaaatagagtcttctaaaaatgatatagataaacatacttcatacacaataagtttatgaacaatcaaaaatacaatacatcaaataaaacaatggaaaaatctgaatttcaattacgaccacaacaaaggcattcataccttgtgatattgttctttcaaaagaagaaactattgtgttcctagatgagaataaaatgtgtttactcgtaccttttgatcttagttgtgatccttgtgatcttatatgatgtgaataagacgtatttatagataatagtaatggtagggtttagtgtgagtagaaaaaatattggtaagcaagtaaaaatattttagcaaatatcatactttcagaatgtttaaatatcgaattaatatggttcaattttgtcaggaaacaaatggtaaatgcatacaaatctctatcattataatagaaaacaaaacgatttgcaaaaatttctttgttaattacatttattgagttaatgtggatttaatgtaggaagtttcaattaaggaatgatctgattcaaacaaattcgggtcaaatatttaaatatggaaggatccgatttgaagatttacgggtcgaatcaaagaattcaaggtttaaaactaagggggtgtattgaaataaatatttgggggtggttggaggaatttccatattttaagatttaaagagatttgagtaaaataattggtgatttggttagattggttatatatatatattttttttatttaaaaatggtgatttggttagatttatcagagtgatttaggaatattaattggtgatttggttaaatttattatataaaaaagagtcaacgataataatttccaaaaaacattttttcttctattgtctatgctgagagacgaagctcatttagaagaaaaaatagaagaatgattatcatcaaacaagcttgaaagtgtttattttactcaaatcttgcattgtgatttccctaccaggttaatcactgagagaagaaggcttattagtttactgtgtcggctcgtaagcaaaaacggtgactccgtcaacgaactttatcattgttttagcttacctgatcgggagcacaatcggtacatctttatttatttcacgatgacttgcacgacagagatagatattttgaagtggacagtgaggtattgttcgagtttagctgcacaccttctaactcctacgagattgttcaaatatgaaattcaacaacagagcgatttgagaaatgcaactgaaaacaaaactgaaaaatatatttctgacgacgtcggtcattgtagacatacatacatgcaaatcagataaggtatcaaaagtagccaatgtaaaagttcatacacgtaaaggtttttggagttggctacgtaggagatagcatttctatctcatttgtctcttaacaccttctcaaagctcattttcttcttcttcttctttttgttcttctaattgttcgatgataaacaaagagaaacatatcatcatagtcaaaatccttaaaaaccatatagtatttggaaaataccatctatagaggtgggattgttttgtttttatttttgtactaaaaagatgtctaaagtctctccaaatcagttttcagtatttttttggaaaaaaattgtgaagtttgaataatagtggatttgctatggtttttataaattcttgattgaataagaagagatttagaattatttggaatgattttacataaattccagtttcaataacatggaatttggaatgatattttaaaatcactaattgaataacatgtgattttaacaaaatccccaaattttaaccaattttactttgaatacaccccctaacaaaatctgagctgattggatttcttaaaatgtacttacaaaatgttaagatagatagtaagatagaaagagcaatacttgggttcaccgggttgacctctcttattcaccctctcttaattagccaattaaaatctacaatataattaaacaaactaaaacaattaatattgtatataataaataaaaagattaattcattaaaatccttaaattgaattcattgtaaatctaactcttaactattttttaataaacccaaaccgacatataatttcatttaattataaaaactaaactatgaccactaattataaatccaaaccgacatataattttgtttagttataaaatctaaactataaacctcatttttataaacccaaaccaacatatatattttttttaattataaaatctaaaccttaaatactctttaataaactcaaactaatatataattttatttaattataaaatctaaactttaaatactcttttataaactcaaactgatatttaattttgtttaattatagaatctaaactctctttttttttttatcaaaagaatctaaactctattcctcatttttataaaccaaacggttttttaatgggcttcacgtgttgggccttttgttttgaaagttcattatctttaactgttatgggctttctattagtaataaaacttttgttttctgtcttggttcattgttatgaaattcaaaaagacagttactgaaattcaacttctagtcttctcctccaactactggcaaattagggtttctgagttcgagaaaattcgtagcagagtgtgaaaatggaaggaagcaaaagcgaggcagtgttcgattccatgaatctaaatcctcagattttcatcaacgaagcaatcaactccgtcgaagattatgtcgaccaagcttttgacttctatgcccggttcgtctctctcgctattgttgcaaagcttattctaacaaagggttttatttggttcttacttacatttttgcagtgatgcatccaaatctctcaaaatcaaaggatctgataaacaaaagtcacaagctttatcaaatgtgagttttggtgattttggttaattctttgttcagcttcttactcttgttacatttttagggtattgctcgtgttcgtggtttgctactatctgtaatcgacaatcgtttgaaattgtgggaaagctattctcttcgattctgtttcgcagttcctgatggatttgtgttaccaaagagtgtgagtctcttctatgtccttcattgtctcgtctctcactgttatactgtgatttgctgagttgtttctgttcgtcaggaggagtcttcgtctgtgcatcaggatgggttatatgatctagaattagatgcagaattggattctttaagggataagcttaatgtggtgagaaaaagactgatactttttgatctttggtctgttacgttttcgtttctttaaggtgaggtacttttgtttcaggtgggaaagaggtctgttgagcttgactctgagctccaggctttagaaagaagctcggtttcgagggaacggtctttgagactcgttaatgaagctttggagctttatgatgagtcttctatggatgaaatattcaaaggtaattaagatgcaaacttcattttagtctttgatgtattgagatctctagattcagttcaatggaatgatttggttatgttttgtatattagttcttgatgaccctgaaaactcttctccacttatcctgtcagtcataaacgtgaccaagtcgacattttttcgttttctgctgctagctagtatcttgagtaatgtcctgttctcacttagaatatagatatgaaatctcccttccatcttctagagatatacttctgattagttttgatgtgatctcatttagagttttataatttgacatatattatcaggtagtggtcgtccatttttttccttcttctcagcaatacctttgtttgtttgattgttcatagcatgactagagatgatgacttgaatctctaatattggttttctgcagagatgacgaaaatggcatcggaacttcgtgcaagcgtggagaggctgaaaacaagaagaatgaaagcaagtgaaagcgctaaagtaaagaggctaaagaaccatggcaaagagttttcagcaatgacttttggtagcaaaatttaacatttgttgtgatatttaagagttggaataataataagtgttgcatgtttatcatcttccttcgttctctgtggttctcagatggaaagcttgaagacctcgaaaagtttcaagccgagttaaggaagatgtgaaaatttgttaacctttgcagcaaaagaattgtggtttgtcaaagataatgctctaaactgacttttttttgtaaatgactaacttgacttcttctctttatagactacgtcgtttctggcttaccaaacggtcactttcagattaggattcacaaatgattaaattatgaaattataaactgatctgattgttcttctgtaatggtgaaactgaatcatgtatttcacatgacagctccagattcatcgattaacaattaccagcttcagtactcagttaatgttctcactgtttagaactgaataattagttttgaggacacccatttaagctctccaatgggattgttgcttttttgtatattttgtatgtgttttttctttttttgaatactaggaggttctaggcaaaagcccgtaatccctccagatcagaaaccacaacatataatattagtttcatcccaagtgtcactcgaattggcgacctctaagcttcgcctaggatctttaccaattgagctaacgacacttgattatttttgtatgtgttttattatgtaattaataaactgatatctattttatatagttataatttttatgattagattcatcaatgagactatgactcaaaatatcaattctacattttgcatgtataaatctaattatctatatgcctattattctaatctttcacgttcatgaacacatacaacaacaatatataattattgatacaatgtatgtagttatgttatttatgtggtttaaaatttatctaatttaattgtaacaaacaattctttatttcatgtattctttcctgatctattatgtcaaccacatcatgatatgctagtaattttagtcaacattttagatctcctcccttacatatagccatacaagagagaatctcatgttttagttatttgttatgtctgacgtctcaaaaccattaagtgaaaagaattgtaagttcatgttaccaatttatcatagcagacgaaaatgaaaaaaaattttgtcatattatatatcattttgataaaacgtaataataaagcaattctgcaaatcaaacttttttaacgatacaaaccctataaattaagggtaattttaaaaattaccgtatttatgagtttttatatgaaaaatactcctctctccattttcaattaaaactataattttaatatattaaatgacaattttgtccaacttttaaaaagctgtattttaataaattaatattaaatacgaaattacacattaatttaaaattttgaaggaaaaaaaaagaataaactaaattcaaaatcttaattattaattttgactatttatgagataaataaaaattatttattttatatattaaaatctaacatgatattatcaaaaaaatattttaaagattatcacttcatatttgttaagatatataaagaaattaataattaataacttttttaatatcgataaaacataaaaatcaaatagatttttggattttaaatataaatatttaaaaatgattactaaatttcagtgaggacattttcttaatttgtatcccttttatatattaaaaaatagattatatattagaaaaaagaataaggtatttttcaaacaaaatctcaaaaaggggtaattttccaaatttttaatcttaagcgaccaacacctaaaactattcatcaactcaaatattaagaaaatctgtcacattgtaacagatttgttgtcaaaaaattaattactagaatgacgtctaacgataaccaattttttttaatgttataacagacttgttttatgttataagagatttttataattttacacaatatctgttgtttgatggcagatttgttttctaaaatattatattttatgttatgatagagctattttatgttgtcacagataaatttatattaccataaatctgtcatttgatggcaggttcaataaagaagaaaataaattgttggaatgaccttaaagatatttgatgttacgacagatttgtaatttgaaatccttataatgaccgatttatagtttcctttttccatgattttttgtaatagaataatactaacaattgtaacagtttttttatttagaaaatcatattatgacagatttgattttttttgtcaatttggttttagaaattcttttaaataccactaaaataagttttttccaaaaaaaaactattatgaattttatttttcaaaaatactacaaatctaaaactaaatcttaatattcaaaacgaatttctaaatcctaacactaaaccccacacctaaaaactataccgtaaatatacatagtcaatccaaatatataaaaaaaattacaacttcaaaaatcaatttttttttatgtttatggtattttaggaataaacttttgtggtttttttggaagaaaaaaacaaattgttgtattttcgaaaaacaaaaattgaaaatgtggtatatgagagaatttctcgttttttatctttatttttttgaagaaaatattcttttaagaaatatattaagtaatttattttgttggtaacggcagatttaatatatgtgtgacagttttttatgatacttgtcatattgatcgtcaaaaccattaaataaatagagtattaagcaatggttttttggacttttaacacaaaatttatgtcaatctagtaatgagtaaaatagagtgttaaactagttatttttagcttaatttgggttaaatgggataaatttcagttattatatatatatatatatatatatatatatatatatatatgtttttttccatttgtaatatactgacaaattagaacactaatttgcaaaatgattagcggggacccggaaatagtcacttgcgtgccatgaggcatcttctgtagggtttggtcgtcattgtaattaaaaataaaaatgatacggatgactcgttaatttgttcttaaaaatcaacgacctgtaatttagagtacatttttcttgttggcaaaacatttagagtagattagaattatttttgtttattttgacgatggaaccatatagaagatgtctactctaaatcattattattttaatctactctaaattgttttaaatggataccgatggctttattttaatctactctggattctcaacttctattaataccgatggctttattgcatctactctaaattatttttatttttatttttgattattttcttagttctatataagccataagttctaatatttatacagattttcgcaaattgtaatagttatattttagatcgatttggactgagtttttgtacgtaaacattcactagatctcccactacataaaccttaatgaaaaaaaagaaaaaaaaaagagaaattttataaacttataagaaactttaatttttagatcaggtatttagaattttcttaaacgtagtaaagcttatcgtgcatgcatatggatatttcatggagatgtttataaacattcagaaaaacttaatttatttttagaaagaaaaaattattaactttatcagtagaagaaatatgtacgtatataaatattgtgtaatatctactgctcagactatgaaagactctttaaatgcaaaacactgagtggattacgaaaataaagcataaatctaaaagatgtgttgattatttttacaaaatatataaatatttatcattatacgagtcatagtaataaactaataattatcattataaaattttaattttaagtctatgtatgtgctaaatctaaaaaataaagtactttttcgtgaaaaaatatggaaaaagttatatatgtgtaatttttcatatttcaatacatcaattcgaagattatccattagaaagacttggtaaaaatttcaagcaaatattaagtaactcgtggtggctactttcaaaataaaacaaaagcatgtgacttattttatgatttcaaaaagttgataggttcggacgagttcacaaataatggaactaatagatccctataaatacaaagcattattcttcgtttatcttacaaaactttaaacacattgctttctattttaagatctttctatctctctctctctccatggcatctcaacaccttcaagccaaccctcatgctgaaggagaatggtccacaggcttctgtgattgcttctctgattgccaaaactgtaatcactctcttcacaattacttacatatatatttgcacgtgtaaaaagctgaaaaagtagttttgtgctaaactatattatttatcttgtaaaaatgaatggacaggttgtatcacatggttgtgtccatgtattacatttggccaagttgctgatattgtagaccgaggaaacacctgtaagtgcctttattataatacacggtatcataaataagcttgtaaataattgctgattcaaatttttgtcagcgtgtggtactgctggagcactatatgtgttgctagccgcaataactggttgtggatgtctctactcgtgtatctatcgtggaaagatcagagctcaatacaatattagaggtgatggttgtactgattgccttaaacatttctgctgtgagctttgtgctttgacacaagaataccgtgaactcaagcaccgcggtttcgatatgagtcttggtaagttatttcgatgtcattttgtttatgattgattaagttttgtaatcgcaaaacaattaacactcgtataaaaattgatgtggtattttaggatgggcggggaacgtggagaagcaacagaaccaaggaggtgtggcgatgggtgctccagccttccaaggcggcatgagccgctaagatttgcttctttatgtaattgatcatatgtcatatatgcggtaataaaaatgaggtctaatcctttgtttgtgttgtatagtatgtatgctattatgcttgttgtgaaagtttgaatatgagtgtttcttcaatgtatattccactgtacagttacaagaatgtaattacaatgtccaagaaagtgacaccaaaacaaattaatccaagttttagttttccaattttaaaatagttaattattattagtttagagttatagaaaattattattcatacaaataatacatatatattgttgattataaatatatttttgaggattttggttatcttttacacatagcctataaactattactattttgaagcataacacaaccctatttcctgaccaaattggaaacattagtaaattagtctaatgcaaaaagacccaaagaaaaaaagacacaaaaaagggtaagagatgaaactagatttccacgagttatatatatttatatatgagcatatgtgaataattagtccttcttgttagattagttctttgcattcgcctttcaacgaacattgatcggaagactattctaaaggttcttatttttattattttgtggaatctacaatagtgtaaacttaaaagttaaaacaagaaaatatgatcaatcgttttcggatattttcataatcatcaacagacctttaattctattcctagaattttctgcttcatcggaatattatttatatatatagaagaacgaaaacaaggcaacaataaccaagcaaacaaggcaactacaatatcaagcaacaaccgcgaaaaaaaaatagcaaaaaagttgaatttttttgtcaaccacatattaattaaaaaataattttattattggttattcaattaggaggaatagtatttacaaaggtaacttcagaaaatgaaattctaaaaaagcggactaagcagtttactctaacattacatgaacgagagataagagaaagcgaaaaaatgagaagaaacgcgtaacactccaaaatcgtctagtaaatcggaaacggcgggccattcttcaagtgacagtatcatggaagctagctctgaacaaacgactgataatcgatctttcttaaaatgatacttttcatagcccaaattaaaacattttaactctgaataaagttagaagatacccctcctaataccttttacaccgagcaatatcgtttaatcatttctttaaacaaggaaattgaattagacttggaaaacccaacattttttcggttactttctgagtttacattttttgttttactataatacaattaagtgatggtaagggttgtggaattaacaattaaattaactaaaagacactcggtcaaggattcgaccattatactagtcaacttgtgtgccattatacgtctaatgatttaatttggttgagattgtaaatgcaaaagtttgaactagtctacttaaaatatctcactaaaattatgttttatttgtctgaaacatacttcaaaatgtatttatttagtcaaccctttctccatccatttgtcgctgatatagtaatacaccattcactagttctccgtcaacattaatggagtgttattaaatctctactttagaagtattttgatgatttaataaaatcatagtaaataaaattaaagaaaaaaaattaaaaaatttggttgagagttttcaataatcttgttagttacaacaaaaatggtttgtgaccacaaaaaaaatcttaaaataatcgcaatatactatttgcgaataattcaaaactattatgaatagtcacggtaaaatggtcgcacaatcgtcacaaatttgcgactacaaagtaacgctaaaatataattttttataagagactaagtggagacataaaaaaagaagtttgcagtcgtatattaaagattaattattggttaagactaattatcgattacgtcacttttgctcaattttgttacgaaatgtgatagttgtatagaggtgtatttcatctctatttttcaactaaaaaatgtatacaaaaatatgtttctatatctaaaataaaaaatacttgataagctttttgagtttaggattaaatgataaagcactattcaattcataaaaactaaatggagtttgtattagtggcaaaagtgtaccattggatcccatttgacgctatagacatgcaattgtaaggataagaaaaaaagtttgaagatagattcacaggaactcggagacataagctagttatcaacatgccacaagcaagatcttggtgtcgataaacacaaattttctaattaaaaaaagacaaatcgttaatagataaataaaatttaaacaaaagataacgaaaaacatacattcatatccttgatgtaattcaacctccagaactttaagtattaacttagaataacatgagaaaactagtactgtcccaaaaaaagaaccatccccattgggttttaaaccagaaaacgaaaaggctctctaagcaactggcattgctggataatctgtggtggttaatggagcttccggtacaaaagcagcttgagtaacaacctgagcaggtgcaatgtatacatcatcttctttcggtgtatggatgatcacaacatcaggcaatggtgtcatcggtccttgtttgcccttggggtcccagtcaagcatgatcttcaccttgagaccaagcacaccctgcacatgtgattaaccagattcaggttacacaagatctcactaggtagaatgtgattcaagaaacaggtttccactgtgaagaactgacctgtctaagaagaacatgcctaactgcagcatcaatgtattccttggttggctgacctgaggaaaccatgtaaccatccttgaacttcatcgacttagcacgtgcagcacggagttttccactcacaatgacctgcatacatgataagaaccctatagaggtattctgaaagaaaggtaacagaaaacaaagaggtttgcactcacttcgcatcctttagctccactctccataacaaaccttaaaacaccatagcacgccctatacaacaaaatatcatgcaatattaacattctgagcataagagatcaaagcataaaagccatatttaggagaacagttcaaatttaaagtaacataatagaaagcctgatagactcgatgtgggtatctagacaactaaaaatcaaaccgaatgataatcacgagtggaataaaaggatttctaattacactgatctatagacgcagctaacaacaagtccaacactaatataacttcagcggcaaatcatgtttactaatacgcaacacttgttacacagtttgtttaatcgaaggatagaatacagacattggaccgatacatagcttaactacattaacacaaagtctacacgaacatacaaatagcaaactctaatttgtcccatgctttaagccatgtaaagaaaaatacagaaaatcgattcaggatacttcactacattaacaaagtcttaaactgattcaggacacttcacacaaacactattttaacgcagtttgttaatcatgcacagatagaaaacgacactggatcaccacctagataaactacattaacacatagtctaagtaccattatctcctatttgtttcatcaccattctttaagccaaaaacagaaagagacattaaactaattcaggatacttcactacattaacacacagtcttaagcatcaatctaacaaatcaacaccggaatgatagctacaaaaggatgcagcaatagaaacacgtcatacctacgaacagcaagaccaccaagaagcttgtaacgaagagactcagcctgagcaatagcacaaagacctctgttagcaaccttctcagcataaagctcaacactgtcctgaggaaatttgaatctcttttgtacaagagatgtcaattccctaatcctccttcccttctcacctaaaccaaacagagaatcatcaaattgatatcatagaaacaaaaaaaggtcgaatcagagcaaggttaacgaaaatgcaccaacataccgagaacgttttgagtacgagtggctctaatgatgatctcagtacgcataggagtgacgcgaacctcaacaccagagtaaccatcctcagcaagctctctggttagaacctcattgagttcagcgtaaaacacaccatcggctacgaactacaaaattcaaaactttttttgtgttaagcttagaatacgatacattggtagagagatagagacaggggagggcaaaagatatcacctttctcttcttgctgatctgggtcgccatgattgtttgcaaagcttgaggaggctagagacaaaaaccctagattcggagaagagagtgcgttaggagtgaaatgataaaattgtgtggttaaataaagttaagagcaaggcccggccttttaaggcccatttctattgacaagccacaatataaagggactgaaaataaaaccatttcacccgtattaaaattagtgacagtgagaattgaatttagctatcccgatcacgtctcatatctataatttccgttccttgtgttagcaagagtagtttagatagtatttttctgttcaaaaaaaaaaaaaaaaaaagatagtattttcattttccaaattacgatgatgttattggttcgtgattttgaaagagtttttagtgaattttaaaaagtattagacggtacatgtgctacgcacaatattcatgctttaattagtttatcagtttcacttctttatatatattacgaatttcaggtattttatttgtctataaatgtttatttgtataatttataaattttaagagtttcaaaatttattattggtatcatttgaacatggatactattataattatatatttaatatatatagttgtatagatagtatgtcaaggtttagtatattttattaacatgtaaattaattatcaaatttgacaaattaataagacaaacataaattttatcaaaatcagaattatagaagaaaaacttaaaagaattattaataaaaacttaaatttaaattcaattaagttaactaacaaaaattaatttcaacaaaaatgtaattaattttatttttaaatatttaaacagatttttatattttaattatcaaacataatagatggtctaattaaatgttttaacagttatttaaataaatttagaatattcaaaccaattcgaattcaaacacattaatttgatatttataatatcatatatataaaataaagcagatttgttatatttaattaggaaatgttttttaaattatcttattggattagtagtatttaaacatataatgagttttcatttaaagatgctcccaagcgacttttccgaaacggttttcgctagctacttcggaaccctagatctccttctgccggcgatctaatcctcctttccggcgactaccttccccctcagttccgcctcctcgcctctacccccatcttgtagtctcctttgcttaccgaaggctcctcagatctgacgagtttccagatctcctcgccttttcccgatgtctcgtcgttactctcctagcgatcgcagatccaccctggatccccctttccggcctcctcgccctccgagagttaaagtcccggcttttgacaactctgagttgttgcgcagacatgccctcacggccatcggcagacttaccaatccggcggaacaagacgtctgggcagtactgcctttcctagccgaccactggaagttttccacccgacctactggagcagatcttgggaatgggttattccaattccaattcgcgactgagcaagaccttgctagagccctaaagtatcaaccctaccatttttcgcaatggatgataattttccaacgttgggagccgacgattgataaggatttcccttcccagatccctttctggatcaatgttcaaggtgtgtcgattcatctttggtctgaaggaatcctggttagtattgcgaagagtgtgggagttctagagaagactgaagtttcgtctaccttctttcgaatgagggtgctagtaaatgggctgaagcccctcgtgttgaagacgattgtggagtttgaagatgggagtgaagtggaagcctccctagtttacgagaagctgagaaattattgcaaatcctgctacaagctggatcattcccatctgtcctgccccctccttggtagaaaagagagtagaagactagaagaacctatcaatccaatctcgtgggaggagattagaggcaaaagctccaactcgtcctctgcctcaagaatcttcaggatatctgaggatagttcctctcagagaagagatgtgcctgcctccaaccaccgcacccgtaataggcaaagacaccaaacggactgctctagacgattccgggaatctggtggggatgtaagaagaagagatggtcatgaacctcagagggaaaggattcgaccagtgctctcccccagacattctatttcttcttctgagaatgatatgcgttcttctctgtccagaaggcagagatcttcggatcctgccccagttaatcgacgatcacattccttccaagaggactcccacccaggcccttctgtctatcgaccccttattgataagggtaaaggtgttcaaagaaaatactctcctgttctagaggataacgcaagtcgaagccaggaagtgcaaggctctggcctagcttcaagtcacagagacaaagacaggcccccgccaggaaaggatgcactgaatgctgctatggatgagctccgaggggtcatgacccagtatgttagctgcccggatcctacagagagtgcggccagacgcgaaagagtttgacaggcagaggctctaggagagcttgaagcaactgctgagcaaatggttagagcagctcaaccagctccttcttctacctcagtccaaatccctgaggaggtgacttcatccagcgtggagagagttccggtatctcaacgtctaggtccagtcaatcagcctaaacccaagaggaaagtcaggtccaagcagtctcctaaaaggaaggtaggaagacctccaggcaagcgtgctagtccaaagcccctggcaggagtgaagtcaaagaagctgaaacttctcaaccagcaaaccatcccgttccccagaagaagactaatcttggatcaggatcatgtttcagaggatcccatgagtccacatcgggatgaagcacaaatgggtggtccttcgatacagaatcatgtggattttcactccccaagaagccggctcacgtaaccatgagctggaactgtcaagggattgggaaccccaagacagttcgcagagtgagagagatactcaagaaactctctcctgatgttatatttctaatggagacgatgaatcaagatgaagtggttttgaagaagctagatttcttgaagagatataatcacttcctagtttccccttctggacaagggaagggaggtttggccctgttctggaagcacgacgtggagatggcaattgtttcctcctgcgataacttcattgatgccagagtttcattcaaaagaatctcctttctggcaacctatgtttatggggaaccagaacagtcaaagaaaggagctacctgggaaaagctgaagtgtcttgctgataaccgagaggagccatggtttctcacaggggacttcaacgagatactggataattctgagaaatcagaagggccaccaagagctgagggatctttcgtcgagttcaggtcattcatgtctgaatgtggactcttcgaccttaagcacttaggtaactccctctcttggcgtggagtcaggcatactcatctggttagagcccggttggacagagccatgtcaaatggtgcctgcctagagctcttctcaagaggaaggtgtgattatagaaagtttgaaggctctaatcacagacctatcattactttcctaaggcaagataagcaacgcaagaaggggctttttcgatatgatagaagactgaaggagaatgaggagatcaaagacctcatagctgcagcttggaatgaagatttgtctgattcggtggagaagaaacttagtcgatgcaggagggctatcatctcctggacaaaggagactcagagaaacagccagaagatcatagaggcgctcaaagtaaagctggaacaggccatggtaatccctgttaatgatgtctgcctcctagtccagattaactcagagctcagtgcagcttacctagctgaggaggccttctggaagcaaagaagcagacaaaactggctcagtttgggagaccagaattcagggtacttccacgcggttacaaaagggagaagttgtctcaataatctatcagttcgggaaacagacctaggagagaaggtttttgaagatagccagtttgcagaagtgatctctacctgctatcaagctctcttcacctcccagctctccaatccagaagagatttcaaggattgttcaagaatcggttcaccccaaggtgatagaggaggagaatgacttccttatatccattccttcagctatggaaattaaggaagcactgtttaacgtccatcctgataaagccccagggtatgatggtttctctgccagtttcttccaaactaattggactatagtgggtgagtccattgtgcaggagattcagggatactttctatttggacaagttccagcttccatcaaaaggactttcatccggttaatcccaaagattcaaggacagaagaaagtaatggactataggccgattgctttctatattgtgatctagaaggtcttctccaaagttattactaagcggctcaaaaaagttctctctcccctaatctctgagaaccaatcggcgtttgtagcaggcaggacgatctctgataacgtcctaattactcacgagacccttcacttcctaaagacctctggagctatgaagaacttctctatggtggtgaaaaccgatatgtctaaagcatatgacagattggaatggcctttcattcaagttgtgttgattcgcaaaggttttcatcctattattatttcttggattatgcagtgtgtgtccacagtgtcttattccttcctggtgaatggagttcccatgggagaggttattccttcaaggggtatcagacaaggggaccctttgtctccttatctgtttattctctatggagatgttcttccaggcctttgtgagaaaagttagagagatggccaacttattggaatcagggtagctagaggatgcccgcgaataaatcacctcttgttcgctgattataccatgttcttttgtaaggcaaaagcaaagggttgcagagctctccagcagattttggctatgaaaccgcctcagggcagttaatcaacaagctgaaatcatccatcttctactctaggagaaccacagaggctgtgaaaaccaaggtgaaagattggttgcagatagaaaaagaaggtggtatgggcaaataccttggcctgcgtgaacattttggtagacgcaagaaggatctatttacttccatagtagacaagatcaagcagaaagctatctcttggagctctcgattcctttcaggagcaggaaaacaagttatgcttcaaagtgtccttacagctatccctgtgtatgctatgtcttgcttccttcttcccctatcactctgtgatagaatccagtctaccttgacaaggttctggtgggataagacagatcagcagaggaagatgtgctgggttgggtgggatcgcctagccgttcctaaagttagaggaggtctgggattcaaaaacttcaaagcctataatgttgctctccttgcaaagcagagctggcgagtccttccacacccttcttgccttttagctcgagtcctcttaggcaaatattgccagaatgagtccttcctgaaggccctgagtcccacttttgcctcccatggttggcgcgacctcttagcagggagagatcttctgagaaagcaacttggttggactattggtaacgataaatctgtgctagtgtggcaagatgcctggcttgcccatgataaacgaattcaaccggttggacctgcccctcttctatccaaggattggaaggttaaggatctgtttctccctaattctgtagattgggatgaaggaaagatagaagctgctatcccatttgtgaaggatctggtcctggcaattaggcccagtagagctgggggtgctgataaacgaatctggctgggagccaaggatggtttatataccacaaagacaggttataaagctactctttgtgatgttgattctgattcctctcgggatccggttctttctttcaactggtttgatgaagtgtggaatgttcaatgctcccctaaaatcagacttttcctctggaaggctgtgagtggtgccttgcctgtaggctcgcagcttgcaattagaatcccctcctttgatcctgtttgctgcagatgtggagagttggaaacctctagccatgctctcttcaactgcatgtttgtccagagagtgtggaggcttgcacctctggagggtattgatttattccttgtgtttacagatgttaaacttggcctctcttggctaaagaagaagaagacgctcccttctgtgggtttggggtactgtgctttatacccttggatttgctggactctctggatcacgaggaatcaaaaagtattctcaaacatacttttcagtgaactcgaaaccattaacaaagcaatccaagatgccaaggaatggcaatttgcacaggaaccaaactctcgttttcaggttaggagctccatgggtctcagagctgaagttttctctctgaattcgacggtaatccacacagatgcagcgtggagtgttctgacatgctctgcaggtctaggatggaccctcaaatctccaggaatccctcttaaaaagaactctgctctatctgagcatgttccttccccgcttgttgcggaagctttggtcgttcactcggctctttggtctgctcacaatttgggtcttcacgatgttatcttgaaatcagactgccaggtccttactatggctattatctctcagttccctttgtccgaaatccatgggatccttcaggacatcacttcaagttcaagctccttttctagcttttcttgttgtcatatcccaagaaccgccaatgtgattgcagattcgctagctaaaaacagctctatctttgtattctcaaaactattgattaatgcaaaagtggatagacaaaaaaaatatatatatataaagaatattataaattcttataatataggtgtataatttgttttcaatttgaaacacacgtaattatgaatgatattgaataagtgaataaattaattggaaataaataaagattttttccttaaaatcttgctgtaggatttgatttttactggaaaaaaatcaataacttctattaattgtaatggatggttaagattaaaaattatgacctgttattttaaaaccttcgtcaaaagaatccgcatcttcttaaacgacttttttatgacagaaatttttaatccaatggtaaacttgttattttttttaactttctgcccacctcactaaacatacgtctcaaataatagtattgatttaggaagtataataacatatttgatatataataatagttatgaaattatatttgaatactaaatcaatcatattaaatacacttaaattgatcaaattaaataagatacgaaaatagttttataaattattttcaaatcggaaattaattgatgctatcaaaattgatatttaaataaatagttgtcatcaaaatttaaattcaattaatttaattaactgaaattagtatcaagccaaaaatataaataacttttattttaaatgtttaaacatatttttatattattattgtaacaatattgaaaatttcaaaataaaataaattaaaatatgaaaaactgacaatgcatctggttgggtgaactgcggctgtggacaatagtctacctgcaaatctaaattacagtcaaaaatatttacacaatcacaatacattagtgaaagagaatttatcaatcagatttaagaaaaaatattgcataccttataattttgttgttcattgtaagatagtagtcaaattataaatcatcatcgggtttctgcaaattaacaggaaaaagaccataatccctatcaaaaaattcaatcaaaattactcatcttataaatatagagaggtaaaaaaagcttaacatattactttggataaaagataaataattagaaagcaagacatactttaacataatcatgtgtgcttctacattttaatctcacacgctatgtgagaaaaatatgaaaaaaattttaggaaaaaacagagagagtgagagaagatatctcgatatattgctttctccatggtctcgtcgatccacaacctcagttttctccatggtctcgttctcttttgctagaataaaaataaaaataggaattgctgagtgagttcttgaaatgaaacgtacaatatttataagatataaattttatgcataaaacattaaatcgtagaattcaattttaatgattatgatgaatcccataattataggagaatatttagctattaacataattagttatttaattatgaaaattgttaagaaactttatgttaattcaaaaatgaatatccaactaaatatttatttacctataattatggagaagtgatatattcgaattcaagaaaggaatatacgcattgaatattttaaattaatatgattcagttgctgaaaaatgaattcaattaatttaattaacagaaattgatataaaccaaaaatgtaattaatttattttaaaatgtttaaacatattttttatattttaattatcaaacataaaaaatagtttagttaaaagtatttttccagttatttaaataaagttagaatatttaagctcatttcgaattcaaacatattaattcgatatttataatgttatatatataaataaagcagatttgttatatttaattaggaaatgttttaaaaattatcttcttagattattaatcttttagaatataattaatattgtaaatcccaatgatatgggagtataattagttttccaattgaaaacccacataattatgatattgaataaggaaataaattaattgagaaaaaaataaagattttctccctaaaatcatgctgcagaatttgatttttactggaaaaaatcaacggctaatagtaattgtaatggacggctaagattgaaagttatgacccgttatttttaaatccgggtcaaaaggatctgcgcgtttctaaactggtttttttcatgacataaaaattttaattcaatggcaaacttgttatttctgcgaacttcatgcccacctcattaagtatacgtctcaaataatagagtagattaaagtagataaaatttaaaaatctaaatgattactagagagttttgtataatttctatgattagcttttctataatcttatgaaactgtctaaattataaactttgatagtatctccaacttttatcataacatatctaaacaatattgcataatattctctcatcttctataaaaactatctccaccaaagtgctatttattattttaagcttttgtcaatacgtaacttttcaaatttctctaattcatcttttaatttgtgtgtccatattttattatcttctttgtatttgagtgttttggttttgtattttttttattaattgaatcactatctatacatttatgtttagttcatgaaggattcccaaaagagtaaggaaaagggtccatacaatctatggagaccagaaaagacacaagtgctattagagctacttgttgatacagttcatagaaactagcgtgatagcggtaactttagcaagctaacgacagagcaaaagattcctaccagttctcaatgaaagacttggatgccaaaaaatcacacttagtatctaagtagatggaagtacttgagaagcctataccaaaattatttcgaccttcaacgcttcgattctgaatttggatgggatcctgacatgaaaatgttcaccactccggatgaaatgtgggatgagtacttaaaggtatgttttttattattatatatgttttaagcgtataacattatttttcaaacatatcttatgagtaatatatatatatatatatatatttatatatatatattctacaaaaatatcctaaacataaacatctacaacatgagtcaaatgaacagtttgaggatcttcaactcatatttggatgtggcttagctactggtggttccgcaattggaatgggtgaaaccactgatgctcgaagagtgggagataacaaaattgatgatgaagtttttgaactattatcacaagagctagttgcatcaccacaatgtgatataccactctttccatgcacaaatccaaaaggacgggtagaaaaacttcatccaaggaagaggtttagaacctcatctactagcaatataggtaagctgaaaaatgacgaagaggaggatcctatgatcgtggttagtaataggatcgttaaagtcatacaataaagagaagaaagactaaagagagaagttgaataaaaaaaagctaaaaaaaaagaaaaaaataatctctgaaaagcgatgaaggaaattcctaatttatagaatcatattcgctacgaagcagttaccttgattcattcacttggaatgaaaaatgtcctcatagacatgtcagtagaagaacgttttggtttgattaagaatctgctctacatgattattacttttgagttttcttttatatttatttatcaattgtttcttgtgtggcaagacaatgttttctatttggttaatgaatctggtttcatacaagttctactgaaatagattcttatgcatagtggactaaaacgtaattttacttagatattttctaattattacgtttcgtaaatatgatttatcatatgactttctttttcttcattttagtgcgttctaataacttcgtaacattgacatacaattttttttcacgtaatggtcattcgagacgttaaaaataccaaaaaaaaaaaacacgagactctatatggttatatgcaagggatgagatttaaaatattgatttaaattactaatatattaggatgtggttggtgtactagatgacaaaagaatacatagaataaagaattatttgttacaattaaactagccaagtttcgaaagacataaataacataactacataccttatatcactatatcatatattgttattgtatgtattcatgatagtaaaaaaataagataataagtatataaatattcatattacagtaaaaaaactaatatttcaacctttagaacctcatctactagcaatgtaggtaagctgaaaaatgacgaagaggaggatcctatgatcgtggttagtaataggatcgttaaagtcatataataaagagaagatagattaaagagagaagttgagaaaaaaaagttaaaaagaaagaaaaaaaaatgtctggaaagcgatgaatgaaattctaatttctagaatcatattcgctacaaagcagttacctcgattcattcacttggaatgaaaaatgttctcatagacatgtcagtagaagaacgttttggtttgattaagaatctgctctacatgattattacttttgagttttcttttatatttatttatcaattgtttcttgtttggcaagacaatgttttttagttggttaatgaatctggtttcatacaagttctattgaaatagatttttatgcataatggactagaacgtaattttacttggatattttctaattattacgttccgtaaatatgatttatcatatgactttctttttcttcattttggtgcgttttaataacttcgtaacattgacatacaattgtttttcacgtaatggtcattcgagacgttaaaaataccaaaaaaaaaaaacatgagactcgatatggctatatgcaagggatgagatctaaagtgttgacttaaattactaacatattaggatgtagttggtgtactagatgacgaaagaatatatagaataaagaattatttgttacaattaagttagccaagtttccaaaaacataaataacataactacataccttatatcactatatcatatattgttgttgtatatacctcaacttaagaaaaagtgcaaaattcagagtcaaactaacgagtgttagtcaactccgtaaagatgctgagtcagcagacacgtggaatctgatgtgtctaaaacgacatcgttttgagttatgaacgtttaaaatgttaaatttgttaggtattttaatacctaaaccacatatttatttgaatttcctacctcaacttaagaaaaagtgcaaaattcatagtcaaactaacgggtgttagtcaactccgtgaaaaatgttgagtcaacagacacgtgaattatgatgtgtctaaaacgacgttgttttgcgttatgaacgttttaaatgttaaaaaatttgcaacatgcaggattcgaacccacgtctttaaagacatttaacagaatatctaaccatttcatccagattatatatttgttaatatctaacattatcgatattctatcgcaacatggaatcattaatatctaacaatttcgaacattttcaatgttcataacgcaaaacaatgtcaaagtaaattcaaactacacgaagtaaatgtattgtatgaccacatatacaaagtataggacgtcatgtggttaacaccatagacatacaattccgataaaccggtcagttgactccggcgttgactagggttgaccggcgttgaccaacaaaaaaattcaaaaaaatcttttaaattattttaaatattcaaaaatacaaaatattttttttttggttttgtatattcaaaaacatattctatatttcaatgcattaaatcttagaaaaattagttttacaaaaaaaatcaaaatttaactaaaaatagattaaaaatcattattaaattttaaattttaaatgaaaacaggaaaatattattatagttaattaagtaaggaaattgcttatttttatagtgtcaattaaaacacttcaattatttctatacaatattttttataaaaaaaaatcaaccacaaaaattattagaataaaacgtaatacaaatgaattttattttaaaaacttttttgctgaaatcaacattgttagattttctatctttttatatattaaaaagaaaaattgcaagtttttggttgtttatgtgttactacgagaacttttcttaataatatttgttacaaaaggaactacatagtatacaaaaataaatttagactaaagagtatataaaaaatattataattttctttaccatgcaaactttagattaaagagtcatatactcaatttcatattgcttcctaatacaattgagtatatgactctttaatctaaagtttaataatgatttttattctagttttagtttagttttgaaattaaaaataaaactaattattataagatttaatgcattgaaaatacaaatatatttttacgaaatatagaatatgtttttgaatatataaaagaaaaaaaatattttcgtatttttgagtattaaaaataattttaaatttttttgttggtcaacgccggtcaacactagtcaaagcctgagtcaactgaccggtttaccggaattgtatgtcaatggtgttaaccacatgacgtcctatacttcatatatgtggtcatgtaatacatctacttcgtgtctacttcgtgtagctggatatacaatgtatagtaggtatgtgtgaccatgtattctcttatactttgtttacctagcaatcttttttttaaattaaaataaatatgcggtttagatatgaaactacccaacaaatttaacattttaaacgttcataacgtaaaacgacgtcgttatagacacatattttccatgtgtctgctgacttatcatcttcacggagttgactaacacccgttactttgactctgaattttgtactttttcttaagttgaggtatgaaattcaaataaatatgcggttaatatatgaaaatacccaacaaatttttttggatacgaaaatacactcagaaaatagtacgggtatgaaaatacccttttcccgtatttgatacatgtctaattcggttcaaataaaccgaatatgaaaattttcagttttatttcggaagttaaataaatctagataaccgacctgaaaaacccgagtcccgaccgaaccgaaccgaaattaaattcggtttaattcggaagcatttccaaaaaccgaaattccctaaaaccgaataacccgacccgattaaaccgatttgccgaactcccaggcctaaattcacacttggcttagaaaaactctttgtagatgttaaaattcggtaaaattaacctcaccaaagctaattattaccaggtgaagaaagcattaaaatttcaaagtgtgtatgacagaggttttagaaagcgactgatgtacggacatatcaacaactcccctataaagatactcagctaaacacaaaaacagaatctattctcaacacaacactaaagacaattgtaccaaccacacaaccacaagagagagaaaagtgagaatgggaaagagagcaactactagtgtgaggagagaagagttaaacagaggagcttggactgatcatgaagacaagatccttagagattacatcaccactcacggcgaaggcaaatggagcactctccctaaccaagctggtactaatctctctatctaccgatccgtctttatatcttctacgtacaataattgtcttggcacacataaaaggtctcaagaggtgtggcaaaagctgtagacttcggtggaagaactacctaagaccggggataaagcgcggtaacatctcatctgatgaagaagaactcataatccgtctccataatcttcttggaaacaggtttttcactaaccacatagaattttctttttgtagtaaagttatttgttatgtgacattataattaaagcagatggtcgttgatagctgggaggcttccaggccgaacagacaatgaaataaagaatcattggaactcaaacctccgcaaaagacttcccaaaactcaaaccaagcaaccaaaacgtataaaacattcgacgaacaacgagaataatgtatgtgttatacgtacaaaggcgattaggtgctcaaagactcttctcttctcggatctctctcttcagaagaagagtagtactagtccactacctctgaaagaacaagagatggatcaaggtggatcttcgttgatgggagatctcgaattcgatttcgataggatccattcggagtttcacttcccggatttgatggattttgatggtttggactgtggaaacgttacatctcttgtttcatctaacgagattttgggagagttggttcctgctcaaggtaatctcgatctcaatagacctttcacttcttgtcatcatcgtggcgacgatgaagattggctccgagacttcacttgttgagcctatattgcaaaaacctacgttaatacatatttctctatacggacaaaagtatatctgtatttgtctgaacgcttctaattactaacttactaaggagaccaagaaatacaaataattatacgatccacatgttatagaaatgggttttgtctttaactaataattttttattattgcaaatacgtacgacataaatatttttgatagattttgtaaatttatgtatgagcaaatgatagagcttttattataacctaaccaccgcttaaccacccaacctataaattctacttgtgaattattggtaatacgaatcaactttacaattttgttattacgaaatattactagaatatacatgtatagtctatttataggcaggcatagtcattaatgtaaggaatttgttcttctcatttttggaatcatcgtataaataaatactagatgcatggttgttctaagtcatgtgccagtacatatttgaaaaacaaaacaaaggaatattccggattttccccctatctcctgtattttatgggtacaatttagaagtttatgtattttaaggatactaaaaaatcatgtattttattggacatcaaaaagtgtttgtattttaaaggaaactagattctgacccgcacatacgtgcggggtttcatattttaagaaatgtattagaatacatttttagtgaaagatattgtagtgtataaattataatgtgcatagaaaagtgtatagtgttatttatgatataataactaaattttttttattaatttatattatttatatttcatttgtgttttgcatagtaaatcgaatgttagatttgttttgatttgcggaataatatagagatatttggaaaatctgtgtatttttgttagtttgatgtatatacaaatgaattgtttttgtttgaaatttgatcaattagatgatataatgtaaactttactccgctgtacaccgttgttcgatttttttgtaactaaaaatttgaattttaggttatagttgttttgtaaatattgtttcttttgtttagtgtttaagattgtataattgtgttaaaattgttaattctaagattacactcgtagattatcgtcccgtatgagtatcaacccaaactcgttccaccagataacttcattccgtaaaattaaatattattttgttatttttaaatattcttattgtaatatattaaaaatcaagagattgacctgtggtagatcttggattaatatatttaaaaataatttgcgatttataaatttatgatattgaagtatataaaaccgatttttagtgtatacctttcaataattatataaagtatattttaaaagtcaaaatttgtataaattgatattgtaacctcatgaaatcgtagtgatttacccgtaaggtaccacatgctaatttttattttattttttataaacaaataaatttgttgattttagttaaaaataaaaaataaattaagttatatttgttttgtttattgtttcagattgtataactatattttgatttttaattccatgattttatttgtggtataatattgaccaacaccgggctagtttttgtaatctagtgtttaccctgaaagaaaaatccataagaatacgcataaatggatagtaaaattaggagcaaacatcattagaacataaagtaatttacatatgaatctctatctatttttttttaaagaatcaatattctagattgattgtgaggcaatatgaatgtatgcataacatttataagagatagattgtacacaaaaatagattttaatttggattcaatcttaggtttactgaaaaaaactaatcagaattacatattttaaatttaggatgacgaaaatattttttaaaaaagctaaaattagatctcaacgattttggtatgttttttaattaaacttatccttatgcattatcgcaaatatggtagtcattattgttcgaatacaattaattatctgtcaaaaaaatcatattactgattgttctcattttgactatttgcattaaaaaatttaaacattggtatttaaactttgttttactgttttaaaaaaaaagaaataatcgaatctagaagtatgaatatttcaaaagcttgtaactattataatacatttaaaaatatattttcttttatataattcaaatttagctaagtgatatatttttaaaataatgaaaattacctgttttgaaaaaaaatactttaaacgtttatatcatttaaattctaattaaaatgttaaatatatactgaaaccattttctagataattacaaatctaaaattcaaaaattctcttttgaatatgcaaaatcatagtttatattttatgtgtactaatcagaaataattaacatagttttgttaagaaaattgtattaaatttaaactaaatgaataacatattaccaaaataaataagtttacatatatataattcaaattaaaatagtctgatatgttatggaaacgttttaaaatgatttacggaaatattgtgtagatattaatttattgatttaattcgttttttttaaagcaaaattcaagatatttatttagttggagtagttgttaatttactaaattacccatgaaaaaattcatttacttagttttaaactacccttacaatgttgtagttcacacaatgcttcccaattaatagttgatgtaattttgtgaattttctcattaaaattaggaaatctaatattgaggcttatttattagttatccatgttagtcattgtaggttatgaaaaaaaaatcttctctttttgacaaattattaaaattttgaccgatgtattttgtaatacagaaacaacctaactattcttttagttaaactagggcgaaacccgcgccaagccgcgagctattttttaaaaaataattttattaatttgtatgtaagtattgaattttatttgtcatgatttatgatatattgtatgtagaacaaaaggattcattagaaaatgattggtaacacaatgcatttgttatttttttttataagatctatatagcatttataagttttggaagctaatgtttttgctttacgaacatttatttagaagagtcattaaaaaacaaaattgaaaagagttaaaaatcaccatatgctgattctggtgaggttaaagtcattttagattcttaagaatatgttatattgaattatcatctttgattttaatgttccacatgcatacttgattcataattcatatgttgaagagacatacaaaactaaaagtattgtttgtttgattttcagaaatttgaaaaattggaacttttttcataggagaatagaacgtactcaaatgattattagttattgattaagatccacaatgacgcttagtaaatctgataagatccttgaatattttgaagaagaaattcaaaaatctttaatgtctcttctttgaaattattcttccattgaccttcttcctcgatgttttcttttgctaagacttcattcagttcggaaataagctctcgatccaaaaaatggataatagatgcatgttgaagaacaaaataaaatagggacaaaaatcgaattgattattggagatttgagagtaaccatacctcatagataaatttaattagaccttaaagaacaaaaatgacatcttagttgtaacaattttttgcttgtttacacattatatcaacaatgtcatctgcaacattattcagcgtaagcttcttcttgaaaatttccatatatgttggtgatttctattcttaaaacgttagtttttttctctatcaaaatcatagcatcaaaccaaaagtttgtcctatttgtttttttgtaatttgcatattacttaatgatgatttttttatgaaccatatgcatatttgagtataaatttttattagtttgaataataggaaaatttttatttattttaggttatattaaatttagcattttatgataataatataatattttgatattttaatactttgtataattataattttttttttgattacattcaatttaaccgtggtaacacctgctggttaaccagtcattaaactcttgtaaacgctccaatttttaaacattaaacaagtgattcaaaatctttcataacgcttgataatcattaatacaccatcgtttatcaaacaatataaaaatcgaacaccttcattatcatcaatacatttaaattatttaataacttttccagcatatagtgtgagttgtttttctaagttaataagttatttggtcaaatggttagatggatcaaatgagttgggttgcaatgagaacccaccaattttggttaaaatgaattaaaccaacttaaatctctaaaccgatatcaatttgagtttaaccaaaatctctaaacgattgaatataatcaatctttttccaaatggcttcttcaacccatcaatttattcattatcaacacaatatcatcatcatatcacataccataggaatgatagctatcatgatgatgataacattatcataaactcctaattttcccgctgaaaacatattcttaattttttctccaaaaaactaaacccgtaattttcccgccaaaaaagtaaacacgtaattttcccaccaataacgtaaacccgtaattttcccgttaaaaacgtaaacccgtaattttcctgtcaaaaaacataaatccataattttcttaccataaacgtaattccgttaagcagtcataaagctccggcaaactctaaaccaattattcaaaatgttttataacgcttgaaaccgcacccgtccgattttgtaaacttctgtagtcgcaaccgtaaccgctgtgtttcaatagtttgtcccttagataagttttcttagtcatggacattcgattatccattcaagttcggttcgtatccattcggttatcggttctttcggttataaagtttagtatccattaggttattttgaaattttggtttggttccggttctttcggttttaaagtttaatatccatttgattattttaatttgaatattttgatttgtttttgtattttcatatattttttggttactttcgagtatttttactattatatatctattttgaattatttagtctagaattaactaatatttttgaaaatataattatattttggatatttttggttacctaaaatatttaggtttgtatccattcggtttctgttatctacatatacatttttgcagccattttagcaaataaatcctggatttggactctaacataagtaactacattcttcaagtattaaaaatgaagtaatcgtcaaattgagtaagattcaaaatgatacaaataactaaaaatgaagtaatctttaaaaacaatacattttatcatcataaaatatttatcaaatccatatcccatgaatttgtatgattatcaatcaaattgttcaccataagaaatgggttattattatagccattgttgaaagctggtctcgggtatcaaaatgggttattattatagccattgttgaaagctgatctcgggtatcgaaatggactattaatactattatagccattactaacaaagttttatagaattcatcatacatgacaaaataaataaaatggccacttaagtaatttttgatagaatttatacacgacgaaataaacaggaagttttaagaaaaaggttaacaacggcataaagttgccaaatcttagaaaatattgccattttacttagtaaaaatgtgtaaaatcaaatactaaacgaaaaaagtaatatctacatatacattttttgtagccattttaacaaataaatcctggatttggacttatttacaactcaatgccattaacattaaatcttttctccaaaataattaattttactataaattcttgatttaaattgtcaaccacattatcaatcaaatttaatccaaacaaacttcaattcaatcccttaaaattagcataaacatatttgttaacaatatattttaaaacaaagttttttgttaaaacaaatattattcttactaaacattttttgtttaaataaataaatcatgtatttgaacttatttacaatctcatgacactgacattaattatttaggaatgaaatatttaattaaagatttaaatcttctaaatccttgcttttagagttattatgtcattacctaaaaggctcaaaatataaaaaaattaaatattattatttaaatatttaaaatttgtaaaacattattaaaatttaaaattataaaaagtttaatatatcataattttttaacatcactatataatatatagagtttaaaaaatttcaattctttctgtcatattttgtgattcaaaattttaaaaatgaatatatattaaccaattggcgaaaaatgtgtgagttcaatgtcccacatcgactaaaatatttagacaatgattcataaacatatcataaataagattaacattaataaaataatggcttttttacgggacgggtttggcgggacgggtttggcaggatgttacttaataacaattgtaaattataaaataaaaatattttatagatagatacaatttgcaaattttatatatactaactttaaaatataaattgtcatcgcggtgtaccgcggattaaaatctattatctccataaaaaggagacggtatagcacgggtgaaatccaatagatatgtttagtttcactgaacgagattagatggtaggacgagtttgggtcgatagtaatacgaaacggtatatcacgtgtgaagtcatagatataacaatcaaaatataattatattatcttaaatactaaacaaaacaaaaaaaaattaaaaaaataaaaatataattaaaatttaaattatgtagttgtaatctagattttaacgcaatgaactgtacattattgttcctatattttaaacagtaaaagtcaaacatagtaattgtatactaaatattatacagatataagagttatacattcagaaaatacaaaatattaaatcatatatatatataatcgactaaacaaattaaatttttatttttaaaagaacaaaatagtcccgcggtgtatcgcgggttaaaacctagtagaatttaatatccattcggttattttcaaattcttggttcgggtcgattcaattttttgcatcggtttcggttttgtacatttagatcggtttatttgcctaggcctaagttttctaaataaagatgtttaggcccatgtttttatatagattttagttttgaaagtagtttagttgggctaggcccatgtctaattttagtttagttgatgggatgacatggaaaaataataagtttttattggtcaatgtaaatgaggtgtattaatcgaaatgttttgattagctattcattttgcagaggtgtcaagctgtggttaactgaaaaagctgaggtgtcagcacagcagagatttgtagtgtttttagggtattaattgattttgttaaatcaaataaaacttctttattagattgcatggaattaggaatagttacgcataagcgatttttaaaatcatattaggttaatcgaaaacatcaaaccattttataaaaatattgtaaatcgaatatataatatttaattttttattaatttaattaaagataaaaaaatcattatgtttaaagtcaaaaatatattttgtatcatcattttattctcatattcatcaacaaccttataatagtctaataatctacaacaaggtcacaagattataattatcttggttataatattattctaggtcacattcgtagagaggaagaaaactataagcaaagattcaagttctttcattttgaaccaattttctttttcaattaagttaagaaaatacccaaaaagaaaaattattgaataacattggtttagaattgtatcagatcagcttgctttttgaattgaatttttatcatcatcatcatcagctctttgagttgcaacattaatatggaaagtttatgttgaaaaaagtatatgtcttgagacattttaaagaaggttaattttcattaatacaatcaaataggttggaaattatggtgttgaatggggagattaaaatgcaacggttcattcatttatgtgggtcttgtggactatgtgtacaaaatattacttttctcatgtttaattctattgaagatgcggtgtaccggagaagtaaatcggagaagatagtgaagaagctaacaaagagtaaaatagaatgttaacaacttaatcatttacaattttattaactcaacttatatacttaagattaaaccaacatctataaccagaaataaccaacatcaataaccggttatatctgcaatataccccctcaaatctctatcttttaaatgtctcgtttggaaggtagagatttgacaacgacatttgcttcagaagatggtggaaaggacctggatgtaaagactttgtaagaatgtcagcatgctgattctcagtcggaacatgtaaggctttgagatttccagctttaatttgatcccttaccgtgtgacaatcgatctcaatgtgcttagttctctcgtggaagaccggattcatcgagatgtgtagagcagacttattgtcacaaaataattttgcaggacaagtaacttgaatatacagatccttgagcaactactgtagccaaatcacttcacaagtagcttgtgccatagccatgtactcagactcagcactacttcgactagcaactgcctgtttcttagacttccaagagatgagtgaagtacctaaataaacacagaagcctgatactgaacgtctagtatctttgcaagcttcccaatctgcatcagagaatgcattcaaacacaattcaacatttgcagagaacatcaatccttgacctggattcgtcttgatatatcggagaaccttatgagctgcttgaagatgaatatcagtaggagctgaaatgaactgactcagttgatgaaccgcaaatgttatatctggtcttgtaatagtgagataaagcagtcgaccaatgagttccctataagtagttggatttggtaatagagttccatatctttaaccaaatgcagattcggatccataggtatcaaacttggtttgcatccaagtaatcttgcatcctccaacaagttctgagcatatttcctctgacagactgaagtcccttgtgaaaatcttgaaatttctaatccaaggaaaaatctagcaggaccaagatccttaatcttaaactcagaccttaacaaagctttaagttcttccacagccttatcatcattacttgcaatcatgatatcatcaacataaaccaaagctgccacaaaagatgcagaagtaaacttgatgaataaagtgttgtcagcaggaatttggatgaagtttgcaccaagaagaactgatgacaatcttttataccattgacgtgaagcttgtttaaggccatataaggatttcagtaatcgacataccggattagggggaagagatacacctgcaggtggggtgtatccttgaggaatactcttgaagatctcaataagctctccatgcaagaatgcattggacacatccatttgtgttagagtccatcccgttgcagcagcaagaccaagtatcatctttacactagtcaatttagcaacaagtgagaaagtgtccaagtaatcaatactttcctgttgagtgaatccttgtgctaccaatcttgctttgtagcgttcaattgttccatcagggttgtatttaatggtaaacacccatttatagccaacaacattcttcccttcaggtaatgattcaaccatccaattcttgttctgttcaagagcatgaagctcttcattagcagccttagtccatttttcggatttcatagccggtgaaaacgtctttggctctatctcagcattagaagcaaagatataggattgaaaaagaggtgtatacgtatcataagagacgacggatgaaatgggatatggtgtagtctttttaggtgatggtgcttcacgaagtgtaacagataataaagtctcagagggaatagtatttgtaggtggtagattagaagtaaaaggaactaatgagcaatgatattcagaaagataaccaggagctctagtagttcgtttagacctagtaatgggtacagtattaaggtctgttcctaatgcttctttattatgattaaccgtactagggactaatatagatgatgatgatgatgatgcagatgatgatgatgatgatgatgatgatgatgatgatgatgatgatgatgatgatgatgatggtgcagtaggaatcaatgtatcttcatctattaatggcaatgagtcaacaaaatctaatggagcaggtaaaggcaagatagtattcaaaaacacatcaacaactttagaaagaagttcactaattttaaaaggaaaatcagtctctttaaagatcacattacgagaaacagaaatagtgtgagattccaagcctaaaaccttataacctttatatccagaaggatatcctaagaaaataaagggtttaggacgagaagaaaacttatttctttcatgtaaattcgtagaaacataacagagacaaccaaaattctttaataaactgtaatcaggtttccttttaagtagaagttcataaggtgatatgttgttaagcaatggtgaagacaaacgatttatcaagaaagttgcagtgattacacaatcactccagtattgcataggaactttagattgaaagagtaatgccctagctacattaagcaaatgctgatgctttctctcaacaacagaattctgttgaggagtataagcacatgaaaagtaatgaatcatgccttgttctttaatcaattcagtgaatgctaattcaggcgcgttctcagaaagaattgctttaacttttgtattaaattgtgtagaaacaagtttcagaaatgcaggaaaacactagacacatcacttttatttctcaacatgtatatccaagtagtccatcaactaaacaagtacaatcatcaactaaggtaagaaaatatctaaaaccttcaattgattcaatactaaaaggaccccatatatctaaataaacaagatcaaatagtttttcagctagattatcatgagacacataagctagccttttctgtttagctaaatgacagattttacaagaagaaacatcacaatgaaatgactttaaagaaggaatatgactaacaagtttttgtaagataggcgatgatggatgacctaaaccctggtgccacaaattgccatcatcaagaacagatccagtaaaagaacaagcttcaggtattgatgtagagagggatttatttcctgtctcgagaatgtaaagattgtgatatagtttacccctcccaatcatcaagccctgagaaagttcctgaattaaacaacaagaaacatagaaatgagctgaacatgccaaagttttaatcaaattgaatttaaaatcaggaacatgcaaaacattatgcaaaatcaacttatgagttatatgcacagtgcttgtatgagtgatagagaccctagtaccatttggtaacagtaatagtaactccagaaacaggctttaattccctaaacattactaagtctgaacaaacgtgactagaagctccactatctataatccgagaattatgcgatagaaatgtttcaagagttgaaagtatatgattttgaaaagtgagattattattctcatatttaaggctagtagaaggaaagggaattatagtaccagaagtagaagtaagagccataagaccatgttctgagactgtagatgttggactaggattacccgaagaagcttcaggctcttgaacttgaacttgagcttgaaattgtgaaatcatttgttctatctgttgtggagtaaaatcttgtagacttaaattgtttccaccttgtgtgacatgaggcatctgttgaatattagaaccatatgaaccataaggaaccatcataagattaaaagagtagccttcagacagataagcacaattctcggtgtaaacatgagccacatcattagctttctgcattgagttagcatatggcttcatttgcatctgattaggaaattgcatccttggctgactcggcatcatctgtatcctaggttgaacttgtaactgtggattaaccttgtaagtatatccttgattgcctattttcatgtctggtggataaccatgaaccttgtaacatttctgaaccgtatgtcctactttcccacagtgagaacaaatcggtttctcacttgctttgacagtattataagttgcaatatatgcattctctacatcattcatcatgggagcaacactctgaaaagacacattatcaatccgagtagatggtttcacagaattctgtctttcatcttttataaaaagcaaactctcacctatcttcttatcaaccaaattcattaaccaagtactaacaatgtcattgcatctagaccaagcaccaaagtctctatgatcttttggtggtttagaaatcgtaccgtttatgaatcccaacttgtttctaacatttaaagccatcaagatcgatcgatgccagaatgaaaatcagaagcagtcgttagtcgatctgatacaagaatgagtccagcgtgatccgcactatgaagatagtaaggattctcatattgatcagctggataacgaaattgatcaccattgttgttgatcggaggacgagtcacccgaatagtagattgaggtacataagatcccattctcagtgtaagaatgagaaattacaaagaaaacgtgacgaatttgatgaatcgaaaacgagaatcgtcaacgttaaggtcaaaatgaaagaaaaaatgaaacagaacggaaaattccggataatcggaatcagaaacttcaaagaatcgaagaagaaaacgtaacacaaagaacaaagctctcttccgatgaacacaatgatcgcggaatgttattgtgctctgataccatattgaaggtacaatgtaccggataagtaaatcggagaagagagtgaagaagctaacaaactttcattattgagtaaaacagaatgttaacaacttaatcatttacaatgtcattaactcaacttatatacttaagattaaaccaacatctataaccggaaataaccaacatcaataaccggttatatctgcaataaattccaaaaataattacattgtgcattggggatgttgaaaaaatgaagattccaaaaataaaaatcttcctcatttattgatgcggagcagaagctataaaacaatagtggcgatgaagagatgttttgaaagcttaatagagagaagcgtgatgaagacgtgggctctgtttcacgaatggagagagagaacacgagaaccacggaacaaaacgaagaaaattgcaaatggaataaggtgagagtcctccttaaggtcctacacaaagacaagatctttgggcaatttagattgcctctttttttgggttttcttattatcaaaatcaaaggtggtttacataggtgattacaatctctatttatagagttgtgtaaaagactcagagaaacttaattctaattgtaaaagataaaaccaaactgattgaacattttttcaactacaaaatatttcttttattaaatatattatattgatgaaccgaatgaagtctaagtccaaaaataataatacattgttcatcgtggatggaaggtacatatcatttgaaaataaaataaagaaaatctttctcatttttttcccatcaagagtaacatcagaagtaaattatatttcacatattgtcaaattttattttttttcctacccaagaccaaaatatttaacaaaattatttacaccatactgaattttctttttaccacgtttaatccacctaacctagagtagatgaatacatttttgataaacagaaaaaaattagaaaaaaaaaatgaatgttttttcaagagatacagacaaaattaaaaccggtgattttcgtttgaatcatcaccattttattcttcttaattatcactttggtgtctgtactttagattatgctctaaacaatttatatcatgccttattgcttacatattatattatggccaaaatattagcaaagtttacaaaaactgccacctatgaatttgaacttttaaaaacgttactctgcctatgttatcatcttgtaatatatgaaacgttgcaccattctttgcacaaattggtgtatgtaaatagtgtttcaacatctctatcttatgcacaaataaaagatcttttggcttaagagttaaaacaccaactgtgtttgcggttggaggatacaaagaaatgatggttctctgtatcaaaccctcatctatggaagtctttttttccatagacaacattctcaaacagtaagttacaaatacagaatcgatggcactttcatcgcgaggtattgtgtttccaccaccaagacttgttttacgtatacatgtagtcatcctatagcttctggataaaggaaagaacgagatctgtatgtacagagaagagttgtgtatccacaaatagctgttcgcatcataacagaaaagcggtatgtcagtaaagtctagtctttacggaaactatttgactacgaagcatccaatgagaatgcaaagggctctcaccttcatgaacgggcgctgacgactgggaaaggagtcgatgaaactttcctttaggagaagtgatacctgaaagagagaacaatatcaagcttaacatatctaaaagaggatagcaaaacacatttctctattctaaaactaaggactgggagataaaaaaccttatcgttgttggattgcacatttgttatggtgtgtgactgcagattagagcaaagagaatcaaggtacgaccttaggacatccatgaagccttttgcagcatccacctttggataatcaaacacaattgacgacatgggtggttaggaatagcacgttacatagcaaatctctagagcaaagattttaaaaaaatagacatagagagagcgtcagagacctgcacatcagtacattcatacactggtcttttctttgctaggtagctttctccgacgagctttgagtgataaggacttagcgcattatataagtctcgatactgaggcagctggggcatacttggtgacttaacctgaaatgtcattagaatatagaccgtgaaaatgtgcaggccctagtaattgtccaaggtagtgctatcaataaatcatgaagatatatggagctttgttaccaaatatgtgactgctaagaaagatactttgcttttcagaagagaccataaaagatcattaccaaaagatattgagagcaaaggcagaaattgacctggttctttagaatatccacgacgataacatttgttagtttcgactgaacttcgctagttttgttcttcaccccaacctagaatgagcatcgcatgctaagcaacataaataattatgatacgtatcgtataacgtaggattcatgttcacaaactcactatgtaagggactggggcatccaaaaattccagcatatcatctggcaaaacctgaaaatcaaggccagccattatcctacatgggttacttaaggatcttcagtgaacaccagacagagaaaggatcataccggcattaaaaggctctgccaccgaaagggacggattactgggataattgataaaactgatgctgctaagattccctatgtagttcacataattatgttctgttaaataggaacatgcaatatttgaagattaaaaaatagtagactcaatagatgatgtcacagagtgtgtgctttaccaaattagagcaaacaaatacaatctgtttctcaagcagtgctcctgctagtatcatcaagacctgcaaagaaaagaggaatatcagaatttaaggtaaatctatccaaatgtaggaagtagtattagtagaaaatcaatcacagtaaccagagaaagaatgcattaacattatcataaaaacactgaaactcgcgtccacatagttccagcatataacacttatggagacgataagagaccaccgaaaaaacggaatattagattacttggagatcattaaatatgattgtgtttttatatttctattttgtgcatatgaatcagaatcacagaaaccgcaaagaaaagaaaatatgaaaagcaagaaattacattgtcaagccgcagtgatccacataaggaggcaacagcccatgttgataatgcagctgcttcttcctcagccatgagtgttgtgtgtgcctgaagaccaaggaagataagagttttgggaaagtcatatataggtttccagatgttatgaaatgcagcaaaaatatatgattgtcagatacaattgggttgatacctccgcgagttctagactagtgctgcatgatcttagatcaattgctgatccaggagtatgcaatgccacttcattaggtctatgatattcaaccggatgaagatgctccaaaggatgaaatgtaatagttgaacctcttgccgggcattttaattggtaatactcacataatatttgcaacgacccattttttttggactgatagagatttattaagttagagcgttaggagcggcatacacaacataggaaacttccaagaaagcaaagtagacaaacctttgcccactcaaggatatcaaaattactacttgtatcatcttgaccagaaaaggatgcttcatctgtctcagtatcatctgcactggtcctagaatgcctcctctcacatggagcagcctgaaagctgcaaaaagcaagttatatgctttgcagaagtatgaaagacaaaaaaaaatgcaaaccctcataaagcaatacgaaaatttctctaaccactaatacacaataattaagatttcggctcacaggattctttcaatatacaggtaatactttgcaaacacgatcaacaagattatcgtaaagttatcagtacggttaggccataaagtgtggtgaaagacgatccaaaaatcttcaactagattgggtgatattttcgatgtatatttttacacatatttaagtaatagacaggttaagagattgcttgttatgcgaccaaatagatgaagaatagattttgatgatgtacctagtgctagaatcagagatctcatccagataaggacaccgaagaagggggccaggctctggtaaacaactttctctgccttgcttaataattggtaaggaatcatcagctttggtgacacggtcaatagactctgcagagtcatcagctttctgattagcctcacaagtcccattatctgaaatttcgtcagctttagggagtttggaacctgcttcaacagtttgttcttttgtgtccccagagtctctttgttggggtgatgaatcatttaagctatcttcattgctgaaatctgttgggggttctaaagacgcacaactgatgccactcatcaaatgctctagtctttcttccaagaagatgctacatcaaaaggagtatcaatgtgagcacgacttcaaaaagcgaaaatggcaacaaggaattaaagcattttttgaaatatacaagtcaaacatatttttgtgggatgataaaacttgtgccatgctagattcggtttatgtcacactagaataacctgaattgcatgaaggcaaacaagatttgagaagcgaatcgatacacacctatttaatacaccaaaatgcaattcaaaaaacggcagtctggtaaggacgcaatagcatctgcgagttgtcataacatagcgacttaatgatgagcaagcaggttgtttgtccaaaaccgtggaaagcaatctggacggtttgttcactatttcttccactagtaagcagcatccatacaaagtagaattatcagcaacctgagaaaaatatcacagaaatgactcatccaaatagagaagctacaatgtaataaaggttttaagcaaaagagatagtttggccacaatgatgcttacctgtaacctaaatacaaatgaaaggtcacttggtctaagatgttcctgcaaagttagtatcaccggttttaaaattagtgtatgttatcgtatatgaattttagctttgtgaatcaaagttgacacaatgattaatccccaatatttttccaatatcacaaaatttaatccagtagaaagatcaatttttacatctacactccacatcaggcaagtacctgactgagaataatctcactcaactcgctcatggaaggagttctctcaacagcatggacctgaaaccaatagttaccactaagaacttaaaagacataacaagcaaaaagtgggagtatgaagtacatagtttttacagataaacacagtaaatcatgaagggtaaaaggcacagaaacatagagagaaatctactggaattaaaaagactaccaacacttttaaagagctttaaaagtgagtgaactcaatgtactagcgaagtaagtagagaaccaacatatattttaaagtatgaccaccatgcgctattactagacaatgcattgtgagaaaatttcagctcagaactgtaagaaacttttctagaagtgtcaacatctacattctaaactagttacgacataacgggttgacccacagtgcaccggaaaacttgttatgtattacagaacagagaagcaaaacaggtaggaaatgaggaaatagtgaattaagcacctcaatgcctccaggaaagcaaaatgaatgaagatccttgtatttaattggaggctgcttatcgggagggtacacaagtaagacctggatataaagtaaatacttagacttgctagcttgcagatgagaacaaatatataaaagatgatatggatacctcacctgtggttcgagactgggttctacacgggaatgattttgagagacaagagcacttcgcaatcttcccgaagagccttcagattttcgagcaatgtactgcctctcaagtgcttgaatatcacaattaggatgaagtccaaccacaacaacgctttcaaaaagccttgatggatcttttaatggtttatgatcctgtttgatataagttagtgacaaaagtgtctatagtaacatcgaaacgtagttgattcttcattcttaaacacagaccaaatattgcacctgaaatttcgcccattgacgcttttggctagtcaaaacctcaggattgtacaatacactcttggtcttaggagtttcatagaagttcttaaccgctttcgaaacctgcctctgtaacctctccaaaggactatcgctaccttcatctttcgacgaaaagacaacagacggccttggcgggtttatcgcagaagccgcagcagcaaaagccattgcaacatcttctgaagtctgcatgaaaaacgaagcaccccagctcggactactacttccttcctcattcttggccataacttactcaacactacaagacaataacacagtatcagtaacaaccacacttgattaaaaactggtaaaggatcatgctttatctatattagtttaccaatatggtccataagtgaagatacataactcaaattgaggaaaatataattccctcaagtatttcaagacagtgataggtaggtaatgagacactctctagcaataaatcataaccaaaaatcaaccttttaaggattttgattaagaattagtacaaacagacaagacaaaaatcagataatttgcaaaagcgacgttagtgagattataacttagatcaatttgttcaattcttagtgttagaatccctaaatttagatcgcaaatcagtaaacagaagaaagagaataacaaaatcacacaatgaaacattacttgcaagaacttctcagagagcaaataaatataggaatttgaagatacctctgataagcttaaggaactacaaaaaccaaagtaactttgggattacaaaaaaaaaaacagaacagagagtaatcagacaaataagataagaccaaaagggtaagaagatgaagatctcacctacgcaaagaaacttaagcaagcaattgaaaaactctgaaactaatcggaacttggaataaaggagaagaagttgattattattatggaggacgaagaagatggtgatgtgatgatgaggaagatgatcctcgtgggttcaaaaaagtttgaggaaataaaaaggctgcgagcgagagagagacaaagagacgaagagatggtcagtttcttttttcttcttcttcataataataatatcttcttcttcttctgtaatacaatgtttgtcgttttgtgtcgtgagactattaagaccaatcatgacataatgtggaattttctgagaataccggttttgccccttttcaattttctttttcttttttggcctaaacttttcattaatcatgatgtccattgagtaagtagataatttatcaaaatgatacagtatattgtatttttataaatgtgaataagttgataaattattgaaatttttttagaggatgtatttcataattttagattcccgctacggatcctctagatgtttggatatttggttcatttacattcgattttagttttttaattctggaatttaagatc

SEQ ID NO: 765 - DNA, 41465 bp, Arabidopsis thaliana
tatataggcataaaaaaaaaaatgggttggttctggttctatcagttctaaattttgtgatccactatttttttttggatatttcaagttttactatttttgatttctttctaaatattttaagagttttggatattattggttatttggtctagaaaaactaatatttataggtatttaagattttttgggtacccgaatattttagttcagttttggtatggttccaaaatttttggttctacattttaggatcaattcatgtattttagaagatcggttcggttgtttttctttgaacttatatatctttatttttcattggaatatattaatttgtattcatataattaaaattttattgcaaatatgtaatacatcaacctagtgacatttatcaccaaaagagtattgattatcaaatcaattgcaacacaaaaaactatgtttttctcaacctttttccaaatggcaaattactatcaaaatatgttgaccaaaaaaaatagtcacatattattagtggctacttaatagtcattagccactaaaaatgtggttatatttgaccatcaaaatatattcatgaacaagctagttttcatttggccatggattgttaacggtttcataataatttggtcatcatctgtggctattaggcattgaattcacatgacctttaccacatttactacctatataagcatgaccaagctagtttccatttggtcacatactagtagcgactagagaacgtccgtagtatgtggtcaccaaatataggaggccatttgccgagtttacagaaccacttgccacatatgtatagggtttggtgtggctataaagccccaaacttttgttgcctaatcagtggaattttagccacgaatccccatttattggtggctcgatagtgacttttctaactactaagatttttatggctatctgatgatcgcttaacaaaacagtcaacaacagtttttcgatcaaacagtagtatcacagtcttgcatttacatcttgtaaatccctttcatcaacatctggataagatatctgcagcaatatatattctatgttattaatgcgtgtaaaagaacaacaaaaagttgtttagagttataaaaaaatagtgacaattgtagagtgttacaaacaatgtgaatcctattcggtgtatccacttcaacaaatctccatggcatagctgaatccgagctttatcggtaacaattgagcggagtttcttccttgtaaacgattctagtaagatactgtctccgtagttttctaatctgtctctgaaaccagtttctcagtcttgagctttggtaatcatcaccctctcgagcttcaggacaccaaaaaatcacaattcccttcttcttttttgctaactgtaaatctcaggctactaaaaaaatattactagagacatctctccatgtttatgtacgtcgcatcagaccctcttcttctgtattctcacaaatacacccgggaagaggatttgcgtagaaactctcttccagcttcgggaactctcccgactctctattatatggagctccgtttcggtctttatgtagctttttcactttggaactgaactttttccatgaaattcttccctcatctaatgcatcaacaagtttcacaaagttcatcctgcatcgaaaaagaagatgtgaccaaaatgataactatttactacaaactagttgagttgggtattcgggaggagcatttacttgtctggatttattgttttcttgaagtcttcgaatcgcctgtgaccttgaactgcttttgccatgttcccatcatatgtgtagagaaatacctcactctgaagtgcaacgatataatctaaaccagccaacatattctggtggttgttaaaaggactcagctcttctttggtggcaagaattgaatgtgagaaaatgttggggaagtctgtgttgagaggatccatgcttccatttccatatgcttcaccagctacgaggtatatccgggagctggatgggaattccaaagccctcagtaaaagcgaggtttcccttggagtcaacggacaaccaccttgcaatcttctctctgttccatttatttctttttccttccagtgactaacctcataccgcatctgtcgtaattcttcgtcttcttcagctgtcaaactatgactgcagcctgtgaaagccagcatatccttctcatacctgtggaagatgatatacttgtcatggaccaaactttagatgggagatatttcagtatttgcatgataacaccaaactaattcaaactggtcttgcatctagatttatctaaataaacttgcataaggcccaaggtcaaataaatatgatgtgaaaaatagacaaagctacttgccttaaatgaagagcaaggtatggacctctgtcctgcctcattctagaaactagaacgtttcccagttcctctattggagctgaatatttcagcgccctataatttactcggcaacgaagcttttgtacagaatcaggcaggtcgttgttagcaagccgagaatcagtgtgagttaagtacattacgatatgctgtttcaacaacggaaggacctctttcttgtagtaaccaacctgtaataaagaaaaaaattactgactgagggtcttcttgaaaacaactgtatgcaaatactagtgaaccaagggccccaatatggctatattaaccctatatcaagaaagcaatcttgaccttagaccacgaaatgggtgtcttaacgaaaggctcgattccggctaattctgatggcagcatctcaactatgtgaatatcatccttcaactcctcaatgaagtgttgccaatcaaatagatccttaaagccactacaaacacgatgtaataagggaataagctaaagagcagatagtaaaacgaactgaaagtcacctatcatgactatggtactggtttaaatatttttctttagtatgccaagaacaaagatgcaatctgtttaactaccaaatcttctttaattaggtaaaatctacagagtgcttaacaagttacgtgctttagtaaggatgtgagaataataaagttaggaaactaacctgtcatctgcccaatatgagctgtgatcaagtgagggaagaaccaaagttgccttcataattttagccactgcaaccatatcacatatctgcattctaaaatagttaaacgcatcagcctagaacttataaacagacaataacttgagaagcattgaaaaaacacaaaagcctgaccccaaatctcatttggtttagtcctccattagcatttatgagaagatagccattcgtattagcacccaactctgcagacaatatatactcatacggtaagaacttatagaagagaacaagaactacaaatagaaaaagaaacaaaaaaacaaacaaattgctacttattttgccaagcacatacttttgcgactccttgaactgtcaatgcaccgcgagaaatttccactctcaggttttgcccagacacctgaaaactaaatgaagaataaagcatgatttcagtagaaagcactagagcaagattcatgatttaaagcttgcgcccaatgaagcaatggaaagaaaatctgatactcagagataagacttacttcaactacactgttttgatcacccaccacgtctgaagcaaccataaccaaagtaggatcaacatcattccctccatctttatagatataatcatgggagctatgatcaagtagatttactcgggggatagataaatcctagaagaaattaccaaagccatgtcagatatttaatctccttctcccatcttctttagccaaatagaaactaagccacaaatgtttaacacttgaaaacattagtagcatcagaatgtgaagaagatcttaatcaagcagccaaacacacacaactcaaggtggaaacttagatacacatccacatatgagcaacatcaaaactcaatttatcaagttgtagaaacagaagccacaaatgttcaacactccaaacactactagaactagaaatgtgaagattttatcttaatcaagcaggttctagtaccatagaaaacaaaggccttctcaagcaagaagaagccacaaatgttctaacacactaaacactagtataaacagaaataaagagacctgatcggaagcagcaccatcaatggcagatccaagccaaccagtagcacaaatcttgaaaacacccaaaaacaaacaaacaccacaaaacgcaaaaaacatccaatgaccaagtttcttcctctctctcaaactaaaatccgagacaacagatcccatcggcttcctcaacaagcctttcacaactctctctcgcaactgaccataagtctgatgttttctattgagagcagaatcaaatccaccactcggatctgaaccggaagagccagaaacaatctctgatctaggtgaattaagcggtagatcgatctcgtgatgaactctcaaggtcgaggaagtgttgttgttgttgttgccatcaccgccactaacaccgacgtgagtattattattattgctactactaccagcggaaccgccgcgtttgaatgattgagcacgacgagtcattggaccggaaaatcgaggactgttgacgtgatgttgaggtacgccatcgccaccgtcgtggtggtggcccatttcaagctcttcttcttcgattgttgctatcttttttgtgaagaagacgaagaattggtttttgcgtttatcttcaattttgatttttcaatttatcgaattgttttgttgtttcctctctttcaagtgggaaactgagattttgcgttttgttagtgtttttactgtttttctctgttttattttgtgtcgacaatttttttattattatttgtgttattacatagtacacttatggattggtgaataaacaaaaaaaaaatgtgaatagtacgaatttgtcgagttgggaccaagggaaattaaacgagtatcagctgtcaagctgttcaaataaatacactcctctagtttctatactacaagaaattatagcatattaccataaacaaaagcgttggaaattctggacgaaatatgtcggaaattcgttgaaaaaactagggtggacgtactgtgaatttcagtttgatctcgattcgcctttttagttttacggtttttcaattttaaaaaaacttaaaccatataaaaacttttgtaatttggtttgattacggttccgttttatagtttttactgatttttcggttttataaaaattgaaattatatgaatcttagtttcgggtttttcggttattccatgtttttacaaatatatttataagttttatacataaataaaagtaaaatataataaaataatatatccaccaataagttaaatataatttaaaaattaaaattcagatatagaaaaaaattaataatattaatttttggtttttaaattacaaaaaagatcaataattataagtccaataaagaaacaattattaatactattattaaacacaatatagattggacaatatatatatataattatttttatttttagtcaaaaacaaataaaaaacactcggttttacggttttaaccaaaccaaatataaaccaaaaacttataaaaattaaaaccaaatgagttttatgctaaatcataactcaaccaaaccatttatttcgattcggtccagtatggtttttcgggttttggttattttacccaaacggtgaaaattcgttggaaactttttgtcaaaaaatagtaaaaaaattgttaacagaaaacattgttgaaattcatcagaacccaaagtccggaagtttttccgacgaatcttaccaaatggcgaagaaaatagtaccgatttgccaagttgggaccaacaagaaaaaccaaacgagtatcagctgccaagctgttcaaatgaatacagtcttctagtttcatcactacaagaaagcatagtatattttgaccaaccgaagcgttggaaattccagacgaaattgatcgtcaaaaatattttgtcgaaatgttgatggaatttcgtcaagaaacaataaaaaatcattggaaattttttgtcgaaattcggaatattttcgacgatttttcgacaaacgtataaattttttacaatatattgttgttcctaaatgctgaaaatcaaacaaaaagatcttatgaatacttcattaaaggtaattttctgctagtgaataaagagaagatatgtaagtctaaacgatcatattcaagataacataaattttatatattcggaacaaacaatcatgctgaaattctcaaagcaactcatcgaaagatcaatccggaaaatcatagataagtgggtcaaagagatcatcatcttggccttgttgcctatttcttctatttcttcttctacttgaatttttcacggtaaaaattacattttggaaagttatacccctactccaagagatgactgtttagtctttagaatcgttctactaaacaacaaatcagagttttacaccaaaactcaaaacaataactcccatatttcctcagaaatttgactcttcgtccaatcacgttaaccaattttgactatagcattgaaatttttcggggagacaaacaaaagttgttagcataattggaaaaacggtcatttcatacccgagctaaagtagtatgttcaattcatacccaacgtttactgttgtgcaaatccatacattaacaaaccaaattttcaaattcaaatctcaaactcacaccattcatgtcaatacatgcctaagccgtgacggtgttacgaaaccgttaacggttgctcacatggatgccacgtatgacacgacgtcgtttagatgaaagaagagacaaacaaatttttgtaaaacgacgtcgtttttgtcgtcttaaatcaccttcttcttttttctttctttttctttcacgatgacaatgttccataagcatctaaggcttggtaacaaaacccactaaattctatatattaagctacgagtatctagtaatatttatgttaagagattgtattgtcttgtcttgaacttgtaatatttatgagattgtctggtagtattttcatcacttgaaattggaatgagatcgaaattgttaaaacagaccaaaagaaaccttaaatagcaataccaagtttcgaacaattatcatttaatccggacacaacttaagagttcacttgagattataacaaaaactttcaatctcttcagacttaaacaaaagcctacattcttacgtctcattacttttcttcattccacttaaattctgccaaaatcccaaaaaaaacatgattaactagagcaaccgacaagcacaattatcttgaaaaaaacctatattaccttagtcaaaatgagaattctgtgatggttggcttggtcgttggcttgttccttcattggtaccaatactcatagactgactaactccatcaggtgtcttctttggccaccttttgttaacgactcccacactaggacaacttcttgtattatgaccttcggtactacaacgtccacaacgaatgctccgtccttcttttgaaactttggtcctcttttctggaggctcttgtactccttttcctttcttcttcttctttggagactcattcttgcccttctttcttttttctttctttttggtacctgttggtcgtggtggtggttgaatcctaggttcacctgatcttatccaaaatccaataccattaactcctgagattgactcagaatatatcttcaaatttttcgatgccaagtaccaatcagagttgacgagttcctcaggattaacctttttgttcaatatgattcgcaagacatggcggcaaggaatccctgtcatattccaccttcgacatgcacatgtttttgcattcatatcaaccctaaagccatgattattttcaagaacctcaaactgtccatttccacaaggaaccacttgacaatacttacgatagattgtttcctctttgatggtgttggctactttcaaagtgaactttccttgatgtttaatcgcctttctcaacctcatatcaatacgaatcatagtttgtcgtcttattgtctccaacatctccactagtggcatctcccttgctttattaatcgcattgttgtaagattcagagaagttattagaaacatcttcacaacttgatttgcagccaaaaaaagcacgactacaattgcgtggattcctcatcattactgcatcgtacacaccttgatcaaactgcttcaattcgtcaatggctctattatactcataatcgttaaagctttttgcaacagcgcagaacaaattctttgacaaatcttttccaggataaactcttctaagatttccatatatatggcgtgcacacatccggtgttccaccttaggcaactcttgatcaacagtattgagtaaaccctgacatgttaaatggcacttgttataacaatgttaaaaatagtctcaaaatgagaagaacattagatatagtaaacgaaccttttgcctatctgaaataagagtaaaaccatctccatcttgcagttttaaatcacttttcagcttcctaataaaccacaaccaagaatctatgttttcagtttccacgactgcccacgcaaccggatagaattggttgttggcatctcttcctacagctgctaagagttgtcctttcatattattttttaaaaaacatccatctatgccaattattgggcgacaatacgcaagccaagttttccggagagcatcaaagcacacatagaatttatcaaacttgactataccatcaatagtgattgtctcaacttccactgttgaaccaagatttgttctacaacaacaaatttcaaagttagataagcttgtaaacaaaaacaagaatcaaattcaaaatcgatttaaagatattttacttactccaaaagttgttccttgtaatcatgtattctagcaaactgctcatcatattcatcttgaatcattttcaatgcttttcctctagctttccgacactggtcactggaggcaattaatgagtaccgctcttcaatagctttttgcattgctttcactttgaatgttggatcttgcctaatgtcattcaagaacatatctacgatgatccgactcttgagaactttgcaaaacccgtcctttgtacatgcatgctcatcaatgaatgttttcaccatgtacactccaattttttcatcataagcacaataaattctgaatttgcagttacctccaatagaacaccttacttcagatttctctgatccccatcttgtgaacttaatattgactcctttcttaagagcatagtcaatcacagcttccttaaactcagctatactgtcaaagacttgctctattctaatatcgccactacctttcttgcatctaacatatcgtctttcaccttcctcacaatctgagttcagaggggtactttcatcattatcatgctcttcttcatcaacaaagcctgctaagttctgctcaactcttgcttccatgtcaataaaaactctatcacactcagaaccatccccaacagctccatcaccagcagctccatcaccaatagaaccatcaccaacagctctatccacatgagaaccatcaccaacaactctatcaacatgagaaccatctccagcatcaccattttcttctttctccaaaaaaatatcgacaacttttgtccaaactgcggcaagacacattctttgaaagttttgatctccattgcacaattgcttaagctctgaatattcctcatatggaagcttataccaaattcgttgctgccaaatagattcgttcaatgactccatcaaattagtcaatactacttgtggtttgctttcaaggctgagaatacctcctccaacataactaactttaatcccattctctacaacaaagttcccaccgtagtagcattgaaaaactgcatcttcagtgctgaataagaaagaaataaagtgagtttttggttgtgacattttatcgaacacttggtgttcataaaattacatatcgcttatcaactaaaaaaactccacaatctcatctaaactatagaaataccaaaggaattcattacattttataacaatacactcgcaatttgatgatttgataaaaaaaaacctaaattttataaaccataaatttgaatgaaaattacctcattttccttcctcacaatagagattatgagctggaactcctattccactaatataagctcttcacgatagatgcttatggaacattgtcgtcgtgaaagaaaaagaaagaaaaaagaagaaggtgatttaagacgacaaaaacgacgtcgttttacaaaaatttgtttgtctcttctttcatctaaaacgacgtcgtgtcatacgtggcatccacgtgagcaaccgttaacggtttcgtaacaccgtcacggcttaggcatgtattgacatgaatggtgtgagtttgggatttgaatttgaaaatttggtttgttaatgtatggatttgcacaacaacaaacgttgggtatgaattgaacatactactttagctggggtatgaaatgaccgtttttcctagcataattagtcctaaagatgaagataagataaaattgttagtattaatgaatagtcataactgataaataattgtatgcgataacaatttgctaacaattaattgtagttgaacacaagtaaactgacataagtataaattcgtttttttgttttaacattttacttgcaaaaaaaattatttatggtaacaatttgaactatgatacgtccttagctgccagtcggttgagcaattttttttttttttttaatatcaggaggttctgaggcgaaacctgtaatttccctaaacccaaaactaaagtatgtaatattaatttcatctcaggcgtcgcagtcggttaaacaattgatacgtcagtatttgattttgaggtggcagctttcatgcatctaagagcaacctcatcaatggtttctaaacttaagtttcttattttaaagagataaattttattataaaaaaatgtgtgagtttcttgattaacaagaaaccatctccaaaataccttatataaaaaaattttaagagaatttctaaaatatttaagaaacacacataattaaataatattatttttgttgtttcaatgttaagaaacttatatttagaaaccaccaatgaaattcctataaagatgcaatccctaaaatcttgatagatgtaatgttactcgatagttcccgtcatgtcaaaaatattggtggttcgtaactaaaaccacctgacatatatcttatcgtttgacttatcataggcatgaaaacattagaaaaaactcttggaaattataagttctcttatccattattgtctatgccacacatattaaatactcttaagagtttttgatgtgcggatcatttgattgattgaccaagaaacttaacacaacaagtttaaagagttcccgacctctatccggtacgtcgcatgagggtctctccccacaaaattcactatcaagcatggcccatgcttgcatgagggcttgaacatgcgacatagaaactagactgatcgcgtgactagcccccttatggtatgtaaaccatcactaaagtagtgtggtaggtaaatttcgatatatttttccttagttcatgcatctaaaacatttgaaacaattatttttacatcgtgaaatcaaaacgtagttattgtagaaatcggtacacattaattttaagtaagagaaaaagtcgaccaaattagcaaattctattaattattatcgttcaaaaccgcttcaaattcaaaaagttccatatgatgttacgtcattgtgtgggacaatgcaaatgtcaacaactcagagtgaacaagtcgccttcttcgccaacgcgctcacataatttgtgtaatattttatcttagtgtttctagaagcttgactcgctcgcatattgcaattctaccaaatcatatttttattttaatgaaatttctatgattttgacaactaattcttgattttgaccttactatatttcttgtagaattagatagggtgcaattctcatagaatgtttctttaaatttatttctaactaatattaaaaaaaactataatatattcggatttagtcttaagaagatttaccgttacttctaatgatatatttgaatatttgatggcaaatcgaattcaaataaccaacaagttgttggtccaataataaattttttagataaaggtattgagttttagacacgttgggagagatttcttcgtcaaataaaatgaatttattctagtgtgggtctcgcatgtaggaaatgtaggtcttttaattttgaatttccaaatattcaaaaaaaaaaaaaaaaaaatcgaattcaaataactgaaaattagtgtaaattatataatagactatctattagtttctttgaaaaacatatagtatagtaatagacattttgataaatcttcatcttttacatttctaagtatccaaatgcttttccaaaccatatgttttcgggcttttttttttttatcaattcggtaagaaacacattgacggcattaattaacataaaactaataaactacatgttttctatgtttttttgctaatttttcctaaagctaatccattagaaaattttactattctaactatcattgtatgaaaaaggtattatctaattgtattcacaattctataggaaaaaaggttaacatgtcattttcttctcctttttagccgtccactcacgactaagaacttattcgtctaaacatgaattacatgacaatgtcaaagcgtggttaaaacttcagaaagaagtataaacctacctcaagaagtcgtcgtcctctttctctaattaaactattatttcccataatagaaaacactaattttttgcctttttggtaaggaaagtaacatagttgttagtaaatatgaattaggaaataatatacaaagtcttggtcctcttctcatcgactttaaaatctctttctcccattacaaaccaaaaccattagaagatttcgaaaaagaaaaaaaaacacctccacaaacaaaacaatggcggtgaagaagaaatcatcttggagatcattgatggttttgtgtttccaagatccagacaacatatattctcccaagaagacaaagaaagatgatggtgaacgtgtgattaccaaacagaaatcgtttcttggattgtcgattctagacataagtaatccaagttccactaccttgtccgaagatctctcaatctccctcgccggctcggatctccacgtgttcacacaagcagagcttagagtcataacacaaagcttctcttctagcaactttcttggtgaaggagggtttggtccggttcataaagggttcatcgatgacaagctccgtcctggtcttaaggctcagcccgttgccgttaaacttcttgatcttgatggtcttcaaggtcaccgtgagtttatggttcgtacattcatttcattagtcctctgtttaagatacaaaaatattgagtctaaatgtctaactaatattatttttggggtgatttttttcagacggaggttatgtgtttgggaaaactaaagcatccgaatctggtgaagctgatcggatattgctgcgaggaagcacatagacttcttgtttatgagttcatgcctcgtggaagtttggagtctcaactcttcagaagtgagttgacttttttttattgtaaccatcaaatagaaatgatcatttcattttaagaaccagaactgatgaaattgtttcagggtgctccctaccgctgccatggacaacgaggttgaacatcgcttatgaagctgcaaagggtctacagtttctacatgaagccgagaagcccatcatctatcgcgatttcaaggcctctaatatcttgttagattctgtaagcaagcattcttcttttttgatcttaagggttacaccaaactagaccattttagttttagagcggacaataacctaaaatggacatatttgtttctttctattcaaattatggtggaaccgcaaattacatccatggtcaccattcaaaattataattgcttttggatttgaatagacttttgatgttttgatttcttttttcaggattatacagcgaaactctcggacttcgggctagcaaaagacggaccacaaggcgatgatacacatgtgtcgactcgcgtgatgggcacacaagggtacgcggcgccagagtacataatgacaggtcatttaacggctaagagtgatgtgtacagctttggagtggtgttgcttgagctgttgacaggtcggaaatcggtggacatagcgagatcatcaagaaaagaaaccctcgttgagtgggctcgtccaatgctcaacgacgcacgtaaactcgggagaataatggacccgaggcttgaagatcagtactcagagaccggagcacgaaaggcagcaactctagcttatcaatgcctaaggtaccgaccaaagacaaggccagacattagcactgttgtctccgttctccaagacatcaaagattacaaagatgatattcccattgggatattcacttacaccgttcctaccaagccacgccgggaagttaaagagacaagtcttcaaaactttgacaagccacgccgtgaaactaaagtgacaagtcttcaaaacttcgacaaaacacgccgtgaagttaaagatacaagtcttcaaaacttcgacaaaacacgccgtgaagttaaagagacaagtcttcaaaacttcgacaaaacacgccgtgaagttaaagagacaagtcttcaaaacttcgacaagcctcgcaacgtttccacgactgataaccatcaaaagttccggtcgcccgcacacacggcaagaaaccaccggataactttgagaaacggatataattcaccaatgcgtaacgaggccggaggggaacggtactgactactgagttctcttctatcctcaattcgtaatcttttcattttttttacataagatgtaaatagtaatacattcttaccaccaaaaaaacaaaaaaaatctagtttaggttttgctttctatacctagaataggttttggttagaggtaaagttgatttttttttccttgtttgattcttcaatcaaagaaagcaaaagtgttaaacatattgttgtttttctaatcaagttgtaataacttttggtcctaaagaaaagaaaaaaatacatttggtgttatagaaagacgcgttatagatcactcgtctatatgttttttaagtcatccacgtctctaacagctggagtttgataaagtactatctaaacttacaatcattatgtctgtaatgcttgacacgaacctatatgatgtacacatacttcactttttaattgatagttttcaggatcactttactttccttttgtaaataattgacattaaagtttaagaggccacagggcaaaatgatcatctcatatagcctataggccttcaactaggctcaagtaagtttatctaggagtgattttgggtgttgcaagcattaataatgaaaatttcggattttggagcggatttggttcgggttattttagattcggataattaggatgagggagtttattatccgttcggattatatgattattcgaattcggtttcggttcggatggtgttagattcggaacggtttcggatcagtttttgatttaaaaaaaaaacaaattaaaaaattgtacaattttaataaaaatcgtttaattttactaaaatttggtttaattttgcaaaacattgtataattttaacaaataaaagtaaaaaaatcggacagtaaagttatttcggatatttttgctatttagtattttttggatataaattataactaatatttttagatatataattttatttaggattagcggatatccgttcaatttttggttcggatcggatttgtttcggataattcagataggaatatccattatgtattcggattttgtgactattcggttcggtttggtttcggagccggatttttgatcaatttttggattttatgcccagccctaagcattatgccgatgtaaaaaaaatttgactgatcctaaaatttttgactgatcctaaaaaattggaatccataacctaaaccttttttgttgaaaggtaagaatgatccctcactttctaacaactgaaaccttaaaacgaattcgagtttaagaactggtgaagacgaagacacagcaactgcaacgatagaaataaaaagctagaaagtgatgatatgagtaaagttggtgtcatttctgaagagtcaaaagactcggaaactctcacagccttaagcattacagtgcatttttgtttttcaagtttgctgggttgactaagtaaattaaattatggaaggaagaccaaacaaaagatcgatggagagtggtcactttagaggaatgtctgatagaagcgaagcaacgtaactcacacttgtttcactaagttgatcagtctcgttcactaatggctgtcaaatgctcctcaatctcctccgttgtcaatgcacggaattccgggttctctgctctcaccacacctacctatcatttcaccaaacggtttgataagatatataacccacaaatgatacaataaacttgccatcatatacgagaagagttttgtatacctcaatctcagtagccttgaagtcttcttgaagaacagattgcaaagccgatatggcagtctacaaacgtataaaaatatcaacgtgaggaacaatgtgcatttggtacttcatcaagaatattaatagatttgtatctacaaagtaacagcacaagtaatcagcagctaaatgaacatatgttaccgtattcgaacataagcagggaaaatatgaaagataatgcaaataatttacctgcacggtttcatcaaatgtgaaagatgggttttctttcattttcttctccaagaaattgactgcttcttgttccttcataccagcactagttgcctgcacgaatacagttgcttgtctattagctgcttttcaattaacatgaaatatctacgacttttgagagagagaataatttttttgtatatcctatcctctagagatcttggtcatatagtccagaagactcatgtgtaacctgtatgtagtcatgtcattgaatagatacacaaaacgtgttttgtttcaacctaggatcaatcagttactaaaagtagaaatgagcacgatgcttaaaaacctttatacataagattcctaaaaagtgttaagatcagcgaaatgagaaagacaggattgaaaaagtttcctttattcttctctgtaaatctacaaatgaaaacaagtaaactaatgaacccaggagcaaccggatacaaagaactaaagtgagagttatgctatcttatagagtacccaaacctatcccaaagtctgaaaggcttaccacaaacaacccaaatgaccaaaactctccgcaattatgactaactcactcctatagtcatattatacttttttcgtttatgcttatcacaatgacttatagactgaggcattttcttctatgttagtgacaagcagtaaatagtgtgtagtgtatgtcaatatgcttgtaagacgatattattcagatatgttatcaataaatcttgatgcaggccagcaaaagcaatcaaaacagtaagtattagaagacaagtttagttaaagtataagctacgagtgatagataataccttgtgaccgtaaaaatgtccagctgggtcacatttgtaaagtaagggaccattctcttcatcaacacccattaccatagcgacttcataaagagagacaacaagaaaattccttttgtcagccaataatattcatcaaaacgtgaaggtgatataatacgcatcaaacacaagtaggcactaatgtctagattggtcttaagaaaagaaaaagatagcaaacttgccaactccaaggggtctcatgtaagcatgttgagtgtagacctgtgacttgtccgctatcctgtaagtaaaatagttatttatcagcaacaccatttatcacagaagagctagatagatcaataactataagccagcctccactaagaagttaaagaaccatctgaaaaaagagacaccaagtcgattagcaacgataccatttagcaagaatgtcaacaggcatctcatatccataagtgaaccgaaattcagctgcttgattccttgcttgttgaaccaaagaccttgcatcagctgaaaacgaaattcacatgttcaaattaccatccatagcaataaattctacagcttaagaggagataaaagggtcatgaaacgaacctgtaatgccagtagctaccaatccaatgtacttggtgatagggaacagatgtgtaacactagactgatccaaaagcttgtcctgtcccaacccaaaaacaaaaaccctaatgggtaagatacaccaacaatcctcaatctactagaaacctaaatccatacaatggttcaataaaagacgcaacttttttgcaaaccctaaaaaaaacgagagacaatgaaaagagagattcactcacaggaactttcttctgggtaacgacgcaaaccgaatctttcccacgaactccgattgaagtaataccagctgttttcacggccttgaaggcatattctacaaaagcaaaagtgtgtattcagttttcagagctcgaaaaggaattgagagtgggaatcggagagtactgaccaacttgaaagagacgaccttccggtgagaagatagtgatgtgacgatcataaccagcgccgcttcctctactcatcttcttcgatcttctgaattcggtggagttgaatcagagatgtgtatataacaataaggaatggaattgaatcaagctttatgtccaagacagaagaaaaaaagagtcgaggtggtgtttttactattttgccctttgatgaccactttatttactcttctgccactttaagatatgcgatttaagatgcaatcaatcatataggaagaaaaatatgtatttaactaaaattaaaatggaaaatattaaaaagatactttaaaattgttataagtttactttcttattacaaagattaataaaatttctaatttctaacgaattttatttttaatcacaaatttttatgaaaataaagatataaactatttaggtatcgatgaaagtttgtgaaaacattgtaatacagtttagagaaacttttgaagaaaattttagtgatatattatcgacacattgtcttgagatcggattagccacatagtaagttagtaatttgttgcaagaactgatcaaaatcaatccaacatgagtgtaagccacgacgagtgtaacgtatgggaattgagtattgaatttgtgggttatgaaagaagaaatgtaagaacctagagatcgtgaaagaccccaagtctcgctttcgtagtgagccacgacttcttcaggtaggactctacagaggattgaccatgaagaatgagagttttgatggtgggtgttgaaaagtttgcggaaaaagggagattctatgagcgatttcattgcttgcaaactagttttgaagtggtgatgattgttagtggtaatctcgcaagtataattgcccatagatcatctgttaagaaaatcatctccttcttcttcttcttctcttctttgtctccatcccaactctgttctgtctacgttctcgtttactatatataaataaggaaaaaatacacacgggataaaactaagcaaaatatatccaaccgaaaataaataaattatatccaacttttagcctttaggccataaatatgttttcagatttttaatgatttttgatttttgaacaatatttgcaaaacaaaattataaaaactcatgaaactaattcccctagaatttctaaaacctaatcagcttaaaaagaaacgtttaaaaagtatatttaaatcttgatcggctaatttacattataagaatactcaactatatgatcaatacatcaactagaaaatcaaaatgattaattcctattttttttcttattcctatttgaaagaggtttatttttctgattttatccatatatttttccaaagtatttaagaactgattatcctattatgatttgaattaaagctacttttattggggaaactggaaatcaatcattgatggttgagatgatcgcccaagaatatggaaatcatgaagattgcagaaggatctaaaatattatcatatcttagttttagtaatatttacatttatcaaatatatatgatttacatttaggttttatctttgattaggaaatctcatctctatataagagaatgtatattgtatcattattctgttctttactctcatcaaatatataaccttttgattcaagaaaggaatgatgaacaaaagccatgaatattgtttttttttgaaaataattaaattttacttagataactttacttcattgtgatctgggattttaattcaagaaagtgtatgcatctctgttggctatcatgatgttcttggctgagctttaaattatgagcgtacgagccaagttcaaatcagaattttaggcattaagaagctcatttttcggtaataattagcatatattatgtgatgagtttatggtcttgggatatgcaatatcaggactcttgttgttgagtcatatactttgctggttcgtgattattttattgactaagggactaaagaatctgatttcttatcacaatgaaaaattccatgtgtgtaattgttgatttttcctagttgaacaggctgcatatagatatagatatcattagttgtaacttaccatgcatttgttctctctttcttacattgaattgttgcagaatgtgccttatatgtaatttgtggagacttttgtcaacaaaaatctgttgctttctataatatttgaatgttattgtagtatctctacaatgttgattttatacatcaatcgttcttttctgtacatgctctaagaacaaactcagaaaaaggtgaaatttgaatatgaagaatccttctcctatgacactactttaccatttgccttatccaagaaaatgctaatcgttgttagagtctggttcataacttggattgcactcaaatgcgtggatcatttctcttctccatgtccacttccgcctaaagatatgtcatgcgaatcttaataacctcattggacaaattaaaacatatccagtaatgagaaagataaagtagtaatgaacgaatgaataaagattttaccgcttcagtggcttgactgcttgatggagtgtcttgaaacggtacactaggtgcgtgcattactagagaaagttgcgctagtaaagtttccctataatggatttacaaagaggtttagaaagcaaaagttgtaaacatctcaactatattggcaccaaactgatcagcctttttaaaaggttacctcattgttataatatctaatcgtgtgtttaaattctgcctgttggttggcaatatatgaagcttgtaatctggacgaaaatacttcatgtaatcattgcctgggagatcattgtcaagttgttctccaaccgcaatcgccgtctgcaacaattaaaaagcactttttcagaacaaagaattgcatgaatatgaaaaacacaaagtccaagttacaaaggagaaacctcatagcaccagcaacgagcaacatttggaagagtataacctccaccccccaagatcatgagaggaacattaaaagatcttacgtactgtaagcaatcaccatgacccttgatagacaagttgaatgtaccaaacggatcaccagctaaagaatcagcaccacactgaagaacaattacttctggctcatagatttccatagctctgtggataacaggaatgaacaaaccacgaagactaaaatcatccaaaccatcctttaatggtgcattgagtgaatagtattgtcctttcccttccccatagtcacttatgtctccggtgtccccaactttgtggaaagaaacagtcattactctatcagtatccttaaatgcttcttccacttcatcaccatgaggaaaaccaatttctatgtagagaactctctaccaaaatcaaaattattaaagcatcaaagattcaacaatcaactcttaatcttgaaaatcaaataaacagttacgtaccttgaaagattttagtaactcgagaatcgcaagcacaacgtcattgacataaccaaagccagaagctttatctttcttcacatggtgcataccaccggcccagtttatggcaatatcggcttcttgacggttcaatttcgcggcggcgctaatagaaccaccagcgtaagcacgacaataatcgaagaggttatggaagacaggaccgtcccaatccacatctacgttgaagcgcttgaggttttcagagacggaaggatgaggatcggttacggtttccggcgtgacggatttgaggaagttgatatactccagcgagtggaatttttcgaaatcggaagcatcggcgaggtctgggtggttgatttccatgtggcggtggaggttatagctgaggatgaggttgtgagtgacacggattcgttgaggtttcgttggctggttaacgccgtagtagtagtcgccgatcattggctcgtagaagtaactgacgcggcgttttcctccgtcggctaagctcgccatcgtcactttctctgcttcttctttttccgccaagaaacgagatatctccgatttgattttattgctactcttttttctgtatttattgttttagttaagataacaataaatgtggattatttatttcagttagattctattcggttagaggattcttttttgcggttaatttcagtaacaatagtgtttaacacttcgagtttgactgagaaagtaataataactaataacatttgagtagttaaattaaataaaaaaattaaattagtcaactatattgtattattgttcgccctattttatttttacaatgcttttttgcatgatgttgcatggagataattaaatccgatataattactactaaaactataaataattaggacaaccctccactttgaaaaatgctccagtgatgaccatccatgtgatctatgtattgaaataattagggtttatattgtttagcataatgtatcgtggaatttgggtttgatctaattaggtttgtgaattttttcgtgttcgtacaaagacaaaataaaaccaagaacaaactattagtttgcattcaaaatattggtttagtaactcgattcactttggtacaagttgattggatcaattcgttttaatttgtatagggttctttattctatttccaaacaaaatcaaaaatttctgaccgatcagattagattttattcgagtgtagtgattcgtgttttttactggaactaaaccgagaggatcaagtcgataattcttcctaaagaaatttcaatacatgatacagagtcacatatatccatttgggcaactaattaacacttaatgcatacagagtcatatatctacatatatatgcatatatatatatatacatatttatgataaatatattgatagtttgtttcaaaatcaactacaaacagagtactaatggtgatattatagattgcgtccatatgagagaccagcctgcatttgatcatccgcttttaaagaatcatgaaataaagtcagttctcaaagtgacgccaaaatcttcttagtttctttttgcgaaccatgtcgattctgtggcggcttctcacgctttctctattcttaggacaagcctccactttaactccagacatatatagtaaaaatagtatttagtttagggagaagattccagatcttttgacatctcacagagattttgttgaaggattaagagtttgatgaagatcctaatgagttgctaacgttggagaaaacttttacttttccagatgatttcaagattacgattcttagatattctttgaaaactagatatgacattaagctatacaaaccataattgaagatttgtgcaaagtcttatgacaataatgttcagtgtctatagagatgtatgacaagagaaaaaacataattcaaatagtatatgcgtcagatcaggctactctaagatcttgaagcaaataacgattgtgtggttctttttgtaaaagctaagagagaatcatcccaaacttatcaaacatgaaatagcacttcagggtctccgaaacacacaacatataagaataattaactaatcggatgaaaaataattaactagaggaatcaaattaagagagaacaagagaattcaagtaactaatttgcaaaatgttggtaaaactgatttcaaaccgtagcaatcaatttgaagtttttgtgggttattcaaacgactccttatgacaataatgatttaaatgactttttcgctttaactacggtgataacaaatagtttaacctcattaatccatttaacgatatgatcctttttgttacaaaatattttgacaaaaaatagaaatcagtaaaagctaaacatgtattatgttcattagaaagttagaacttttttcaaccattttttatagtcggggtgttgttcgtttatatttttcccaatttgctgaggtaattttatgattgtaactaagtggttcacgttctctttgtttctcttaattgtatttattacgataataagtatctaattttgattattgacacgacggttgtaatggattaaattggtaacgtccggactgtctctatcagtggatcccatcttctctctcgggcccacggatccatctttgtctgacactcggtccgctacgtccgagagactatctttttcgtgttttgttctcactcacacggtttcgacaattatttccggaaaggtcactcatcctgaaattgctcgagcccaaacatgctaaactatgaatttctctcaagacatttgaccaaaacaaatgtgcattttggtaacatatatgaccaaatcaattcttttaaaaattttcgcatgcaccaccatattcctgaaactgggatattactggatcacttggcacgaatattcatacccaacctcatattatcacatctgcaaacaaaattcctcagcattgacttattagagtcaatctaatagagttgttgattaaaaaacttaaaataaagttagcaaattttaatataaaaaaatttatactattgaaagttatagttcctggatttatttttgtttttaatatgggaccttgtaaatgttttttttaaaatcccaataattttgaatatataaagccttttatgcaaaataaaaatatattgctttaaaatcatattgtagatagaacttatttatcaatatttgtcttatttatttgttctattaaaattaaccaaagtttctttcaaaataacacaaacaaacacaagaactaaaaaaatattggatttatagttgaaatatttccttaccaaaataaaaatattatatatatcgcgatcttacaacttcaatatacactattctgaaataaatattataaaatataaaacatactaggcacataattcatttccattttttttggtaaaaaaaagttactactttgaaaaagaggtaaattacaaaattattttttcaaatagtatttcttaacaattcaaacaaaaataaaaggatgaatgtggtcccaccacattctgaaatcttttcttcacaattatcttttcaaacaatattcctcaaaaattcctcaatattcatccgatctaacaaatatgttttgctcaaattctcctcaagcatacctcaacaatttctcgaaaacatgttaccattttttttcaaaagtatatgagatacttagagttaatgtcataatttattaatcattaatacacaaaaacttataatatattttttttatcatgtattaaacaaagatgataaaaagaacattaaaaattaaaaagtatttaatccaattatatgactgattcctcaactttcatttggttaaatgatgtgaccaaaattaaaagtttcaaatagatccataccttttacttatattagaaaatatctcctagaggtttgtctaagtgtcctggcaatttttgttacagagaaataatcagtatttataactcttatagcctcatgaagctagctagtgacgtaaattaccgtacttagacaacgacagagtgttccggattctaacggacttggcttgactggattgttttcttagctttcttatacttgagaaacaaaagtatgagggagaaagtgaatgcggctaatcccaagatagtaagatattttcaaatatctacatttgatggtttatatcgctaacccatgtgggtggcgagctgataaggaccccattataattagcaaagaagacttttaagttttatcctatgtttaactaattatgttttttttcttttggaaaaaatgtttatgtaatgtgttgtgtgtattttattgatttcaagaattcatgggtatgttaagatactcatccagttgcggtacaacgtaaatctttgtcacaaatcctttaaacaaaagttaatatttttaattgaaccaaataaagtaccataaagttaattgcactgaagtgcgataactttataacttgaaagaaaatagaatgcacttcataagtttagccaaagttattttagatcgtgtgacttgcataatattgctacatcatcattttaatttagaatattttaccgcatttagaaaatttagttttgatatcttaggattcagtataaaaactttgactttttcttagattgttctctcataaattaataacataagatttacatgcacgagtttctttacgtagttatatttatacctaaatagatgctaaacaaaagtagacattcatataccaaatatatcataccttgaatccaactatattgtacaaacataaatactagtcagctttcatctctcatacactcaaaatcaccatcgcatttgaataacacattgccattataagactctatgaataagatcattttggtgaagtaaaactaatcgtcgacagactcgaatctgcttatgaaatgaattaaactctgacaaaaagaaagaacaatcttatttctctattcgcaaccgcacaaatgttggcgctgctgtggaaataattacaaaggatcatcaccacctgattcttcattgattgctcaagtttttgatgacatatgaaagtatgtctctgtggttgaagtaagcgagttccacctatgcacgtttacccttactttacaatgaaatctatttttcttcaccaaacaacattttgaacaatgggagtggacaatatacctcagtgtcaaagcggactatgcaggtggaaaatttcccagtgtctgtattggtagtaacatcttccccaggtcttatctctgaaatatcgattgggagatggatagtgtaaagctccttacctatcaatccaagggtgtctgcatcctcactagacttaaaacataatgggatgatttccattcccaccaaattactccggtgaatcctttctaaactatttgagatcactctgctttaacgccctgtaaaaacaacaaaattttgcctcaaagaatttaggacacaaacttcagagagagaaagagatatagagggaggttcaaacctgtaacatgggtctcttggcagctaaatcacgggagctaccactaccatactcagctccaaccagaataattgtggcctaacaagctgctttgtatctctgaaaaaaaacagacattatcattatacaatcagtattaaacccacaagatttccttgggaaaattaagccaagaaacacaaaccatggcagcatcgaagaaaaagattttcacccaataggaatgtgaactgtcttagggcaaacttatccatttaatagcttgttaacaagtctgatattcacaaatgttcccaaagccataatttcattgttaccgcatagacttccatatgagttgaaatatttgcggttaatctccggtgattctaaatcgtgtttcccttggtgatggaattagaaccgtcaaatggtcatctgaccatgggctaagcccagtccacaacattatggacagtccatggtcgacccgtaacgaaaacgggttaaatggtctaaagaccaattatgtccgcggatttaatgggctagcccacacggtctatggttggtccatcaattttctcaacacatcaattttcttctcttctctatctcggcgacgaagctctctctctctcgcttcgacctctctctcaactcctactcccgttagttctactagaatatgaatccgttgattagaataagttctctctaaaatatgcgttcatatgatagtctcattgattttattctctaagtccttatgcaatttcatcgctttgttattttctgttccttaattgtgattctgcatatgctttctttgatttcagcttgtgggtttgtccaaatttcacttgtttgctattctttgttattctctctctcccttcctttgatgccaaccatgtgtttgatgaaatgcctcacagaatatgtagagtttggttttggtagagcttgtaattacttgtgtagagcttggtgtttatgtatggagctaagtgtatgaacgtttagtgtgtgtttgctaatgtttatgaacgtttagagcttgtaattaagtaatcgtttctcaccacaatccatcacttgtttgacaaaacgttgttttgcaggaaacggattagaggtagcaagttcatgactcattggtttattatttttttgcagagagtggccatacatggaatcatcggctttacaagattggcgatcaaacattggcaaataatattcagacatttgttaattcccaaatctaagcttaactcttttgatgaacttattttcagacattggcaaataacattaagttatgggctgaccattggacatggtccttaatggttttggacaaattttcagaccattgtccaataaagatcatccattaaaactaatggtccaattggacatgaccattgggctttggacagcccaattgacacttctagatggaatcataagtagctcgaaacatgtcgggtaacacactagagtgaacaacctgtaacatattcctatagaaagttcaattaatgtgtacctggagagaaatacattcgatgattctaagttgcaagtacctgagcaatttcctctatggtaggctagatatccctgaggaagacatccttatctttcttgttctccccaatatactctgtctcaaagtcaatgctaacctgtgaaatagaacacatacatatattggacttgtacaatcgaataggaaatatattggacttttaaattttttccaaattgtgtactgttccaaaaaggacataggtgttggtgtcggatcccgcaccagtagtccaggaccaaccaaaaattgccacataagcatgagagaagcccataagggatacggcccatgagaacctcgaattgagagggaagacatggacgaggtggccgttctgcgggatggtgacaaggtcgaaattaaggacagttcggcttaaggttctcgggccgggtatcaaagcccacgaagtccaaagtcaattcaaattcaaacgtttgaacattaaactcgaagactgaaacagatgcagttaagggagaaatattatgtataattgagaattaaatgttatgtactagtataagtaagacgttgtgagccatgtaggacacatgcaatttttctagcaaagatactatagccatttttataccaattcgtagctttatacatttgatttttgtcctcaagaataatccatctcactaaataaataaatacttgagtgtgtgaatccgacattcatattttggcgccgtttgtggggatggaggattcttgagtcatcagattttttcaccacattttcgagacaagcagcaatggccggagaagacgctctcagtacatcgttggccgaaacactcaaaactatgcagcaaaccatatcggacatgacacataagttctcggatgtggaaaaaactgttaccacactacaaacaacccaagtatctcttagccaacacgttagtactatactatctcgtgttcgttctctaagtgcaggaaaccctattggagtcctaagaagaatgctcaattcgtcgagttcccttgcaaggaatggaaccagtggacagacaactcttgatgctgctaacacagtaattcatctggaggatgtggagacgcagcttggagacgatgaccaattagcacatcagcacgagcaagaaagtcttgaccagttcgagaccatgagaaaggttagccaagaattgaaagagatgaaatcaaagttccatcaggccaccagttcggagccagacatcgatcgagtcattgaagaaactacgcgaacacctttcactcctcaaatcgcaagcttgagaattagagattctcggaagctcaatcttacaacggattggaagacccaaagagttatcttgcagctttcctgatcgccgctggacgagtcgacttagatgaaaccgaagaggatgcgggatactgcaaactcttttctgagaatctatgtgggcaagcactgatgtggttcacccaattgaagccatgattaattagcaatttcaacgaattgtcagctgtgttcctgaaacaatactccatacttatggataaaagcaatttggacaccgacctttggaatctatcgcaaggaccgaatgagtcacttcgagctttcattacaaagttcaaaggtgtgctttcgaagctcccaagagtgtcgcaacagtcagctttgtcctcccttcagaaaggtttgtggtatgattcaaggtttaaggaagatctaatacttcacaaaccggacacaatccaagatgcgcttttccgcgctaacaactggatggaagtaaaagatgtaaaagagagcttcacgaaaaggaataagcaagcgaagccatcggtcacgttcattacaaagaaatttgagcctagggataacgaagggcctaaaaaattcagggcacaacctttcaacaacaacgtcggaaagtaattccaaggaaaaagaatgtcgaacacttgggtccgagatgaaagtttgtactgcgacatacatagagtgactgggcacttgaccaaagattgcagtgtcttcaaaaggcatctcgcggagttgtgggcaagcggagacctttccatattcaacatagaagatttcatggaaagatatcatgaggcaagacacaatcctgaagctcaaaaccctaccgtaaaaaggccgaggtcatcaaacaaggaagaaccaagaagttcaaagggaaatgtcaatgtgattcttggaacttccaaactttaccgatattcgatcagtgctatcaagaagcatagacataatgttttgcttaaagcaagcttcagcgaggaagttgattttcaaggcgcttcaatatcattcaaagaggaagaaacccgacaccttgaaagaactcatgatgatgctttggtcattactttggatgttgctaattttgaagtttcgagaattcttgttgatataggcagttcgttggatttaattttcctgagtactttggaaaggatggggattagttgagctgatgtggtgggacccccatctcctttggtggcatttacaagtgagtcaaccatgtctctcggaacgattaatctacctgttcttgccaggaaggtgtcaaaaatcgtagaatttgttgtctttgataaaccaacagcatataacatcatcctcgggactccctggatttatctaataaaggcggtcccctttacatatcatcaaagcatcaagtttccaacctcgagcggagtggaaacaattcgaggagatcaggaagctttgcaaacgtgttatctagctagccaccgtttgaagatccaatagcaattaacgaagcccacgaagaaagaagtacttccaagatttcctagtgggcaaaaggtggatgatttcgtgatcgaagttgcgttagacgaagaccagccagaccgtaaaatttgaattgaggctactttgaccggtgaactaaaagaaactttgatagaatttttgaggaaaaacaagaccttatttgcgtggtcagcagcaaatatgcctgagatagatccgagcataatttgccatgagctgaacgtggatctgagctttaagcctgtaaaacaaaacaggagaaaactcagagcaaagcgaacaaaggcagtaaacgacgaagtggacaaaattttaaagataagatctataagagaggtggagtacttggagtggatggcaaatactgttgtcctcaaaaagaagaatggaaaggacgtcgtatgcatcgatttcacagacctcaataaagcatgcccaaaggatagcttcccgctcccgcttcccgctccaaagatcgactcgtggagtctactgcaagaaatgagttgttaactttcatggatgtcttctcgggttataatcaaataatgatgaatcccgaggatcaggaaaaaacgtcattcatcacgaatagaggtatttattgttaataggtaatgccttttggtttaataaatgcaggagcaacttatcaacgattggtcaataagatgttccataagcatctcgggaaaacgatggaagtctacataaatgatatgtttttcaagttactgaaaaaagaagaccacgttaagcacctagaagagtgttttgaaattctcaatcaatatcaaatgaagctaaacccggcgaagtgtactttcggagtcccgtccggagaatttcttggttatattgtgattaaaagaggaatcaaagccaatccgaaccaaatcaacgcgcgcctttctaaatatgttatctccaaaaaactttaaagaagtacaacggttggccggtcggattgcagctttgaaccgttttatctcaagatcaaaggacaaatcgttaccatattatcaaattctaaaaggaaacaaagagttcctttgggattagaaatgtgaagaaacttttggacagctaaaagcatacctaaccactccacccatattgtccaaactcaatgtggatgagaagctttatttgtatgttttgttatcaaatcatgcagtcagtgaagtcctgattcgggaggatcgtggagaacaaaagccgatttattacataagcaagtcaatgacggatccaaaaactcggtatacaatgatggaaaaacttgcactcgcggtggtgacttctgctcgaaagctacgtccgtactttcaatcccacccaatcgaagtatagaccaaccagccacttcgaacaatacttcacaacccaaatcagtcaggacgattagcgacgtgggcagtagagctcagtgagtatgatatagagtttaaaagcagggtgagcatgaaggcccaagttttggctgatttcttgaccaagctaccaatacttggtgcgccagaacaaccggagaatcagacttggaaattgcatgtagacgggtcttcatcaaagcaaggatccaaagtgggaatcaagttggagtgacccacatcggaaattcttgaacagtcgttccgcttactatttagtgcttctaataatgaggcagaaaatatgaagccttaattgccagacttcggttggcacaaggagttggagttgaagaagtggtcgcttattgtgactcgcaattagtaattaaccagttcaatggagactacgaagccaaagactcgagaatggaagcatatcttgaagtagttaaagatctgtctaaagcttcaagaaatttaaactagttcaaatgcctcgaggagaggatacaaccgcggatgcactcgccgcattagcatcatctttggatcctgagttaaatagaatcattccagtagaatgcatctcggagcgaagcattaaagacgaaaaagaaactctcgtcattagaagatttgagcagtggcacgtgcccgtggtgaaccggaagtagagttaccacccgtcatacggaggaagtcaaaaggttagaacacatctgagaaaacatacccgaggaaagcagtagcgaggagcctattatcctagtagagcacataatttcagaagagattttagagaccgagccacttatcgaagaagatatacttgaacaaaatgagcatcccgaatcggagccatgtatatttcacgaaatcgaccaaaattctgctaaagattggggagctgattggagggagccaattaagcattacattgtaacagacgaattcccaaaaaacaagtgccaaaccaggaaaatgagaattgttaatgcgaaattttgtctctccaagaatgcattatattaggtgaggtggcagtgcacccttactttctgtgttttttttggacccgaagtcgaaattgtcatgagcgaagtgcatgaagggctgtatgggagatattcgtcgggaagggctatgccgttcaagattaaaagaatgggataccattggcccactatgattattgattgtgttaagtttgcccaaagatgtaagcgttgtcaacttcatgcacccttaatccataaacctttggagttgttttcttccatctccactccatacccattcatgaggtggtcgatggacagtatgagactattgcatatgtgtacaatatcttttggtcttgacggattacttctcgaaatggattgaggcagaagcatacattaatatcaaggattcggcggtgaaaactttcattcagaaaagaatcatatgttgacatggtgtcccgtgcgagatagtcactgataacggaccacaattcattttgcacgagttcaaagctttttgttcggattggggaatcaaagtcatttactctactctgcggtatccacaaggaaatggccaagccaaagccgtaaacaaaacaattctgagcaatctttaaaaacgcttgaatcatttgaagggaggatggtacgatgagctccaacccgtcttggagcttaccgcacaactcctaggcgatctatagggaaactccattttctttagtatatggcatggaggtggtagtaccggccgaactcaatgttcccggacttcgccgaacagaagcacccttgaacgaagcagaaaactcagcaatgcttgacgattcgctggatactatcaacaagaggcgagatcatgctctaatatgaattcaaaacaattagcaaataacagcacgttattacaacaccaagatcaagagcaggcctttctttgtaggagattacgtacttaaacgtgtttttgacaatacaaaggaagaaggagcaggcatgcttgatattaattgggaaggaccttacattattatcgaagtggtccggaatggtgtttataagttaaaaaacttggaagacaggctggtctagcgtcctttgaatgtggtcaatttgaagaagttttatgtttaagtgacacgcatttttattttatgttgtacatgaactacggtgtggcttgatcccgcaatggatacgtaggcagctcggagacaagttaagctactaataaaattttgttttattttgtcattgaaaaaggagttcgactgtgcgaacgaacaaggcaaataaagttcgagtatgcgaacatacaaaacttggaaacaaagaaacatttattcagcaataagcaaataaggcatagttgcgtcacacacacacttcaaatatggaaattcttctcgatgagcagaatacttgaactccttgtccagcgaggtcaagaatcagcaagatacaatttaggatgcatccaaactcggagattccaagcacgatccaatccccggaatgagatgcaagggtatgaagatcccttgatatcttagtaaccctgcgctgcattcggtgaatctttttccgtagcttcctcctttcaagcgtaagcttttggtgttgaaccgcaagtctctttatgaagaccatcgcgatctcttggtctctttcatagaggtccttgatcatagcacatggagcctagatttggaaacggaagaagccacgaggtggagagggtcgtcttcccggcacatttgggacatctccatccgttattccgaccctggagaaatcaggcatggattccgaacatcgaaggttgaaatccatatctacaaaaaaaaaaggaaaaggtgaggaataaggaaaagttagagttataatttataggaacatcgcatcccttagagtccgtagtttccatcctagaacagagtgattcaccgaaagatttatgcctaccagctagtcctgcatttaagacgtatctctaaaagagtatttcgaaatcaggaaaatagcaaaagtttccaaaatttaaaatggaccgaagctcataacgagttaaatataaaataaaagcgaaataaaataaaaagatgagttcggggacatttatggaagaggctcaggaactggctcgttcatcgccggtgctgcattcgaagtggatgcctcgttcttgtcgtccactttgggttcattcttgacgcgctttcaaaggttgttgtcctcttcttcatcatcctcttcgctgtcagacaggaccacctcgaccggagtattcacaagccccgaaacttgacctcaggcgcagaggtacatccggagcatagtcgggatctttgcgacagagtcgaagttcctgcactcccattgaaagggatcgctttccaaagccctcaccttcctctccactcgagcgatatgagcctcgagtgtgtgccttttgagacccaagcgttgcctctcatcgcacatacggtgatgtttgtcgacaacctggcattgaaacaaacgaatatgacgaaaaaataagaagtatggttgaggaaagaaaaacggataccgaccttgtccatgaagtcatacgcctccttcttgtctttcggagggaagtagaatgcggcatgtggaaagaagacgccggccggttcgaaaccatcgccggacaagaacagcagactgcttgggtcgagagggcaaacggtggatgcgccttcgttttccatcttcgtagtatctctcaagtagatttcagaaatcatgtttggagagagttcattggcagataagtacctatttataatagatttagggtttatcttggaaccaaaaatttaataatgatggcgtgtccgaatggtttaaaccatttttggaaattgagaaaaagcaattattgcctcaaaggcgtgtagcttttcttatttctcgaggaacgagaagggaaagagcaaccgttgcattaaaggcaaaagtccattaaatcatatatatgaaaggaggctaactctctcctacaacttgacacattaacacatgagagcttgccacctagatttcataaaataaataatacataattagtaattaattcaatataacaactaaaataggaggatataattaatcagaacttgaatcatcactctttttacattttttctaattcaatatatcctccttagttttgagatccacttaagtggctaaagtgatcataaaatccaaacatgctacacataacccttaactacaaaatattatgaaaaaaactaaatgaatatgcagattaaatatatctaagctttcgagatttattctaagaaaacaagtaacttgaaagatgtttgaggaactatccttataactaatacgtaagatataagactatgagaagaacttaactaaactttccaagaacatcaagttgaatatgattgaattgaatatgcagagacatggttaataaaaacatgttatatttttagtgtaagaaataaattttttaaaatttcaccgtctcacaatctaaacatataacaaaaaaaacaaggatttataaattaaaaaaaaactaagaatctagaagaaaaataaaaaacaactcaagcacattcttttttcagatgaactaatatagttggacttttcaaaaacaattacaaatcatatttatgtttcaaacccaatgcattcaactttactttatatgaacagacattatataaaataatttataaatagtaatacataaacccgcacgtagtgcaggtactcatctagtacaaaataaaacagataaggcccaagcccaacatagccataaggccaaaagctctaaaaaaactagtattaagccgagctcggttttcgcatttaatgagaagggtctgatcaacctaaaatctcagaacatagccacaaggccaaaaactctaaaaacaaaaagcggactttgccaacccgcatgcgataagtaaacaaaaccctctagggatcaaaatttgaaaggtttaaaggcctcctaaggcaaataactttttcaaaatataaagcccccttgggcaaaatatatagccctctagggatcgctgttcacaaacgagggctatttgggctgagtggagttaggttcgacggacatcaccgatgtggcaggtacatcgggtggaacaacttcattcgagttgctcggacctagaagaaatattcgaattaattaaaaaatacggacacactggtaataaatttgtaaataaaaggacttacaggcccagtagagtccggattcaccttatggaggtgatgcagtaaagaattcctcaaagtgttgacggtggaaaggcgtggaggcgagaactgaaagacgatctttcttgtcttgtaaattgttgttcaactcggatctttcttactcctcggaaaagtcctcttcatgaagctggtctaacaagagtaaattgctctcatactctttgatgtccaactcaagcttaaaccgagtcatcttggttggaattaaaaggatagcctttggatcaactccatcccgtgacctttaacctcctttcgggcattcgatgccaacttcgccaactcattttctctcagtttggatcgagctttgtacccagcatcgagttcgatgaattagttgttcatggcgtcggcagccgactcagattggaaaagtctatctcggacacccgcaagttcagtttgaaggtcatcatatcgaccatactgcgcttgcagttcgtcatttgacttcaagagtttggatttgaagtggtcaacttgttcttccagctcgtgcttgtcattcatagagtccgaaaaggagcggtgatcagcctcgagagaggagaatttgttcctccacgagttgatctcttgttcccagctgagtagcagcccctcgtagtgctcaaccatgttattgaatttgctgtttgcctgcaagacgatataattgattgttattaacgaagtgaaagaaaggataagggattgcagaaaatatttacccggactgtatggtgggcatggagcaagtagcgttcgcgaattgtcgggcgccatttgtcaaaagttggcaaaatcgcatctttgcgggttttgaaacagcgaaagacattgccctctttttccattgctaaaaaaagtagtagggttacaacttgagaaatacaaacaaagttgtaactaaaaaataataataattaaccaaacctataagggatttggtttgaggaacaagcacgacctttgacctcgggggagtatctcgatgctcaccaccctccttttgaggaaccgtattgtggtccgttttctctccactccattgtgaagagggggacgtggcgacaggaggaggaggacccattgttcgagaaggaggcgacaatctgggagaacagtcggtcctagcccttgctttgtccctccgcggagaagagttaccacgagatggcctgtcccttttcttacgaaccagttccgctagcggttcactacttaacccacttcagaaattgggtcgaggagagtcgcggcgaagtgatcgggaccttcgaggagaacgacctccgcggtgctcacggtggagggttggcctgaaagcataagcagatcttgctccttcggcgctaccatcatcgacaagaaggatccaggtgtaatcctccttgtcaatggcagtcgcgaggaacacgttgttctcctcgcaagcctcagtcattggcttggacagcaccttgcgccgaaaagcaatggccccggttgacattccttgagtccaaggagtaggtggaagatgatgaaggtgtcaggaggactcatcctgagtttgcgggtagcctctatgaaccaatcgagggttaaagaattccaatggatttccccttcgaagactattttaaagaattcgatgaattctttagttggaagcgtctgggcaatgaaggctgcgaagtgaaacaacagattcagttagtaaaagggtagatgaccagagaaaaacatgtatatcctaacttctaccagtcttagctgatcacttcgatggaagcacttcggaaaggtttccaatcgaagctgggattttcttaatcatgaaccaaggatgaaaagtagcccgtcttcttcgacgagcttctcacgctaaggcaatcgttcagttcgggaacactgattatgtatccaacccccgccgcgatagttataattcccaggatggttcagagaaggttgggggttaattggggtagagcaatcccgagagcttccaggtaacaaactaaggcttcgggatgaggaaaggtcaacctgcagccgttgaaatagatctcgtatacgcagaagtatccgtgacggtggtcctctggagattccgtgagatcgggcatcattgattctgccataattttaactcatctcactaaataaataaatacttgagtgtgtgaatctgacatccacattagacaaccaccaaaggtggagatgcaaggtagttggatcttgttaatagatagacatggccctcaaag

SEQ ID NO: 766 - DNA, 65325 bp, Arabidopsis thaliana
tttttgttcccaaaaatcacagcctctgctataatgttttacaataggcagaaccaatattgtaacaatattgccttccacttttatctacaaaagctatcctattccattttttcagtctgaataatacgattttttcaatcacagccgctgctacaatgttgattcatcgatttctccatagttgccaatgtatgtagtgcatccataaccaacaatattgaaaccctgcttgttcagatatttttgcaggtttctgcatcgcctgcatgaatgttacatgtgtccatgcaagctcgagattacaacattaactatgtgaattgtgcaacagacaagggtgtagctctttcataagtatttgtaacaactcatgaccctggtgcaagaattgtttttacccaaggcttaaccatagggtgagattgataagagatattcaacacattacataaatcgagtttaatttggtggaaactaacatgtaggccaagttcacatgctttttggcaacaagagaagcaccaagcatgaaactgggatttgaggtattagtgcaacttgtgagcgtaacaatcaccacactgtcatagttaagctctacaggttttccattgaaagaaatctttactacttttttcttgcgcctccttaggtatagccaaaccctatcaagaatgtacacatccaatcaagaaagtagcacccaccaagtgcctccacagcaagtttaaatcaaatatatgctaaaaaaaaatacacctccatataccaagtataatatcttaacttaaacctaactttagtgtctaaacacgagtgccagtcagctttcatttcctttaaaggaacactatcatgtggcctgtgaaaagataataatatctttatagtggtcaatcaatcaaataatatcaaaagaaaaaaaaaacgatttaaaagaaaaatatataagtttagtttattatataatggcgggaaacgacaataatggcggtagtggcggtttctatcgagattggatgtacaagagatttgatgaggtgacggggaatttgtcagccgaatatgttgcaggagttgagaaattcatgacattctctaatagtcaccctatagtacagagtagtcgaggtaaatttcattgtccttgtagtgtatgcaataatgaaaaacacatcatctcgggtagaagagttagtagtcatttgtttagtcaaggatttatgtctgattattatgtttggtataagcatggaaaagaactgaatatggatatacgaacgagttacacgaataggacgtattttagtgagaattatgaagaagtgggtaatgtcgtagaagatccatatgtggatatggtgaacgatgcatttaattttaacgtggggtttgatgataactatcatcaggatggtagttatcagaatgtggaagaagcggtcagtaaccattcaaataaattttatgacttgttagaaggtgcaaataatccattgtacgatagttatcgtgaagggcagtcgcagttgtcctttgcatctcgactcatgcacaacaaggcggagtataatatgagtgaaaagtcggtggactctgtttgcgaaatgtttacagattttttaccagacggaaaccaggctaccacttcacattaccagaccaaaaagttgatgcccaatttaggacttccatatcatacgattgatgtttgtaagaacaattgtatgctattttggaaagaagacgaaaagaagatgaatgtcgattttgtggcacacaaagatgtaagcctaatgacaaccgtcgaagaaccaaagtaccatatagtcgtatgtggtatctacctattgggaaccgattgaagagaatgtatcagagccacaagattgctgcgacaatgcgatgggatgttgagcaccaatcgaaggagggagaaatgaatcatccttcagatgcggcagagtggagatatttccaagagttacattcccggtttgccgaagaatcccgaaacgtttatcttgggttgtgtacttatgggttcaatccatctggcatgtcgagtaatcattcgttgtggcctatgatcctgactccatataatttaccccctggtatgtgcatgaatacagtgtacttatttcttagagttctgaattctggaccaaatcatcctcgaactagtcttgatgtcttcctccaacctcttattgaggagctaaaagagttgtagtctactggagtcgatgcgtacgatgttttattgagtcagaaatttaatctaaaagcagtgctactgtggacgataagcaacttttcggcatatagcatgttatcaagatggactactcatggtaaattgtcttgtccagtttgcatggaaagtacaaagtctttttatctacccaatggacggaagacatgctagtttgattgtcaccgtagattttttcctcatggtcatccatcccgtaggaatagaaaagactttctgaagggaagagaaccttctagcgagtatccactcgagtctttgacagaggagcaagtttattacgagcggttggctagtgtaaatccaccaaaaatgaaggacgttggtgggaacgatcatgaaaagaagatgcgaagctatgggaaggaacataattggcataaagaaaacatcttgtgagagttgtcttactggaaggacctcaatcttggacacaatattgatgtgatgcatatagagaagaactttctagataacatcatgaacactctcatgagtgttaagggtaaatcaaaagacaatatcatgtcaagattggatattgaaaatttttgttcttggccagacttacatattgatagtaagggtaaagctccaattccagcgtatacattgacagaagaagccaaaaagattttatttcaatgtgtgaaatatgaggttaaattttcagatggttattcttcagaattggctagttgtgtagatctggagaatgaaaaattttcaggcatgaagagtcatgattgtcatgtttttatggagcgactacttccatttatctttgctgaactccttgaccgcaatgtccaccttgcattatcaggtacaatacttactattttatttgccaaactttttttatctaatcatttaacttgaacatatattttaggaattgaagcatttttccgggacttatgttcgagaactttaaagaaaagtcgcgttcaaattctcaaagaaaaaatagttttaatcatctgtacgttgagaaagatttttccaccatcatttttgatgttatgtaatacctacctatccagctcccatacgaagctgaaatgggtggccctgtccaatataagtggatgtacccatttgagaggttttcaaaaagttgaaaggaaaagcaaagaacaaaagatatgcgacatgatcaattgttgagtcatataccaatgacgagattgcttattttttagagcactactttgccgatcatatacaaacaaaatcaaggtaaatatatttatttatttaaccctacttcctatacttcagaattaattcaattacatggatcaggttaacaagatttgatgaagttgaagttcctatatatcatgtccctggagtacctaacatatttgtgcacgtcgaccgtccaagtggtgaaatgtagaatgacttccagagaaagattaccaaagtgcacatgcatatgttttgagaaattgtgactattttaaacaacttgagagatatttttagagtctctttaatttaaaattccactaagataactttgatttatttttcttcgtttataaatatagtatgttcgaggattttctttctgcaaaatatccatgcttgctcacagtcacccttcgtctcaaggcaacaacttccaagaggaagctcatgcaacgttgccggagctacaagaggactcggcggtggctctgaatacgatacgttcagtgcctggctgggaaatgtggacatgtgtattgtctcccattccccggtcaaaaactgaatgctatgttctcttcctctactttgttctcgtgctctgcctctgtagataaagtcgtgttctgttgtgaatcattgtctgttgtgaatcattgtctgttgtggaacatgctctattgaaaatgatgctctattgtgtaacatagttgacttgtgaatcgtgttctgttgtgaatcatgttctcttgtgaatcgtgttttgttgtatatcatgctctattgtggaacatagttgactattgtgcttagcatgttttcagaatgatcttgttcagttctatactcgtgtgtgttcttgttcagttctataatgtgtgtgctcttgttcagttctatagtttgttctgttctgaatagtattctattgtgaatcatgctctattgtagaacatagttgactgtgtgcttagcatgttttcagaatgatcttgttcagttctatactcgtgtgtgctcttgttcagttctatacattgtgtgctcttgttcagttctatagtctgttttgttgtgaatcgtgttctattgtgaatcatgctctattgtggaacatagttgactgtgtgcttaacatgtttccggcttaagacatttaggatctgcctcagttctatactcgtgtgtgctcttgttcagttctatagtcacgttgctcttgttcagttctatattgtgtgtgctcttgttcagttctatagtctgttctcttgtgaatcttgttctgttgtgaatcatgctcgattgtggaacatagttgactgttgtgtttagataagttaactgttctcttagcagttctatactctcttatctgttgatgagttttacttttgtaacatgtttacttttttcattgttgcatgtgtttggaggtttactcgcgacagaggatctaaattggttagaaagatcacaaggatttttacacaaaaattcgatgctcccttctatatctggtcatgtgtaccattggataaaagagaaagattatttttagagtttgcggtaagctgatttaattatctccaactttctttacactttacagtttaactccatgaatttccatgcgaataggtctctgttgacgttcatgaccgttcacattttgggataaatgccaaatacaatacctgtgatgagctgcagaatacccattatgtatatccttgatgaggcttgaatttctgtcactcagaaataccaattctggagtatcgggtacatcacttagcagcttctcgaagaacaatctccaactagcatcattctcattgtcgagtatgccaaccgctatgatataatgatgacgatttggatcttgagctaaggcaaatactagaacaccaccatatccgttcttaaaatgtgttgtatccacaattatcactttcctcatcacttgaaagccttcaatgctagctctcaaagctatgaaaagaaacagaaatttatcgctctcatccaatttcagatatgttattctactttcatttaccttctttaacatgtacaaataacaattgatatctttgtagcaatcttccgcggtaccttttaaatcacaaatagtttgtcttttccttctcaatatggtggagtatgataaccttaggaactggatcaggttagagatctagagaaaagagaattgcaaaaatattttcattaaatactaagactgaacacattaaatatagatgtgaaaattaaaaatatacatgaagtcgaaaagaagataagaggatgtggtttaaaaatatgtcccacttttaaaaccttgtcatgagttttagcaagattagttgtttgtatataaatttttttgttttgctagatttcaaacaacataaacatgatatcaattgtgtaatccaaaatctgtaaatacatctaactagacttatattataatataacaacactcaaaaattagcaaaagtaaaactaatacattaaagaaaaaaaaacaagagatatgttagagcataccaacataaagaattatctttagcagaacgaatagatttatttggagttgacataatcacattcacatttcatgatttggagtaaacttgtgttgcatctctttctattcttaattatcttcttctaatacagatctattgaaattgacgagagatcataacattaacattgttaattttcttctttttcattaggcaaagtacttcaattccttttttttattttcttcaaacatcatttttattaatttataaaaaattaactgttcgctagggagaaccattcaggaaccgacgtgtttacatgggagaaaagaatatttctaatccaacttgtttggctaaaatgtttgctcgattagtaaaacttcgaggaagaaatctaatactaaacgaagaaaaaataataatgagagaccgaaaaaagccatttccgaagcaaagatttgccattcttcttggttgttgagcagagatatcaaatcggagcaatcagatgcaaatgctccagaagtctcggcaattgatatcatgcactccatagcgcaaagtagagagtcaacttccgcatgaagtgatcatagacttcttctcgtacttttgaggccaagatgaagaggaatatattgctaaactaaaacccatctatgtccactcaggttatcatccaaaagccaagaagaatcaatttgacatcctaaaatagtatttgaatctctaattacctatatcgtaacaataatttaaatgaaaagactaaaaaaaaaaattaggattatgtttatgttgtttattagttatacctaaatgacgaaggtatctaaaatttaactaaatcaatatgatatatttgatttcaaactatgaatattcacgatgttgcgtctcaaagtcaacaaaaaataaattaaaaaatcaatgaaatacgaaatctataataacagttatatgaataatttcatattataaatcattttttgtaatcatgattgataaataattacatcaactttaaatatctcatttcatagtagaagttagtaaaagtaaaacgataattaattttagtaggatatggttgataaaactattaaatatagtcgttttccggttcttttttttttttttgatgaataacatgttttggatatattgttgagaagtttttgagcaatactatttgaagaaataatggtgaagagaagatctaaaaataaaaaaaataaagtaaatcataattaatacaacaactaattgataaatgtcaaagaaaaaacttattgatataaatagttacattttttttttacgagagattcatatacttcaaaacaaataccaataattatactaccaaattgtaatatatttgattacacatatcattacttaagtaaggcatgcataatcacttcacctaggcctgggcataaaaaccgtacccgaatacccgaaccggaaccgaaccgaaaaaaccggttcggggcggatacaggtacatcgattttacactgatgggtcttttattagtgtacccgtgggtatcggttcggttctaggtattacccgatacccgaaagggtaaaccgaaaactcgaaccaaatctcaatacccttaatcccttatagcattaggtttactggtttagtcgattttaggttctttagggcaatccaattaggcttttgtcgatttagcttctccctattactcgtttcccgattctagatctctactctttcctttatcaatcatctgtttttatttcgaatcaatcctggaaagtcaagtgaatctcctcacaccgtctttggtcacttctccaccgtcggagttgtctagaaacaagtctgaggtaattttttgtgtcttttgtgattttctgtagattgatgttgatggaggctgtgtcttttgtgattttctgtgtcttttgtgattctagatctttactttgtgtcttttgtgattttctgtaaattgattagaattactcataagagtcaaaatataaatgatgttgaattgtcaatactattgatggaagcataagaatcaaaatatatactcaatagtcaatggaagcacaccgtgagctaacatgtttgtcaaatcaattgttatatgtttgtcaaatagaggtttgctttcaatcggctgaaggtgttaagtctgtgaatgtctgctatgttaaataagttcgtgaaagtctgctatttaaggctgtgaatgcctgttagtttatgtttggttttactcattcgtttaagtttgaacttattagtggttgtattgaatttgtgcttgaattgaatcttgttgcagatggcgtcttgtgatgaaccaattcctgagaatgatgaaatgacagaagaagagattgaaacaccacttctggaaaatcaaacaagaggaaagataatggaggggtaggtggaagtggttctaagtcaagcaagaagggtaggtcttgggtttgggatcatttcaccaaactgccaaatgatgcagaccattgcaattgcaattactgtgggaaagagttggcgtgttcaaccaagtccggaacctccactttaaagaagcatcataaatacttgcaaggcatattaggtatggaaagctgctaatgttcagaatactcaaaccgttttaactcctgatggtcctagtgggtgtatgactattagtaaggtcagtgaatctgtttggaaagaagcaactaacgagatgttagttttagctgagttaccattagcttttgtagactgtttagcttggagacatttttgctccaaagttcaaatgtataagcctcattctcggagaaaagctagaagagagattgtagagacttatgttagtaagaaagctgcgatgaagaagattatagagaacaataggcagaggttgtcattgacgacagatatatgggtttgtcccaatactgcagctagttatatggtaataacagctcactttgttgatgcttactggcagttgaggaaaatgataataggattcaagcatgtctgtgatcataagggtcaaacaatttgtgatactcttctagcttgtttagcggagtggggtataaagagagtattttgcattactgtagataatgctacagccaatacttcagctttgactaagttcaagaaagaaatgatgaggctgaatggaaatgatgcattgatattaaaaggagagtacttgcatatgaggtgtgctgctcacattttgaatctggttgtaaaggaaggattaacagaggttaatagcagtgtggaggctattcgcaatggaatccagtatgtgaggtcttcgacaccaagatgtcaagaccatatggaattcgacttatctcatgttagaccaagctttaaagttcagattggcatttgagaagatggaggctgaagataaaccctataatgattactttgcagagaaagaggatggaaataaaaggattggaccagctgtgacaaaagactgggagaatgttgacaggttagttcagattcttgagattttctataagtctacattggttctttcagcttcaaactatgttgcatctcataaactctacaatgagatagtctccattactataaacttaggtgcattgacgtatgatgatgatggtttaaaggacaaagccgaagctatgttagctaagttggctaagtatagggatgcatttggggaaaaagtggaatttaataggcttgtgatagtggcaagtgtgtttgacccaagaaagaaaatgaaatttgctgagttatgttttgaaaggttgtatggtcaaggcagtacaaaggctactcagctccaagattcagtttataacatcttgtctgatttgtttgatgagtatacaagaaacaatttattgaacaaaagtagtactggtactactgggtcatctactcaatcggaatggagtcaagatcaagttgtgaatgaagattcagagagaccagttctgcgaaatggatttttatatgagaatatgaaatatgaatttgatgagattgtgaaggagacaggattgcataatacagctaatgaggtggataggtatttgaaagagcctgtggagaaaccaatcattctaaaaggtacagaatatgatttgctaaatttttggaggatcaataatgggaagtatccggttctctcactcattgctaaagatatacttgcaatgcaagtgacattcgtagcatcagaatctgcatttagcacaagtggtagagttgtgaatccattcagaagttgtctctcacattacatggttgaagtgttaatgtgtcttgagcaatggctaaaatgtgagatccatctcaatgaaagaggcgtctccacaataaaacaactactttcggagatcactttagaagatcatcttatgagaagtaagttcagattctcttctctcttcttagttataacatcatgatttatgattctaattcatgttctttggttttgtgtagagcatgaactaggtgaaacagatttcgatttcaacgtggaatgaaatacaaaggttagtgagttagtcagtagtgattcaatgagatattggtttacttgtgagttgtgatttgtgattgtgacgttggtgttggtttacttgtgagttgtgatttgttagactggccccctgaatctccagacaaccaatatcacttaaataagtgatagtcttaatactagtttttagactagtcattggagaacagatgattgatgtcttagggccggagaaacgcagacggcgtaccacacaggaaaagatcgcaattgttcagcagagctttgaaccggggatgacggtctccctcgttgcccggcaacatggtgtagcagccagccagttatttctctggcgtaagcaataccaggaaggaagtcttactgctgtcgccgccggagaacaggttgttcctgcctctgaacttgctgccgccatgaagcagattaaagaactccagcgcctgctcggcaagaaaacgatggaaaatgaactcctcaaagaagccgttgaatatggacgggcaaaaaagtggatagcgcacgcgcccttattgcccggggatggggagtaagcttagtcagccgttgtctccgggtgtcgcgtgcgcagttgcacgtcattctcagacgaaccgatgactggatggatggccgccgcagtcgtcacactgatgatacggatgtgcttctccgtatacaccatgttatcggagagctgccaacgtatggttatcgtcgggtatgggcgctgcttcgcagacaggcagaacttgatggtatgcctgcgatcaatgccaaacgtgtttaccggatcatgcgccagaatgcgctgttgcttgagcgaaaacctgctgtaccgccatcgaaacgggcacatacaggcagagtggccgtgaaagaaagcaatcagcgatggtgctctgacgggttcgagttctgctgtgataacggagagagactgcgtgtcacgttcgcgctggactgctgtgatcgtgaggcactgcactgggcggtcactaccggcggcttcaacagtgaaacagtacaggacgtcatgctgggagcggtggaacgccgcttcggcaacgatcttccgtcgtctccagtggagtggctgacggataatggttcatgctaccgggctaatgaaacacgccagttcgcccggatgttgggacttgaaccgaagaacacggcggtgcggagtccggagagtaacggaatagcagagagcttcgtgaaaacgataaagcgtgactacatcagtatcatgcccaaaccagacgggttaacggcagcaaagaaccttgcagaggcgttcgagcattataacgaatggcatccgcatagtgcgctgggttatcgctcgccacgggaatatctgcggcagcgggcttgtaatgggttaagtgataacagatgtctggaaatataggggcaaatccatttgtgatgttggtgttggtttacttgtgagttgtgatttgtgacgttggtttacttgtataggtttgtcaaggggtcacgatttcacggagagggtaggagggagtgaaagacattatttatgctatctagtttttttctttgttggacttgtattttgttcaagtgagttgtgacttgaaatttggaactgttgtatgcattttatgtctttaacagtttaaatttggatgattggatttggatgttttactctagttaattgcttcacgttatgttgttttttgaaatgctaagtaactttggttcaagtttttatttttgggtataatgtagtgtaaacagggtaaaactttggttcaatggtgtattctggtataaatatccgaacccgaaccgaaaccagcaaaaaccgattggatttcgggtttttagcggttctcaaaactgatacccgaaccgacccgaacccgaagagacctgaaccgaagctgaaccgaggttttttatttaccctattgggtcctagaattgtatatccgacatacccgtacgcgaccggatattatccgaacccgacccgcatacacgaatgcccaggtctaacctcaactatggatcgatagagagacaatttttgtgtgtcaagattcctcaaaatatgaagtaatgataatatgtagtagaaattttgatgaaaaacatgtaaaaagtaatttgaaacgaacgatacttgggttccttttattcacctcctttcttagccaattagaaagtgtcatataattaaaaatatatattttaattataaaatcagatctaataatttgtttataaaataaaaaaatcatttaataacaaatctaaacattactctttttttaaatccaaattgatatttaattttgtttaagtgtaaaaaaaaaatctaaactctaaccgctcttttataaacccaaactgtcatatataaactcgtttaattgtaaaaaaaatataaaccctaattatattttataaacccaaaccgtcatataaatgttttttaattgtaaaatcaaaactctaaccactcttttagaaatccaaactaacatataattttatttaattgttaaatgtaaaccctaaccacttttagtaaactcaaactaacatataattttgtttaattataaaatttaaaccttaatttatatctataaatcaaaacggatatattattttatttaattataaagtcaaaatcctacatataattaatctcatttaattaaaagtttacagattttattttcttaattataatatgacatggcataatgataagtttagactaaagggggtgaatacaagggtgaaccaaatgtatgtaggtttagtctacatatatttttcatatgaaacaaaacaaaacaaagaaaataactattagggacatttatttgaagaattcatgaaaaatattattttggtcacatcatttagccaaatgtattttggtcccaatcatatgaataatttcatattataaatccactttttgtaatttatgattgataaattattacatcaactctaatattacattttatagtagaagttagtaaaacatttataaactaaaatattaaaatattttactttatcaacaaagaacacaattgatgattaatttagtagtttacttttgagaaaactattaaatatattaactctaaattccactaaaatctatctctttttttatgagttgcaaatttttatctaatgatgttgatatcttatatttaagaagattattaaagatataacatttcaaattatatattatcatttgttcattcatttagtcagattaagcggttaccatttgaactttaaattatcaagctagattttgcaacagaaaaaaacaaaatttaattatgttagaataattcagcgagattgagttggattttgtaattaaaatatatatttaatagtagttttcccactgcctatgttgtttttaatggtaacatgtgtttggatgtgaaacaacccgacccgtttttttttaataacataattaaatattctcataaatacttaattaaaccaaccaataaagcaacaattaaacttcaagtcaaaaaaattattttctgaataaataaataattcaaccaacaaaaccaagaatgactaacaatcctaacacaaccctaaccggttccaataatcaaaacacaaaaataaaccaaacgagttcctagatcatcttctcttccttgccatgatttcacgatcacactttatctttacctgcatcaacaatacaatgatatgcgtaagtattatcataaatacttagtgaggcgatcctcccatctacgagctatacacacaagcaaattaaagggtataataacaaatacaatacaaacaaaccagtcattgaacaattcaccgaaaacacattcacccaaaacacattcaccacacctacatatcatcacacaaaacaaatcacacaacccaatcgctcagataagctcatggttacgcactcaccttaacaaattgattttaacaacaagtaaacccaggagagactctccttgcgtctgaaacagtccagaaatgtcctacaacaagtcacaaccaaaagcaaccttgaagcaaactggacataaaaaacaaaaacaaacagtctcaaagacgaaaccctaaaatacaaactaactgttaaatattatatccctccggtgaaacgctagccttatacgtcacaaagcttcccacaaaaactcgtgccgatcagaaaccagatgagactacgatcgcagttacaattcccgctggtcctaattcgcgtctgagaaaacgtgttttacgaaactgcgaataactcaaccaattttagtccaaaactacttgcgtaaactggaaaataacgataaaagacttggaaataaccctaccaaatttcgttacctttgacaacgatttgatatgtcaaaaacgtttcctcccaaaccctaacaatactggtacttctcattctctctctttttctcctttgtaaaacgaaaagtggctaattaaagccataatttcgagtttctttcttttataggcacactctagagtttccaattaacccaaccgattaaaccaggcgatttaaatacaaactataaccgattttccggttcacgggcgctacagaatgaattgttaaggagttttggagcaaaacacaattttcaatcataattaatataacaacaaaatgatactaataatgacaatttcttttgcgagagattcatatacttcaaaacaaatttgaatatttgtgcgaccagattgtagtatcaatcatatgttataatatctatatacatatagagttaattacatagataagtaacatttaactaagatatgcataataattacttcattcaactatggacgatagagtgacagactatgtgagacaagattcatcaaaatatgaattgattataacgtgtggtagagaatttaccaaacacatgtggaaaacaattagaaagaaaacaaaaaactgacaccagcccttaaagaaagatttttgaatggtaagaaatttagattttctacgaatgttttgaataatcttgattccggtttagaaatgatcaagacatttgtgaattacctatataaaatttcatatttctattttgcatacaatattttcaaatcttataatcaagtacataaaatatcaaacatataaaggatctacaagttcaagaacacataaaattattgtttaaaagataaaacttcacatgcaaacggttgtttgaactatttatatataaaaaaaagtgaacaattctttttgagttgtgttgtctcaagaatcaagtgttttctaaattttactattacacaaaccatatctatcctccttattctttccgtacaacttcagatgttttgtttttgtcaaaccattctctatctagcggtgagagagaaaaaagatttccaattttttggtctcttgaatcgtaaaactcttatgcgtttgttaaaataagggatgtctactaagaatattttctaaataacatctaaacaaaaaaaaaatagttttttaaagttcaaaacttataagtgattcattaaattaaaatattagtaaaattgatcactaatagcaatatagatttacaatgttgttacgatatatctttattttgtatgtctctccaaattatttttgtacatattgatggttgtagattttttttgtaattaaagagatttgaaagcaaattttgtgtcaaggttctaagaaaatggaggaaagttgatcatattaatgacacaatgaagcttgacagtttatcttcattttgttatatgtatttttctctattttcttataacttcaacacagattcttcactttgatcaatattagtacaaacttgaaatgttatttgtcattaatgtttttggataaatcagagacaagaaaagagatattgtcttctatattgtaacatctttatagatatttatatatttttgttagtgaatgtgtacaaataatattgtaggttaataaatgtaaaatagtataagattttataaatatataacttaattatatagtttggatcatgttttctttaatttaatagcttggcattacaaaaaaagattattttatatcacttattttgaatatttgtataactgaaaattgatgcaattatacatatagttgcagcacttgttgtaactgatgttcattttgaattagttacaaaaaaatgttcttatccttttaaatcattttgtgtaagtgatgttactatttgcatcaaattatccaataacgttaatatttccaacagccataataagtgataagtatttatatcaattataaataattgaattttaagaaaatgatattcaattttttgttaaacaagtattatgtaatttatttatttaatatgaaggcaaactattatttttttttaataaataataggtgcatattacacttttttaatagggtcacattcagtgtcgacccttatgctaagcaagctaagcggctgcatagggtctccactttttttttttgtcatcaaaagtaatagacaaggtaaacgtgccaggtaggggtcaaacctacgaccttctgcttaggaaacagacgctctatccactgagctacatgcgctttcttcttatggtctccacttaattgtcacattttaagtaaatactttgtatgatattttaatgcatttcttacgtattgaattttagccatgtaattctctaagggatcatattagtctagtgtttacttaagtacatgtaggtgtatgaagtggtttaaacaaaagaaacttacaaaatttgacgtataatcctaaaaacatatacatatacatatttatatagttttagcaatcaaatatctatagttagcatttcttaatcatccatatgacaactatatatacagctatatttgataatatagttacaggagttctatgattattttctacatttttttcaaagtttatattttggttgaaattatttttttttgtttttgcttagggcaccaaaaatggttggaccggctttagtcacactttagattaagaaaaactataaatcattgtttacagtgggagcaatgtgaaacattcgcaaattaagtaaattttgacttcaccttttacaactgatgcttaatctttaataagcattggttttattgttgtaaattttgaataatttaaaaagtgatgttatcaaaattaatagatgcattaattatctaaatgatgtaaacttatatttgaatcattttttttgaaaaagtgataaaaactaattgaaattgaatcaattgtatttaattgatgtcaaactagttaattataacatcaattaatttaattgatgttaagccatatatatttactgcttttataaataaataatttaaaataacatcatttagttttatgccttgttcaaaaaatcgctaggcgctagtcgggcggtgatggtgggcctagcgcctagcaggaaaatcggagattatacggagattaatcggggattagttttagggttgcttattttttttaaaacatattaatctattatagttaagaaatctctataatattgtttttaaagttgtattaaacacatgaaaacaaaattttatgttcaaatttatgatttttgatacaagttacgaacctaagatgaatattttaaattttaatatttttctaacaaaatgaaaaaaaaaaaaaaattgggctaggcgccctctaggcgagtctaagcggatcatgtgggtctaggcgaacaaaaatcggatcaatgattaatcttcccgatttggacaaaatcgttgcggaccccattcgatcagcggctaggcggccgattttcggaacaagggttttatgatataattttagtgatacaatacactcatatatctagatatgaaatatcaaaatcaaatcttatatctttatttttatattactagcaaagattttctgaaatagcaaatctttttaattgttttatctacatattgctattataccaaaaactcatctaacctagtgataatttctttataatatatattattaatttaagtaaaataaaaattaaataactttataattgtttgccacaacacgaaatatcacctaacagaacattaatttaattaaataccgtcaatttagaacattagtttagttaatagtcaaaatcatataccaattcatagcttttggctcaaacctctcaagaagttcttatcgattaacattagtttattctctagttcacattgaggatctctgacattatacttaagagacgagtagcaatgttaacgttatcaaggatcgaagaaaaaaaaaaaagtagaggcaatattgtgatgtaagagttcagtagaagttgtgctggaaagttcttctaagccgttatagcaaagcttgtgttaagaaggaagtgttagttttcgttatgagaaggcgtaagctcaactacaaggtcgtgtgttggttatgttcctctctaagcagtatgtggttcactagagctacaagtaacttaaaagtaagtgagttgatgaaacgagatcacgataaagaatttgaggacgaattcgatttaagtgggggagaattgtaacaccccgattaatgtaagcgcattaaggcccatatagctctttaaacaacaaaaaaagttttggagacgtgttgtgtttgtgagcgtatatatacatgtgtatatatctccatctccgccgaaagccgcaaataatctgaagcacaacgcatgagtccaagcagccattgatgtcgtgtattgttgccgacgttgtgggatgtcaccaccatgaatctcgatcgtgaagtagaagagagagagatcgtgatgagtttgtagcagaccgagccaccaaaggagatataatgtggagattgtggccaacatatccatcagagaaaataagccatattagatcggagaagagaaaagaagagaaaaagaaaaggaaagaggagatggaggagatttcgtgtagatcattaggaaaaggagaattggttgtgatattaaggagaatcgaagatggtgatgattggaccagatgagctgaggcgaagaaagacataagcaaggagagaaagaaaaggggggaagacaattttaagaagttgtcttgcggggcgaatatccgacataccagagtgattcagatcacaaataaggtgtccctggaaatatcacactgtaaagaatcaacagcagtttacggatcttgaatcgggtttatatttaagaacttatatgcgtttctttcaggacaagtaactggagaattatgtgtaatcctagaaagcagttttgtattagcttctttgagccaacgtttggagatccgtaacaatgccgatcggaactaattttggtggagagctttgtgatactactgaatacatattcaacggtggaattacgtttctaacggttagtcattgacttatgcgtatgaatccgagacagatttatatagagtaaatcgtaacgagttttattgtttgatggcgcaaacgagctcggaagatctgaagctttgcaggagcctttaagactcagtgttttagttcatggttgatggagtgccaagatatatggtgttcaatagtatgagcttggaagcaaactagtaacttgtctaaaggagaaaggagaagagagttgttcttcatcttcaattaggctaaggtgacggtggtgtttgcggatatgcagtagactctttccttatatactcattgatagttgctgagtatagcctcgagaattgtccttgttgatttatgtgaattcgtgtgaagttaggttgttagtaacatgatatttgaaatgcactggtgacatgattcgatatatttaatatatattaaattacaaaaattattatgtatatgagaatagaaaactaaaaagtatggaaaagatatttgaggatgttggactgtaatggggccgacgggttcattacaggtcattaaccgctaacgagcaatgagagaaaggatccagctacgggtcgtggccgtctagagaaaaggcttgagtaaccatggttaataggcttgagtagccaaagttaaaataggcttatgaagccataaagtaaaatacttaaaactaagaataaaaataaaatatcttgttgtgagcaagacgcatgcttgtttgtttgattgatagacattctgaatctatgctaagtaatggttactgattatatttggaacgtttttactgtatgtccagtggacagagttgatctcctcactgagtaaacttgttttactcacccatttttctttttttctccaggttagtaagtcttaaaagttgtggttgaagtttgtttgttggtgaattttaaagttttggctagaccagatgaataacacgctatctttgcatgtatggcggaacaggtgttataggcttcctttagattatttatctttctagatgtctaagtttgttctacctaataacacatgtttgtgatggcataagttgcaaaataaaactttgcagaatgaaaaaccatacaacaaaattattttaaaaatatgttgattggatacatgttgcagaatgacaaaataaatattctaataataatatatttataaataggtataaatatatgtatatatatttttaataaacaaaataatgtttttaaaaataatttaaaatattttgagtaataattgatattagaaaatgaaagattattagaatttattaaaaagttatgaaaatgtttttttgtattattaatgatataatttttgtgtaaacaatgatattcttttcttttacaattgctaatatttagtatgtataaataattacaaattattatgcaaataaacaactatatacccactttttgtgtaaacaatgatattcttttcttttacaatttcttgattgacaaatttcttgcataatcgcattagaaaacaccattatgctattatgcgtgttaccaatcagagctgaagacttaatgtcaactcatcttcattggggtttgctttcgggttcatgttgggcttaaactatttcttgtaaaatcagtgttgtatggtttttgtttatactagtccatgtatgttggttcaaatttcttgaataatctcattagaaaacactattatgccattatgcgtgttaccaataagagccgaagacttaatgtcaactcttcattagggtttgctttcgggttcatgttgggcttaaactatttattgtaaaatcaaagaagtatggtttttgtttatactagcccatatgttggttcagcttaataaaatcaaacttttgtgcaaataaacaaataaaagtctgtccaggtcggcttaactttttaatatcgtaaagattagtaagcgtaaatgatattttaaacgggaaggtagtggttgataaaaccgaatttgttttggaacctgaattgtcacaaacaatatgaaaacactattataaaatgaagagagataaactttaaattaagtagttggctcatatgatccaaatcggtagaacattgtttatatatcttattatataaagtatggtattcaaagttagtaaattataagatcgagactcgtgtcaagtcaaccaatcggatgtttacatgaattattaaagatttaacttttttattctcttaaaaatatagaaaagctaaaaaaggaaacaaatttacgtatactaatttatatgtttatatctattttcttttcttaattaaaagaaaacttaataaacttgtttacatgtgttagccacccatcctttaaacatctcctctcgactaacaagaacatctgctttatcgatgcctcttggaaacctgtgacctggattttttcgggctggatcttcaaagataactatgaccacatttatagtcaaggctcaatggtcttgtctcatgtctgctcccctctaatggttgaagctttggcaactcttacaaccataagagttgcaactggattggcccttacccatatctctttcgctttagactcgctaacgctagtcaaagctctcaattcgaagctctagtcgaaggaatttcatgggattctccatgatatcctcaatctatctttgaattttatttgttgctctttcaattctttaatccttcgggataacagtcgccaagctgatgcattagcgaaggctgctctacgctcttctcgtatgaaaacctaatttcaatataagagaatgttgttaaaaaaaaattaaaaaatttagcatgtattattttttgtaaaaactcattttgtaaggataataatattaatttaaaaaaagccatctacatatacattttggcaacacttttatcaaataaatcctgaacttggaacttatttacaacacaatgtcattgacattgttttaacaaacttattttcaaatttaaatataaatcgattttgttactaaaatttaggaaactaaaagaaaacaaatttcaaaaatcatttaaatttgggttagctgattttatagccataaactgattgcattctcagcttccccccttcccccccccccacacacacacacataaactttgataattcaataaattgcaacatgtactttaagattaatccttaaaaatacgtttccaattgaaccggtcaataaactgagattaaccacaaatccgcgtttactataccgctattgtgatttatccgactaatcacccacacactaacattccttttaaggggatcaattcgcattaatcaccctaatttttcattttaattcatttcttttcagttaataaaaagaatcaaatctcatattacaatatatgctttaactagatattgacccgcgttgtagcgcggatggatatgtttattaaaaagttatacatattttttatacaaattattatttctatataaataatatatttttaagacataatttttatttatgttctcatgttttatgatctcatatttgttagtttaatattaaaattaagtatttgtttttttggtttgggttttttagagataataaaaatctaaaatttgaattatctaaagattgaccctcggtacaccgggtcgatatttgtatcagaaaattaaatatttttattttaattaatattattatatataacatattcaagaggtacatcaaaggcctatatttttattaaataaaaaaataatatttttattaaataaaaaaataatatttttgtctttaaaatgatctatagatacatgttattgtttttttatgtatgatactatgatacacctctgtatgatttttataactaatttaaaaaaaaaattaaaaacattttagtttttaaaattgtataattgtattgggagatttgcaaaactcccccccttttactactcttttgcaacaatacccttttatattgttcatttttaaaaatatcccttcccttgaacagaatgaccaaattaccctcatgtcataagaacatgtaattggaaactgaaagttttggcgacaaaatttatttttcccgccaaagaaaaaaattccgccaaactttttttcccgcaaaaaaaaaaatttccaccaaaacttttttcacgtaaattttttttttttcccagccaaaaaatgcttttaaaatccttgtaaattttttaaaaactctttaagaaaaccttgtaaagttttttaaaagctttggtagttgataaaaactctgataaatcattttaaaacctcttaaaatctttataaagtctttaaaaacataggtaaatactttaaaatccctttttaaacctttgtaaatcattttaaaactttttaaatagttttacaagatttacaatcgttttttaagcataagtaagtggaattgaatgatttagaagggattttaaaagcttataaaagggtaaaacatgatttacaatcgtttttaaagcataagtaagtgtcaaagaatgatttacaagggattttaaaaagggtttgcatggtttacaatcgattttaaaggataagtaagtggtatagaatgatttacaagtattttaaaagcttataaaagggtaaaacatgatttacaatagatttttaagagtttaaaaaagatttaaaaagagtttaaaactctttgtaaatccttttaaaactcttataaagtctttacaagcattttttaactcttagaaaaataattgtaagtatttaaaacatttataactctttttaaaccattttaaaactctagtgaacccttacaaaatgttttaaaaagatttacaagagtttttaaaagattttaaaagaatttataagaaaactcttgtacatcttttaaaacccttgaaaaattctttgtaaatcttttaaaacacttttaaaccctttaaaaatctttaaaaaaacctttgtaagtcttttaaagccttttaaaatcccttgtaaatcttttaaaacccttttaaaatcctttgtaaatcttttaaaccctttcaaaatctcttgtaaatcttttaaaatcttttaaaacctttttaaaatcccttgaaaatctattttccgccaaaataaaaatttcgtaaaatgtttttttaaaaaaaaattttggcgggaatttttttccgaaactttttggcgggaaatttattttagaatattttaggcaaaaaatattaatattttattttgttaacctaaatcaatttacaaataggggtaaaatggtcattaaaaatttaaagagggtataaatgaaaatagcaaatagaaaagggtagaattgaaaagaggtagtgtgaaaagggtattagaaagaatttttcaattgtattttgatggttaattttaggatttcatccatagtatatcatcccgtgtcaatttcgatccaaactcatcccaccatataaacttgtcccgtgaaattaaacatcattttaacctcgtcccgtgaaattaaaacttaataaaattttaaaatcattaatatttataaaaaaattatagactttaacttttaaaaaagtttaaaaaattgtaatacttaacttttaataaagtttaaatatatatatatatatatatatataatattttaaaacttttaaacttttacttatttaaaaaaaagaaccgaagtaaaacgaaagctcctgctcattcgtatttcaaaatcactttggtcttttttatagtataactcttaacgatttcctcattttttaagcaatgtgggacctttaaaacttatttttttcatcgatggagtattatatgtttgttttaagaaatttgaatttcatcaaatgcaattttttaaaaatattttatacctatatgtattttatatataaagtaaaaaatatatatatttatatttaatgtcgatatatagattttaagaaattaaccttaatcaaatatagttaaataaagaaatattcaattaaggataaaatttaggaaagagttaattcaactaattaatgcaattaagctaattgtaagtttttagttataaagtatttgattgagattaaatttataaggactaatattgaaaatagtaaatatgtgagggatttttggctaaaaaccctaccaaaaatgtatatgtagatattttcataaaaaataattatgccacaatttaaaattttgaaaccctaattatttctcaatccacattttttcgttttaaatttgcaattgtacaaaataattatcacttcctaaacctttcttttctacgtgtattaagttatacaaaaataaattgatattgctgattcaaataatgttagaaaaatgcccaaatttagctattaaaataaaaaaacagttagtcaaaaatacaagtatatcaatcccaaatcatgatgaaactaaatatttatttataactttttttacccaaaacataacattatatatatatatatatatgtatttgttatataaattttgaaatacctttttaaagtacttttgtgttagtaaagtaagaatttacaaaaaatgtcattagaataaagtcaaaaacaattattattttttaaatattattcttgatatattttaggtttataaaatattattaataatttaaatataataactttaaatttcatgagacgagtaatataacgggactggtttggattgatataacaggggttaaatttatattttattattttatcatcaccaattggtttagttacaacattaatataaattatataacaaatactaaattaaaaaccgtaaaagttaatattattactatatatatatatgaatatatttgtcatgtggtgtaccacggattaaatcctagttgatgtttaaaataacgcaataattatattacactatgggacacttttacaaaaagatttgtcgttttaggcacttccaaaagagaaggcactttggcttgttaaattgtccaatttgccctcaaccttattttctctttttctttagcaatatttcttttgttcttcaccatctcttttacgaaaacttctcttcttcctctctctctttttccaaaatcaaaatcaaatattataggataacctcaatattcaaaattcaaatttaaatcttataggatttatcatcatcttccctatctctcaacaatctaacagtgacaataaactacactatcttcgattaccaaaccccactacgcttcctccgtaacttccagtgtcacctcctccttagccacctcacggccaccaccagcgtatccttttccaccacaacctccaccagatctgtaccttctactatgtatctcgtaaccactgtcgcctcctccatttccgccaccacctcctccgtattcattaccgcctcccttgcgatatccgccaccacctccgtcacaggctcctctaccgccttgagcaaatgggtggctctggtaatttgatttttcttttttttaatttcaatctcaagtcaaagaagaattatcttaattggagagtactaacccttggtttctttgagattgtgatttattttgcaatttaaatctaagttttgacataaatttgagatccagttctctaagaaacttcttcttcttcaacaatggcggtttgatttgatttttgctctctttcatgggtaaaactcgtttcacctacgtagcatcgaaatttcggttaatcaaacctcatgttattatggacatagatcagtaaaaaagtttccgaatggatatatttaaatggacactttcttatggacaccaaaaaattgtttgttaatttttctttcagtttgcagatacctccaccttcaagaccttacagacatagaactttggtttctttacaaaccacaataatcaaatctcctattattgtggacatggtatatagaatggatatggatcagtagaaaggtttccgaatggatatatttaaatggactcgttattatggaaaccaaaaaattgtttgttaatttttctttcagtttgtagagacctccacctccaagaccttgtggacatggaactttggtttctttacaaaccaaggttaatcgaatctcttgttattatggacatagtatatagaatggatatggatcagtagaaaggtttccgaatggatatatttaaatggacacgttattatggataccaaaacattatttgttgtttttcttacaggttgcagagacctccacctccaagaccttatggatatagaacttttaccaaagttttgagataatcgagatcgaattttttaagaatcttctctcatttgtttgcagaattggtatcaccgatttctcgtgagccgccgccataatcgataagaggaatcgtggaaggggagagagagagaaagagagagagagaaagagagagagattttctttatttctaattacgtttagttgaattgagggtaaaaaagtccaaaaaaataagaattagtgtaaaaagtgtttattccctgaaaagtgcctcaaacagaataatattctctaaaagtgcctaaacgtgtcacattccctaatttatttaacattaatttgtgaaaacgtcaaatgaaaatgtttgtgttttagtcaaatgtcgagaaaatcatgtagtgtcatgtgtaattaaacttaagtgaatcgtataccaacctattaaatttagttaaggaatatcaccttatgttaattcttagctcaattttggtattttttgctaattcaaagtgtgactcgatttgcacttatagtttgaatattcaacatgaaagaaaatatattaaaatagttctctaacattatataacttatcacgtatattttttgtatgacgtgaccacgataaaatgtctatagtactatgccattgacaactataccattagttttgggataaagtcgcttatggaaagagaaaaatcgaggaggcttaatttggcacacttcacatgaataatagacaagataattcgtaatcggattgtctattcaaactataacgttctgcattagttggaagattccccagcaatggtttaagatgagaacgataggagaactcctccgattcagataattataagataagctttgaatgttaccaaaaattgttacctatacttcttcattatttccacttttatacataaaatttctttgttgaactctaaatttgaacttttcaaaactagttttcttaagtatttacatatacattttaagaaaatagtttcaaagtaaaggtatttccgttatcgagatgccagcatgcagccacttcaaaacaaacaaaaaagtttaaaccaatattgaccaagaaagtcaaatacttatatctcgacttagacaatagcaaataaatttctataataaatcaaaatatcttacgcgtttaaactatatattttgtaagaaacttgagaaataatcaaggggaatttgtaaaaatagccttttcaatgcatttttgcaaaattatcttcttccattgtccactttaagaatacccattttcataaacaaaatgactaaattacccttcatctaatgaaacaagtaattaaaaactgaaatttttccttgtaaatttttttaaagcctttaaaagctttgtaaagttcttaaaaacaagtaaaataaatttaaaacctcttaaaatccttataaagtctttaaatactcatgtaaatacattaaaacccttttaaaggatttacaagagttttaagaagattttaaaaagtttttcaaaagatttacaagagtttataaaggatttcaaaagaaattacaaaagttttgaaattgcttaaaaactccttttaaaatcctttaaaagtcctttaaaaactcttgtaaatcctttaaaaatacttttaaaactctcgtaaatcttttttaaatcttcttaaaactcttgtaaatctattttcctccaaaaatatttttcggagggaattgattttggtgcaaaaaaaatactttggtgggaaagttttggctggaaaagtttttgtcagacttcttttggcaggaaaattatcttcgggataagttttgcggggaaaatcgtttttcatttagataacttaaaacattttctaatatggctaaaatgataattaaaatttaaatgagtatataaatgaaaatggactaaagaaatgtgtacaattaaaaaggggaagggcattcttaataatttctcaataagctatgtattgtccaaaatagttgaaattaattactagttttgctagtttaacaacaaactaatggtacaacacggcttaattgcatacataacttatcatcccggcccataaccgtatttttatgcttctctataatatcatcaataatgagggagaaagtgaaaaaattccacacgcaaatcgtgatgatctcaaaatagggtagtcacctgcaagataaggtatggttagaaaagaaacaattttaatattgtagtaggtatacacacatatatacctcacgacagacttcgtcaaggctcttgtttttctttttgtacatgtccataatagttacaaatgatttgtatatacggtcatcatcctgaaactttttgtacaaataaatgatatgtaagggaaagtggaacacaaaacataaattaaaaaaaaatctagtaaggctatactagaaaaaacttttatttggtttaagttcttatagaattgttaggaaaaacactcaaatttatgataaaagcaaaattttcatctatcttttcaactcaaagtaaatatggcataccttaacttttctgacaaaatcaagagcttctgaatactcaatatcaacatacttctttggtggagtttgttcacactcgagttttattttgaaaccattttggtcacactcgggttttatttcaaaaccctttggcaagaatgtattgaaacctgatatcggctcttggtcctctttgaagagttctttaaccactgattttacaccacttggatcaattctgccatagaatactttttagattctttcttcatctcccagaaatcacaagagtcttaggtgaatcaaaatgaaatttatttaagagcaaacccaattatcaacattgaaaatatatacctctgagctgagtaagcagtcatgacctgaagaaacctaacataaatttcacgtttgttttgaagtttgttcttcacaatcttgaggtacttacgtgggttacttttagttatcttcgatgcgctcatggtttcaaaattgtcagtgcttaatcaaacacataaaaagagtaaaaacgcgaataacataagtctctcaatattaaaaaaattcaacaatagaacacaatcaaagtcacatacaaataacggttagatctagcaatcggagtacaatcataggaaaactgcaatggaatttaaagtgatcattgataaaatttgaaataatgtaacctcagtattatttcattataaatacttcaaaacaagagtgaaaggcttaaaacaaaattcgaaagagaaacaatgagatataattaaagaagcacatagagcattaataaacacctaaaatcatctagtggagaaagattcctacatacctcatacgaaacaaacagataatagacaaacaatttcaacaaagaaatctgagagagatgtttaaagtttttacaaataacataaaacggatagacttatatatagaacatatgtaaaagagaaaatcttcattttaaggtaacatatttatttttctctctttttttttgtgttctttcatcttttatttgactagtttgtgacttatgttttgcacgcggttttattgttactttttaaaaatatttaatttcgtgtgatacacgtctatttttgtttaaaatattttatatttgttgtaatagtgataaaatcaattttttcaaaaagttaaaagaaatatatacattttctttttacacatggataagtatgagttgatcatagttaactttataaaataaataaaaagcaatccctaaacatatccctatacactaatgtattacatttatttgattttataataataatgcattaaatacagtgttcttttggttaaatatagtaaaaatacattttctattaagtagcttttctaaatatttataagatgctgatttgatgggatatttatagtataatttaggaacaaatttggagttattatgcctacaatctggtaattttgacttacaaacttcttaaaaatgaaaaagtaatttgatttaaaagtgagactatatttggctatttttcttattttaatctcaacaattaaatcaaaaggaactttcaatattaaattgaccatattgagctaactaattataaaatagatttgattaagtggtaatgaggtggcactctagatggaggagtttattttgattatatataatttctatattaaataaaatataatttttaatattaaagagaattgaccatattaataagaaatttaaaataaatatattatatattcagattagaaacaaaagaaaattatactgaaaaatcatctagtctctttgtaagttccttccctaaagtggttgatcactaaaccaccttatttctttttttctttttcttttttttagcaaggaaccaccttatttctttctttcttttttgacagcaaaatacaatcatccatttaagctagaaaccgacggtttccttcaggtgagaagtaagaaccagtccggtgtagaggaagcttacatgagaaagatagaatcgcgagatcttgcctttttagcgaagtattcatcgcggacattgtttaacgtggaacaaaagatagagaataaatgaggaaacccaagttttaacatactcaaatcttctaactccgaagaagaaaatgtgggccactcatcgggagtgtccaagacccgaataagctccttgcaatctatctcaaaagaaacattggaatggatgatgacatgagggaacacattgccaagagaagagcttcaaactctatgtgaaggagagataaacaatggtgaatgcactttaagccaagattagagaaatgatgatcaaaaccaacaatccatcctaaaccacataaggaggttgtgtttactcatgacccatgtacctggcatgtcaagcaatctctgataggggaacgagcgactaagtcttgggtaggtggtagcgaatcaataatcttttcccggcttcttgccactcgtaaagatttcgcctcttagcttgcaagctgaatggtgtctgcatggtggacttctatgttcccaaagactttggaattgcatgcttttcaaataaaccatataatccaaggaaagtattttatactttcttcgcttccgccgagttctttcgttctccagaagaggtaatctaaattgtgtaaatcgagggtgcaaggaagaccttatttgttcctaagtggctatcaaaaagcacatggtttatggtctcatcacacattcacagtgagggcgcaccttatttgttcctaagtggctatcaaaaagttgttggcaggtagctagacatctcgtggcagtttgccaaagaaagtgtttaatttttctaaaggattggatcgtccatgaatgttcatgtagtgccttaacattgggttactaaaagggaggcaaaatctcctcaaaggcaagcttttgttgccttgaagccggatctgacagtgtaattgccagatttgtatggacccagatgtacgagtctctcaaaaaggcatgactcagatgtagtctaagaatgtggggtatttcttatgtagctatcaattcttgaagtttttcctgctttcatgcctcaatgattgggtctatcagcgataacgtataggttagaatctattgatgtcaacttacttgtcattgggcactctagtatggttggaatccatggatcactccagactctggtgtcgaaccctgagccaatgtttttcctcaagcttgagagaaggagtggtctagccgcaagcttattacgccaaccataggagggtagatatgacggcttgacgagaagggggctcgagtagcagaagtacattcctcttaggactcgcgccacaagagagtttggatatttcattagtctccacaactgtttggcaaggagggctagattaaattcttctaaccttctgaagcccaatcctcctttagattgtgggaagcagaatttgtcccacacaacccaatggagacctctactctcttggttgttgctccatcataagttagaaatttcactgttgagtttggaacaaatgttttttggtaaaaggaaactcgacattacatacattggaaaggcttgtgccactgatttgataagaacctctttacctcccttagagagtaattttgacgaccaagtatttattcggttttttagacgatcttgtacaaaagcaaaaacttatgccttgggtccatagctctttgcaaggagtcctcagtaggtgcccatacctccttcttggtggatacctaatatccttttaatatttgccttcttttgaggatggaccttgcttccgaacataactgaagacttggagaagttgattaaaattaccagattaaacaacgactacatatctaccaatgcaataatagaaccgtacgactccaacataagacaaaacactaatatccagtttggagaaaaaaatgattaattaaaccatatgaatctgaaatttgtttttccaaaacttgtttaagaacttttcattgatgtaaattgcaatctcatagttttgttaacaacaaaatgaactgtaaacccaatttcagactcgtgtttgttcaatcctaaacatgttggtttctttcctgatttggctatatctttttataattaataacaatgagactatgatagtttattaattaaaaaaatatacaatatattaatcagttcgggtagccgatttggaattgaagaaatgtatttagtatcgagtattaatttataaacatatactaaaaatcttaatcaaatttttttccttaatccaaaatctctaagctttaaaagttcagtagccaattgacacattgtttgtatttataatttcaatatgagtccatcctaaacctaaaatagatttaagcaacttgtaagtgaatatttaaataatcaaaacgaattgttataaggttttttgaaccattttagaggacccaaaaactgtgaatcggagatggaagatccacaatttgtaatcgaccatatctccttgttcaagcaactttaagataaactcaaaatggtatagactcttcctgaagaagaaatcataatctcacggctatataaaaagaggataaaactaataaaagactaaactactgcttaactgcaacagtattaattaaaaaggttcaaaatcacagtacaaaaacaattaatacaaaggaaaatcgtggaatcctgctctaaatcaattttttaccagattcttgaaatttacctacaaagaaataagatcttgtaagattgtaaattcatatagtgataattacaaatgcgatagacatgtactaacactatgtgatccaacaaaatacaaaagagaagcattagggtgttgctaataagagtatattatctctgtatttgtctaacaagtggtggtttcgaaagagatttatataactcaacttaatttataacaaaaaatcattttaatgaaacagaaaactttgtagagtttacacctcaaagtgaatgtccctaaatgtctcagctatttgagtaaaccgaccaaacagtatcacaaaaaaagccatattgcatcttcctctggcttcacactcgtttcttcagacagtgaaccggcttcttctggaatcatcctgcgtatagacaaagatatattaagccacatgagatctaaaacatgtacaaaaagatgatagcttcttctttagagaagtgtaattacatggttattgaaagttatcttgtcggtgacatcaagtatctccttccacttcttcccaatacccatctgaattacaataacaaacaccaagtaataaattcatcagatagattcataaaccaatcttaacatattgccaagttttaaaacagatgtccattgacaaagatagttatgtttataatgccaatgaactattatatttactattatgtttataagtcgcaacatataaccttaacattaaaaacaacaattttactattgcagaagtatctcaatcatcagaagctggtaaaactctcaaggacaggcaacaaagcaagttaagcatcaaaacccactagctatatagttctctgtgtagcattaagaattctcgtaacgagtgttagtattttctaaagtttaccaaactaaatttggatatcccaccaacaatcataatcatgaatagccaacaccagcatcaatataaacatagtgagaagacaaacaaacatcataccagaacagcttcattagacttcgtcctagtccacaaggagagcttgtcttgcttcgactgtggacggacactagcaaccacaccacaaatctcatctgcttcatcaaattgctctccaatcaaagccatcaactacatatcataagaaatagaaccagtcaccaaaaccacatatcatctaacaaaacacagaagagtaaaaggttagggttagggttagaatgtaatacagtttcaagccagcctttgtctaaagcttccttcctattagcagtaacaacccaagtccactttcctccattagcacactctggatcttcccactttggctcaacaccagctttgaacaagtgaatttcagcattcgctgtcaatttgctagtctgaaatatagtctcgtgcaatctaacaataaccaaaaaattaacatccttagattttcggatccatacacatagatcgagattcacaataaccatagcttctatacaaatcccagatttagaagttacaaagcaaggcattgacaaatattgaaatcaaaggagaagagagaaagacgaacccccaaaaatcttcgacggtgtcgaaagtataggctttacgaagagaagctccccaggcggcgcctttctttgattggttatcgaaccagaaactccactttctttcgagcttgtgtggttgtttctccgcctctgtcgccggtaattccgccgccgccgggagaggctcgttcacatcatcggtcgccatattcttcgcagttgagttttcttctgagacggcttttggttacgagagagggacagagagattgtttttgagatgtattttggaatggtttaagaagtgaaaagggctatttctggactctattgggtcaattttgggccggtccatcagagcatttaactcttcttttcttcttttttctttttctattgtcttttggtatttaaaaaacaagtaaaaataaaaatctccaaaattaattgcaagtggaatcccaatagacaagggtttaaagtatttttttttacaacaaggtgttgttaaaaaaaaaataaaaaaaaatacaccaaggtatgagatctaatttccaaatagcggaatttctttcatattgtcaatgcaaaatcttaattagtagtatcaaattagaaaatattgtttacattagaggttctagagtaataaaagatattttattatataaagcatgatttttaaatttagtaattcatatgactgttacatgtgttatttttgtagatcttagattttggtacatgtaattttattataaattttaaaatttttaatataaaataagataaattaaagaaacaaaatagttttaaaaatgtaaataagatttttatattatagttccaaatataaattaaaaaaataaagttattataattcctaatctttttcccccaaaaacaagaaaacttacaaatctctgcttgataaactcatatactctcactcgccgcctaaacttcggcgacgtttgtttgatcgccgtcgttctctcttaagacgagaagaagtggcaaaaactgtacattctgtatcagttaccgcataaaatccggctactaattatatagaggtgagtatttgaaatctttttccttctaagattataattaattgtaaaattcctttatgtattatatttaatataataagatcgtttccttaaatcctttttaaaatttttaggaagacggtaatcaattttcttttagaattagtaatttcaaattagaattagtaattgatttataatttctttcagtaagatacatataattatcttctttacatttttatttctttaaaataatatgtaatcttatattttctatctttgtttgataagatacatataattttctaatatttatcttctttcaattttttaaaattgttttatataagatatattaatattttactttggtttttatatttatatttttactcatttaataaaattgataataagattacatgtgtcaaaatctaaaatcgaaaaccatactttatataataagatataataatagacaattctcaaaaataccactaagataagttttttgttccaaaagtaacaccatcagtttttttcgtaacagtaccagtaaaagatactttttttgaaaatcccacaaaactaaaattcacctataatttaaactttgggtctgcatttaatattttgtgtttaaattttagggtttaggatttagttttgaaggtttaaaatctttagaaatcatttttagactttgtggtatttttgtactaaatcgtttgtagaggcattttggaaagaaaaaaaaactatttatggttttttggaacaaaaacttagcttaatgctattttagtgtatttctctataataataaaactatgttacttttagtgataaaccttctatttttttttttgagactcaattcaaatcagtttgtttagcatggttgacaacaaaaaagggtggagttaaagcaattttttatttgctagtgcttgtgtcaagaccaccatcattttaacaaaaaaaagaagtaaaaacttaatagctttaatttgctcataagtaaaagataagacatctacattcttctaatttgataattggctcaatatgaaatgcttaatgtatgtcaattttgggccgaaccaccataacattaacactgcttttcttttccaattctcttttggtaagaagtgggttaaattcatctacaaaatgataatgtataacatactctcctcacactgttttgataccaaaaaacatgaaaaaaacatgaaaaagctagcaatagcagagatgcagagtgtttaggtagctcaacatattcattgcggtatccttagataatgatatattactaaaagcaaaatgtttatcttattatatcaagtacagatttaaaagttagtacctcatgagatcatgacacatgacaagtctaacgataagatgtttgtctctgtcattaaagatttaactttatttgtactaggtgatcacccgcgctacgccgtggtttttttggattttttgtattgtttaacttaaatatataaaaaatttatttatctaatcattcactcatgcaataagcaattacttttagtattaaaaatattttttataacaaattctcaccaatgcatcatacacataattcataaacaacgtttgtcttaaaccaatttaatagaggatagtgttggattctagaaacttaagaatttgatggtggagctccttacgtattcctcaccctcaattatttattatataaatatcaatttaggagaatataaatatcaatttttaagagaataacttactcaaatcattaagtaatctacgactattatacactcatactttgagtttggattacaaaaaaaaaatcttcgagtatgagaaaactattataatggttttattgaaaaatcatgtaatattaaaataaatttagtaatagtacaattaaatatgtaaatagaataatatctaaaattaaataataaatatatcattaacctataaattaaaagttgaagagattacattaattatttaatagacacatgggaaatgctaaagtgatgatgtgtcaatcatatggagagagttggccaactttcatatatatgattctcttaaaaaaatagaaaacctaaaaaagtaaacaaatttacatatactaatttttatgtctatatatatataattatttttattaatcaaaaggaaaattaacaaatttgattttacatgttttattggtcaattaaataaatctagaatgtattaatttaaaacaaaatcattagtatgaataataaatcattaaataaagaccactaaagtttaaaataacaaaataatttgatgaaaacttgaatttttatcatttataaaatcttgatttttttattatttgatgaaaatgttaatataaaattttaatgttttatttataagtttgaagtcatttaatatgagtttgacattaggtaaacctaatctatgagattatagaatgtagcaaaactatcaatgtttcttttccaaaatattttgtggtttttctttttggttcattatgttttgttatttgtgaattattttaatatgaagtaattatattgattttatatgatatacatattattttgatataaaatttaacacttatccattaaaatagcatgggcataatcaaaatcgggactattacgatgaaaaagatagttaaattgtatgataaaataaaatgtgtaagattaaaattttgggttttagaaaattactaaacaaaatatagacaaagtatgttgactattatttaaaatttaaatatcatcaataagatatagttaaagtcattaagtgtatagcaaaatgaaaattctaagattaaaattcgattaaaattttttttactaaattaaatatttaaaaatagggattatcatttactatttacaattctaatatcatgggtaaaaattgataactttttttaaacccgcctatctaggtgggcctaacctagtttactaattactatatgattaacttattaccacttttacttcttcttttttggtcaaattactttattgttttttataaagtcaaattactctttgcattgtaaataatagtagtaactaaaatcttaaaacaaaatattcaacctttcccattattggaatggtaatgtcttcaacaccattgaccaacgttaaggaatgtcttttaatatttttggaacctaaatgctaatactgtataccacaatcacttatgagtattgaagttgagatagaggaggtacaaggagaccttatctgcagaagacaaaaagccatttttagcaaaactaaagaaagaaaaaagattgaaacacaaatatgcgccactcgtagtccacccctatctctttggcaaaagccacttcactctttttccctttttatatattaaaaataaagattcttaaggctcttcatattttgctttttgtcaactctttctttgccatctgttacaaacaccaaactctcctgattcatcagttttaagtcttcttcaagtcccaggtaacttcttcttaattgtttcctcttgtgttttgttaactttttttctagcattcttgatctgttgttcttgtcacttgttttgttttctggtaagagaatagaatcttgttgtaataaagttaaactctgtctttcagttgctaatctaagctttggttccagtagatcttagggtccacacattttactaattaatccactctctctactttttaaacatggatcatcacacctttttggtattataatggatctctttgtcttttgcttttaatttaatgtattttggttacttactaatcacctttttgcatagtgaattgggtttagtttaatcaccaatctggtcaagaatctgaatgattcagaccaaagtacaccagcaatctggatgattcagaccaaagtacaaaagtctttagattcttgatttggattttgattgacttttggtttttgatcagggatcatcaatccaatggctcagatcttagcagcttctccaacatgtcagatgagagtgcctaaacactcatcagtcattgcatcatcatccaagttatggagctctgttgtgttgaaacagaagaagcagagcaacaacaaagtcagaggctttagagttcttgctctccaatctgataacagtactgtcaatagagttgagactcttctcaatttagacaccaaaccttactctgacaggatcattgctgaatacatttggatcggaggatctggaattgaccttagaagcaagtcaagggtatgaatgatactctacattgtatagtaaccttttaatgtcaagaactatgatactaatactgtttatgaatggtttcagactatcgaaaagccggtggaggatccttctgagctacctaagtggaactatgatggttcgagtaccggtcaagcacctggtgaagatagtgaagtgattctatagtaagaattttttgtcacatttataatctcattctctcttttatttcacaatctcatacaccattgttttatttagcccgcaagctatcttcagagatcctttccgtggaggcaataacatcttggtacgtgtcattaattgagtttgatagtataagcaatttttttcataatgatatactaattattgagattttgttatttgaaggttatctgtgatacttggacaccagctggtgagccaattccaacaaacaaacgtgctaaagctgctgagatcttcagtaacaagaaggtctctggcgaggttccatggttcgtcaccacccttaaatttcattgtaaatcacatttacttacaatttggtgcttaagtttgaatacttgatcatggttataggttcggcattgaacaagagtacactttacttcagcaaaacgtcaaatggcctttaggttggcctgttggagcgttccctggtcctcaggtgataaatcaagtcaagccaaaacagtgttttcttgtggtgttggtaacaaaaaaagtgaccaattctgttttgttgtcagggtccttactactgtggagttggagctgacaagatttgggggcgtgacatttcagatgctcattacaaagcttgtttatatgctggaattaacattagtggtactaatggtgaagttatgcctggacaggtctctttctcaatggagctctggtaatatattccgttatttgtttgtcaatcctctgatgttattaaaacgtttgtgcagtgggagttccaagttggcccgagcgtaggaattgatgcaggtgatcatgtttggtgtgctagataccttcttgaggtaattcaaagtctttttttgtagagatctgtgagagtgtttagccctcgtaactgttgttatcttcttgcagagaatcacagaacaagctggtgttgtcctaacacttgatcccaaaccgatagagggtgactggaacggtgctggttgccacaccaattacagtaccaagagcatgagagaggaaggaggatttgaagtgatcaagaaggctatcttgaacctctcgcttcgccacaaggagcacatcagtgcctacggtgaaggaaacgagagaaggttgaccggaaagcacgagacagctagtattgaccagttctcatgggtatgtatatgctgtggtagtctgaatgatttcacatataagtgtgtcactctactcatttgctttaaaacattttgactacgcagggcgtggctaaccgtggatgctctattcgtgtgggacgtgacaccgaggcgaaaggaaaaggtactgtttcaaggatggttacacacatttttggtatgcaatatatttgctaacatgtattgttgtgaattggaatataggttacttagaagatcgccgtccagcatctaacatggacccatacattgtgacctcacttttggcagagaccacactcctgtgggagccaactcttgaggctgaagcccttgcagctcaaaagctttctttgaatgtttaaaattagtcgaaactttcatgaatctgatgaacacacgtgtctatgtggtctctcaagttgtttaaacattcggattaagacattgtttgttgtcttttcatttgcatttttaaaactcagaattgtatggacaatgttcatccttttatattggttcttttgactgttagagcatgtccaatggttgaatttaagctggttcttaactgttgaaagatttaatgtgtaattgtgtatttaagtgtaacatcctcaatctcaaaggttgggctttcatttaaattaaatgataagcttcagcccataagcccaagtgattataaacctcaaaattggaagggttttgactatgtgtgttgccatatatgtgtataagcgtaaacatctctctcaacaccgccaagagaagaaacgagagagagagggagagacaaagactgagacaaaggaggatcgtagtgggcaaagtcaccatcgttgcttcgtacgtggccgtctttcattgaagttgttgccggttagaggatcgtagtgggcaaagtcaccatcgttgcttcgtacgtggccgtctttcattgaagttgttgccggtgctaaccggagtcgagccttgtcatcattggtttgttgggtaaggaaacctaacctgtttatgtcttcttcttctgcaagttcgtgttttgatctcataaactctttagtttaaggttttgtttgtgaagaagaaaaagacgaaactgtgacaagtaagggttttgtggactaatttcccgtcgaaccaaagagagttacttcgagatttttccgtcgctggatagatcttgctgcaaggaatccatagaaattgacggtatttcaaacgaacgtatattccattctaaatccatctcgaaagttgagggaaaatcactggttctgatttctgcaaaaccctgtttttcagataaactttcagattcaagttggagtttctggaggagattttcggtaagacctgagctgtttagaaaccatagacggtggtttttgatacaaaaagtgttagggaagctatctgagccgtcaaaaccgtcagaaaaggtaaatcataatcaccataacgattgcttcttacgcaagaaatttctgtttctgccaattcctgaaaccctagatacacagattcaatgtgtcatctttagaacagcgtatagaggtctcaacgtatttcgatcggaatgaatttttgtggacagttacgtcgcactatagggttgagaatcaacggtgggattaagaagttaacggtccattgttaagttactagcacgttttggtgacacttaaagattgatttggttctccaaattctaaatttcagtttgatttttcttttcaggttttaaagtcttgaatgatgatgaagaccaaggaggccgatgcctcgaccgtgaacggggcctcgaccggcttcagttgggacatcaacaggtgttcggctggggctgcagcgacaagcgtctggtgggacatcaacaggtgtccgcttcccaatgacgttgatgttcgtcgggtgagtccgtttataaaacgggcgttggagaaattaggctacactggtgctctcacaaccactgccattggcatactaacagacgttcctcatgacttcctcacacaagtctattcttctggaatcgctattcaccacatccctcttggttagtgtctttttacattattagattggattttttgtagatgaataggttgaacaattttcttttataatttgtcaaatggttgcatgtagatgaatggttgggaaatttcggtattgatcacaataaaaagttgaacatcatttaaataatttaaacaattttcttttataattaattcattttttaactttttgacaaatttttggtttcgggttttcgggtagaggaatttaagacccaatacggtaaatttttgggttcaatttcgggtctaatttttcgggttggttccgattctggtaatcggtttcggttttttttcccaggcctaaatggttcattcaactctctggactacatttttttgagagtttatcttttaattcttgaagtttctgaaacagatatctttgaacttagttcggctgtcatttattggacttgggacaatctacctccgtctaatataatgctcatatcaaatgagttaatcttctcgagtcttcttgacaagctatgtggattcggatacaacgtcgttcggtcaatatttccagatgatcctcagcaagccgcgtccgcttccacttcccagggccgtacttattctgggaaagcttactggcaagcttacgggcagatgctatgggttcggaggcactagaagaggacaagtgtagtgaaacgtgtgaaactgcctttccttgtgcgcaattcatagttgttgtccaaggctttgaaaatttctccacgcatctcaagagtgaagaacatagaaagaatgtaagcatcctatccaaaaaaagacagacttgttgtgtccatacatttttcattgtctaactacatatgtagggttcttctagttatctgttgccttaatttgactagattttttttccgtccgagcagggacgatacttcgataacgatacaaagcagctgaaagcaagaagaagaagaagaagaagaggatataagagttgatgggtccatatggcgaatgtcaagactcgcttttacttttcagttaactaatacttttataagaaattttcacggaagtggacgaaaaaagatttgctctcaccgtttgtcaaagtgagaactggttttcacggtttgtcttttcattcaatttcggaccaaattaccctgagaaaacttaataattgcacaaaccaaaccgtgcagcagttcgtatcggttaagttgatggcataaaccaaaccctacagcagttgttttcggtttagtttatgcggttcagttttgaaaaagacaaaaaaaaaaaaactgaaacgaagaaaccgaagaaaaagaaaaagagaagagagtaacggagagatttgagagagaattagaaagcgaaacgaaattcagtatccattgcttcaaaattcgacataacttcgaattgttgggtagttgaattgagccactgaactcccacaaccggggaagagaaagttactgtttttccccgcgaagccaagagaaagttactgtttattccggcgaaatttgaacctccggcgaaatagcaactttagctatggctgggaataaagcaaacgacaaagtcccgaggaagtagcatggtccagggaaggagaagcgggtattaagagtttccctgcggagaaaacgctctgcgacaaaggcaacggaggaactgggttagaatctctaatttaccgtttgttgtctttgggtgtatcagaattgtaaagcttgtttgattaaaaggttagaactagtcggaatttagcatatctttaggatgaaaaattgagaagtagaattggaaatctctgtttccgccaaaaatatgattttgagttataatctggaaaatgtttgtgtacgtacactacttcggtttgcttagcagtatatcacttttaattgcaggtagtccaagtgttgctccgactgaagatcttacagttgaagagttaccaccaagactctttgctctagaccggtacccttctgagacgaagatgaacgcgtactctaaaccggagtacatttcttacatagcaaatgtactaaaggggaaaccagagatgcagtttcttctcgattctccatttggggaactttttaaaatacccaaaaacaaggcatctttcaatgctaagcttgtccttggactaatatgccgtcagttagtgacaaagaaggtgaatgagatgtggattgtattcggcggtcatccaatcaaatttggattaagagaatttagtattctaactgggctggaatgtgggaagtatcccaagaagaaagacgtggaggatgttatcagtgtgaaacctgagtgtgaaagtgtttggaagactctgtttgatgagaggtttggggacacggttccaacaattgctgatttggtgagctggctgcaggaggaggaaagcatggaggggtggaagcaactggcactatctcttattattttggttgacggtgtggtagcggcccacagtaaccccaacagggctacttcgaagactgtcgagaagacgaagaacctggagttcttctgcaaatacccatggggaagggtgtcctttacccgtactttggggaggatagcaaaattccaaactccttacgatgctcaacaactaataaggggtttacttatagggtcttatgcactccatggcttcccattagctctccagcttttaccttttcgaaacaatcccatcaattgctaagctaggacctgatgatgtacctaacatgacatttgctgagaggtctatccatcgtcttgcctcactacgggcaatccggacatctcgcattttggagtgtgaggctgctgatgaggtgtgttaaattgtgtatgtacgtacataataagtaaatgtacattatctatggttaacatacttatttgtgtaggttgaggtcaactatattgtgaaaccagctgataatgtttgtcctccatctctttcatgggatgatgaagttgatgatccaagggttgattacattgaggcactgttgatagatgggcaccagtggcaggaggatgaatgggttggaggctatgctagagtaccaaagcaggtgcgcccaccacaaaaagaagagataggtaagtataagtataaaggttgtttacaaatttttttgttattgcacttagaagaaaaccaattaatagcagcaactggtctattgtaaatgttaagaggaaacgaaatgcaccgggcccgagccctaaagaacctgctatgaaaaaacagaaatctcaaatggactgtgataatgaagaaaatgctgaggattgttttggagagcctgtgcctgagaggattattgttgaaatgagaaggtctttcaaggagctggaagaccaaatgtatcaaatgcaagaagatatgaaagactttgtccgtgagcagatacgtgttgcccttgatccaaaaggcaaaaggccagaacaaaccatactttcccatgattcgcgggaaccacctacttctatggataaggcaccggttactgcgaagaagccatcgagaaggatgtctacaaaaggaagcactggaacgagaaagtcttcaaggctgactcgtgtttctcatgatgtggacacttttgcgctttctgttggctgtaattccaaagaggaagatttggatgtccctggtgtacataccactgctgtcggcggaagaagaaaaccttcaaagccgaagaaaaatgtttcttttgctgttgacactactgagctatctgattccaataaggaagatatgcaaggattcattgatgaacaggtaagtcatgtacgtacattgctaaaatatttataatccatatgtataactgtactgtctgctttgatacagtatggcgctaataatgaaagtgattttactacaaatgatggattggattcttcggccgctgaagaagagatattagacactggatttttaatagttccttatgctggatccacacaatcccatctggtatgtcgtctactaatactcttaacaatctgtttaaatggtgtacatacatattcgcttaagaagttagttaaactatgtttcaggatcgaggaaatgttgttgttggtaagactgtctttttaggttcaatgtctgggttgtctatgttacacaggaaaggaggcctgtggaagaagctactgttgacaccgagatggaagaagttccatctaatgtgtctgcaagagtttcagaggtagatcttgtggtaatcgttatatacagatttccatgactatatgcgtatatattacattaatttatccacttatctaccgcttaactctatggtagcctatgtttcaggataatggaccaaaggatgttgttgaacctggcttagttggtacccatacaggggccgatgaaatagctgatgctgacacagagatggtagacaatccatcaggtttaccttcaacatctgcacaggtatgtgttagtcacttgttctttttccatatgtgtacgcccataagactttgaaaattatttttgtttcaggaagaaacaagagatgtcagtgttgcgactgaagctaatggcagcgagtcagaagaaacttatgagcaatgtttttaaacccgacccagacagtgaaccggactaccttctgagtcactgggtcatcgggtcaaccaggttggaccatgggtcaattaattaaaatttatttaataaatttaatattaatagagattttagagttttaagagttcttatacatttaaaaacaaaataatcatataatgtttataaaatataaaatcagattatgtttaataaaatattaaatcatttgcaccaaatatatatatatatatatataagcaaacaataataataaagtgactaaatttttaaaattcaactaaatgtctaataccgtaacaaatatagtaggagatcaccaatgacagaaataaactaataaaacatcgtgaattcacagaactaatatcgggtgtctcactcactattcgatttattttttaaagcagcattgtgaagtctttatcaaaatctaaaacatcaaatgagtttaagaactgaaattttttctaaaaatgtttgaataaagtctaaaatcccatattttattccgaaatgaagagaaattttttaaacccacacccagccgattcaaccggttcaccgggtcacgggttaatggtgagtttttgtggttttttttggttttgaacttgtcgggttttagcactaaaccctaaccggaaaagtattcgggtcacggttcaaccggtcggaccgaacggttcgggtcgggcatgaaaacactgcttatgagccttctgatggagatacagctcacatacctggcacaagtgtacgtacatttttgtcactatgttctgtgtacatatatattgtttcatacattactaaaaagttgctttccgatgataaattctacaggttgaggcggcaggagaatccaaattagtgacagggatggaagttgaaatacctgagaagacccacagtgatcccccgtcaccatttcaagtagttaacaatgtaagctaactcttgcaaaaaataaaatgtactattaactgttcaaatgtataaaatttatattatgcaggtcatacgggagttggataccaaagccgttggtgatttggctgcagctactgatgtggaggtaacaatttgtgtgtttcaattcctattctcggaataacatacataggagtatatgtgtacattatatagacttgtgtacgttaacttgcacaggtagtgatggaagagccgggtattgtcgaggggtctgtaggaactgaggatcctaacccagggtcagatgaagcagacaagaccgatattcctaaaaataatgtatgtacctattttaaacatagaaaaacatatgaaactgttgttgacaatcatatttgttaacaggatgaatcaaacaatgctgctgctgtcgaagtaaaagaagaaaaaaaagcatccccaaaggtcccaaaaaaagtgaagaagcaacttgtctatgaacaggatgatgcccatcctgatggttttaggcaaaaacagtcttggtgcccgatgtaccaactcaacagacagaggttgttataagggctggaaatgtctcatacaatcccctggacatggttgacctttcaaaagtagaggaattcagcaatatcattaaaggaccctctgtgtaagtacattatattaaaatggattatttaatatctcaatcattatttttgcaagtcttaagcttgttatcaaatatttttctggatttacaggattcacactcttttcgggtttcgcaaagtgcccaacgatttttttgcgaaacttctaacacctagtgaatgggtcgaaagttcggtacgttgcatttatatacgtacactccttgttataaattgtacatagatgattaaatttttggtggaagtgtacgtacactgatatattttttgaacatttcagcatttagaaatgatggcaatgttgatgtgggacaagaacggggaacagatgatagcaaacagatgtattgtattggacatgatgctgacacatctacttaccaagcgggtgggcgacttcaagaagtgtattaataagaacgggttcaaatggggtaaatttatgtccgacattgctaatggagtacacataaaccgtgaacccaatatgaagtggttgaaggatgtcgatgttgtgtatgctccgatgaactagaagagtaaacattgggttgctttgggaatcaaccttaatgaacggctaataactgtgtatgacgctttaatatcgcacacgcgggagtcggctgtgaaggcgaaaatgactcctatttgcgaaatgatgtcgtacttagtcagagcgatgtgccaggatgtattgatttctccgtactcagttgaaccttttgagtatgtgcgttgtcctaccgttgctcaaaacccaactataggagattgcgggtcatacacgatgaagttcttggagttgcttacgtttggacaccctttttcggaattgacaaccattcgagaagcagatatggtcttctaccgtcagaaatactcggttgacatctacgagcacggcaagcgggaggtcgtactgtgcaattgctttaatcgtccaagaacaatattctgattctttacaactaattattatgaacaaacctatcttacatatgtgattgcaactacatttaatttggagattgtctgaagttaatttagtttcctcgatcatattgtcgtacacatcgttcacttccaattacataatgtaaatgtgtacgtacatatctatatgtctcgtacactgcatattaactttataacataactcaagtgataaattgatttgacagccaacgcttaccaacacaagtatgacattcatttcaactgtaattgccccaaccaaattcacagtagttgttattaaagtgaagaaattactgacgatctctgactatctcatttcaaacatggttaacccgactcttcccgacgatttactctcgaagatagctaagaacctggctgaccaatgctggtccgaccttggtccactggtacgatcaggcactcgtggaagagacattgtctaccgtccggatgtcctcaaagatgccaatattctcaccttgtgtaactcgcccgatgacttccaagctggagggggccacaatctctccggatccgctgatgaaggccgacatcgaccattttttttaaggtgttttgcagctaataatcccacggccgtgtattacgaaggtattcgtgttctaacgcatgaacgaaacatcaatggagccatcaggctcttacagcatcatgctccagtacgagcaaatgcaacacttgcatgcgccattgtattcatatgtgctgggtatgattatatgggcggcttgtttctacagctcttcacccgcaaccattatccattggactcggttgccactcgaattttgggtgatgagttcatcgaggaaataaagaagtttgaccctccatacatcaatacatatggtcctacgttctcttatcctaccagccatggaattagtatgcctccttgcgccttatattgttacatggtatcaggagctttccaaaacgtttgcaaccgctgttacctctggtcgtgtgctaggcgtgttagtcaaatgctatagttattcaattctactttatatgtttgtttatgttatccgctatgtcatgtttcaaattatgataaggcttctactatgttgtttatgtttatgtagaaattatattattgcttaagaaatttgcaaggtgtgttatgtttctcaagttgaatatttttcagccaaattcgcatatgatatttagttcccgtagtaaatataaattgtggatattaaaatctaagcgtccacaactacgtacacgtgcatctaccaaataatacttaaaggtttttggtttatctcggaaaactagatatggacgtacgctagcatgagatatcaactctcacgtacactaaaaaatacacatgcaaacatatgaggtctttggtttgtctcataaatggtgatatttatgaatagacgtacactgatagtacactacagcgtacactgtttgttgggcaaatgtagaaatgtaaatgtggacgtacactaaaacgtacactacagcgtacactgttttttgggcaaatgtagaaatgtaaatgaggacgtacactaaaacgtacacgtctagttttaagttgttattaaaaagaggtttctcataacaacaataacaaattatatatggaatactattacgttgatttgacaatacgaatacacatcatcatttaatacctttgcaataaatacaaccataacttacccaactatatcttcaatgatgcttatttaagtgttggaatttcattttgttgaaacaccttactcctaaatatgccaaacccaaatattcctgatgatttgcttgcgaagatagccaagaaaatggctgacaaatgttggtggtacctcggacctatgttgaaattcggtcctcgtggaagagacattgtctaccgtccagatgtcctcaaaaatgcaaacattttcagcatgtgcgacgatcccgatgacttatacgcggcaggccacgatccaaatgacatcaactccgaaagtcgctatagacccttcttcaaacggtgcttagaagttggtaaccccacagctatttaccatgaaggactgcgtctcgttacacatgagtctgacattcagggagctatcctacacttagagcgaattgccccaaggaacgccgctgcaatccttgcatgcgcaattctttacatatgtgctggtaatgctcacatgggttgtgtctactttcggctcttcggaagcaaccattatgctttggaatcggaggaggcacgtgaaatttgtgaggaggtgctagaagatataaagaaatatggtaatactttaaaatacacatacgctaacagtttttcgttctcggaatgtggtgacgtaagcagtcctgaatgcgcggagatgtgttacatgagatcgagactcttcaataatctttgcaatcaatattacatctggtggtgtgctaaacggattagccagattctgtagagctcacattcgccacgatcctgtcatatttataagttttccatgcaacaatatgtgagctttttacgttgattatcagtaatggaagtttgtttttaataattaccactttgtaattgattcaaacatactaactcaaactactctaatatgagacatcattaacacaaaataataataaaataataaaatatctacgtacacgatatatgctaatgtacacgtggcatagtttaattccaactataaagattacatagtgagcgacgatatagttagtaaatgaagacgaaaagaaatttgatttgacgtcgtataacccatatctagaagattttgctccatattaattacttgctgtcaaatacactctagaagtgacctctatcacactctcattaatatctctattagacgtacacggtttccgagcaacgtactcaattgatttggcagataaaataagtaagttaatgtttatttaaaaagattgtaagtaaatgcgttgacccctaatatagcactatacatgaagccatattgttccacttatatgcaatacaaacagacgtcaactcaaccttgtgtcagaaaacgtaatgagtagtttatagacgtacacggcgcgattatgagaggtacacagtagtttgtttaatttaaaagttactaatatgatgcactaaatatacatccacgtcacccacccacttacattgatggttattctcctctttaaaactcatgtcaaacacacttagttgaatacacgaatccgtctaaacctcctcatttgaaaaacaatgtctttcatacctccgctaacccctccaaccgagttgtacctaggaatccaattgccaaaccccataagcatacttgtcaactagctccccgtcagccagactcccatagagacgctaaggaacttagtctacagttgtgacatcaacacccttgcaatcgatgaattcatgatgtggccgtcgttactccaaccggagtctaccttccggccatacttcgagctgcttgtagaacgtggatccatcccggcggtttaccttgaaggtgttcgccaagcgagcaacttcgtgacattagctcagggcctttcagtcatgacaacggtcgctttatctgatccctttgcttgcttcgcaaccggtttgttctttacgtgtaccggtaatcacttggatttcctccagatcagcgaaaagttctgggaaatgacacccacccttgaagctggccacgcggttgcagagatggtgatgtatcacatcagccagcttcacactgaaaatgtttgccgctgggaaaggtcttggaggtttgtccacccgccgagttgcgtagggcaatgcacgttccatcatggctgcagggtttgttttttctactggtacgccagggagattgctatattctactagaagcaaagctgctaaggtctaagctactctactcggctctactctcaagtcttttggtatgagggatgcacacatattttgcaacacatgtgttccatgttctttgaaaaatttatgttttttgaattgttccaactctgttccatgttcaagtttatttatcttatgaatttcccctttaagttttactagatgtcttcgtgtacgtacactatatagtacattaaacttggtttatcgtacattggaaaattgcgtacacaacataagtataaatctaatagtttttgatgttgaaggcaccaaaacttatatacgtacacgatagcgtacaccagaaactatacgtacattgcgagaggatttgaacaataaaacaaggcacgtacataaaacaacaaattagattaacatttaaacggaaacaagaaacaacaacgactggaatgtagtttggttcttatggaaacaacaacaacaacaactgggaaagaaaacttaattgaaatgtagtcttatattatattaaaacggagaataatggttcattccctctagctaaaaaaccaccatcgcgatatccgcaacttctggtctgtccggattggcaaccacctttgaaatagcaccatggctctcaagcttcgggttagacaattcggttaaacgccaaaagctgagtgcgacaacaaaatttcccttacccaaactctgaaagtaaccatccaactactccgcctgttgattgcgggcttcgcactccaagacttcattgctacgttagaaataaggacagttagcgtttagagtgacattgtaaataaaacaaatgaaaagaacacttacaatctatcttttatcttgaaactcattttgagaccgtaatagtctgtagtcaatccgccaacatcaaccaacgctccaacgacatctagatgatggagaaacaaagataataatcaaaaaatttcaaaaatgtaataaatgaagcatcggagttattcctcctcaccgactaaaacgttcttgtaagcagatttctccaaaatgtagtcgaagggagtgaaatcggaatctggaactggtggtgatctcggtggggcctgaacgacgacggtccgtatgccgtattcatgctttgtttctctgactgagtcagttgccttacggaccaagaaagaggtgatcgtcttccacttattttcaacgaatcggtcttcgtaaaacggagcaaggcaacgatcgacagtggcctcaatacgggaattgtatccctacagaacatgatagtagacagtttaatatacaagttaagcgaatgaacgagaaatacacataatgttttgacggaaattaccgcgtaatctgccaagataaggccgagttcgaagacgttgggcgatataaccttcttgaagactctcacgacaaagacataaattcgccacccagtgatcagaggacacaattctgagaccatatgaaacccctccatctcacggatagcaagaacaagcgaatcgaaagactaatttttttttgtgaatgatataactgccggcacaagaaataggtttagaatgaggattctggataaaattaaggaagggaggagacttaaatagaggaaatctggaacggctacagttattaatgcggttccaactacacttgattcaaattttttgtactagtctggtaaccgtcatatagggtaattataacgttgatttgacaataaacagcaacagttacgtcctttccattaaataccaacacaaccacaatatacccaaccatgtctccaactccgttcatttaagagggggaataagttagattttgaaaaaacttatttcaaattactcaaaatattgagcaaccacctctatgtacccttattacatgaactttaacacgtacacagacaaaaacgtacatagttatacgaacgtagagtttaaacgtacgtatacaacgtacatagttacaggtggattatatataaacttacgtacaccgagaaaacacagaagcgtacactatattggccggctcagaaacttgtcaccagaactagattggatttttgcacgtcttcttgttatgacctgcttgtcgacagcgtgagcactgatttggtaaaagtcttttctgtctctttttctgaagtgacaaatacaggaagttaaaaatctccgcatggtaatactcaaaatacaagtagatgaaggaacgatgttagtacatacccggttttcacctctagatgggatccttttggacagtggtcttcctggtggccgtctactgtatggaggaatgagtatcaaatccactatatgttgtgggatgacaacatctttcggatccgcgataggtagaattggttcttggaaagaatcagaaaaaacgtttgaaggccataccaccatccgacacaagccttcggatcaattccatgctcgattgcagctggtagagcgtgttcacatgggattcttagcttggtgtacctaagacacgtacacgtacactggtccagaacgacatgaaaatgctcaccggatttacttgtcacttgatagctccacggtccagacatctttacatcgtatttacctgacgcaggaacctcttgtagaaacctctcatcaacctcaggtatcacagaagatttgcacctagcaactttcttcctcctcgatgcgaaccatcgcattaggacatcccgaatgaactcgatcatgtaaacaatcggataagtttttgcttttgttaacacatgattcatggactcagagttgttgctagacatgatattgtagcgttctcctctacagtgagctcttgtccaatgctcaaatcctatgtcctctaggtattttgcgcatttagcactcttttcccttaacagttcaaaatatttctcgaaatccctgaccctataagctttggcagcgctgaaaaataaagcagacacaccaaacttaccataataggtggagaggtttcgctcaaggtgaacagcacatgatccatgatgcactctcgggtaaacaacacttaggcctttgtatatagatgaatgtctgtctgagacaatcattaaatcgtcactgtctggaacaatctcagctaacttttcaaaaaaccatgcccaagaagcatcggtctcaccatcaacaacaccaaaagctattgggaatatttggaagttcccatcttgggcacatgcaataaggagacattctttgtaaggtccgactagctgcgttccatctaccacaactaccttcctcatatatatcagacctttgatagaagcgccaagagagacaaagacatacttgaagcgctgcttaccatcatcttctggtgtatagtgtaggtgtgttattgtacccggattagctaattggagaatatacagataggtcggcaaaaacctgtaatttgctatctcatccccccttacattttccactgcaacctcttttgctctccaagcggtagaatatgaaatccgcacattcagatcatttaggagcagctgtggtaaatcgacagctcgcagcccaccctgcgtagaactgtatctgctcctcacaacttctccgaggagcttataattagcatgtttattgtagttcttccgagagtcgatgttacacgtatgtgtcgtagcatacgaagtgattttgaaactttatgaatccttcacgacgcgagcagtcaaatgccatggacaagtctcatcaacgcacaccatcttcaatattttaggacatgacttaggttgcttgaaccaaaagcattgctttatcgcttgaagagacattgtttgttgcaggacttttctattcttaaaaacacttccaacaaacaaagttttgtctgtggtgctgatttcaacctgtgtctcatcagctcgaaaattgagtaagtcatcgaacacaggagcagcatcgttaccgagaatcgccaactcgccaccatgtaacttaggaaattcattatacacttggtaagcctcggctgcggtaactaccccattatcattcagtgtcccagttgaggaagctccaataccgtcgatcacttcatccccggtgacttcgtctatacaaataagattggaatccctttgcccttcgcagcgtgtaccgtaacccaatggagaaattgtttctccgtcaggtatactaagaccagtgtacgtacacgtttccaagagacgactgaattcccctgtatctccgccaggtacactaacacccgtgtacgtacacgtttccaataaacaactgaattcccctggatgttgagcagtctgttgagtgagactgacgtcttcctcaagatttccttgtacatattcttctactattacatcgttccacttgttgtaatcgtattcttcgccaataccttcactaccgtctgtggtaggatacagggtacttcccccaatagatccatccacaccaagataatcatcacacccatcatcatcttcgttgccatcctccacttcatcctcttctgttgtatcgtcttcaacatcggcttgctcctctgcatcctcattattttcatcaacatttgtagcactatcaaacacacggtcactttcagaaacttcaccatgagacctagagacagtattcccgaacgccttcacggtattattgaaagagacgaacaagttgagagaaagatacctaccacgaaccaaaaaaaaacgtgtcgagacccatctgactgtcaatgtatacaggagggcgtttagtatctatcagcactgacatttctcccggcatccagtagctaattatgggattgatctcggtggacttcaaactgaaagcctctcggagtgtacggacaaagtccgtgtacgtcatggtttcctgaacgcgtacacaacaaccaaacatgccttcctcaggttcacatttccattctccttctttgcatttccacccaccgaccatagtaaatacgggaatatccataacccacctgcatcataaattcaggagacacacattaaatgcaactgaaaaatactatacatataaaaaacaaatggaatgtcgatactacacatttataaacctaaataccaattatcatttgactattttaaacaaacaaatatagatttttcaaattttctgataaaaacatggagttcgaacaaaatcaagatcctaatatgacataacaaaaaacttcttaaaagaacttcattacttacacgagcaatgcttgttttggctccaaacttggtacaaaaacaagatcaacacttcttcagcagcaatgtacgttctcaataattctttgttcctgggttcatcttctttatctcaacaattattatcaataatttttttaatattatttgatgtaatgatgattttgcattaattgtgacaatagtcacatctaaactttttggagcattaaatgttgatgtcacttcggaataatggaaataatctcacttgtaacggaaccgaatcgcgtcaacgtgaaacaaataatcttcaactgaaccggaacagtgtacgtaactaaacatgctaaactaaaccgtacatttcaacagttactaagagagaagcgcaagggcagaagcgtcattttgtaagcaaaaagacaaatggtgaaaaccacatttgactttgacaatccatggaaataaaacatgatcaacgggtgtgaaccacaatttaccctacttttatcaacatcatttttacttttcagttaactaatacttttatcaacatcatttttaatccttataaactctgtttatacaaatagagtaaaattgtgatcaaaggttttgtaatacgttttaaattcactatccattgaaatagctataaactaaaacacaagacttccaaacttttttaatttataactacttgaagcagagaatgtggcacttggaagagcaatacaaataaaactgtttggttttataagatttgttagcatgatttgtattttatacaagaaactgtggaagtgttctgtgtgacatatattcaaaattctttgattttatttcttaaaactatgtaattcatgacaagaaagcatattgatgccggcttaataatcttaaaatgttatttcgtataaagagatgtgaagaaatgtgtgtgatagaacatattattgtgtatttccacatctgtctaaacctaattaataagtaatttggtaatatgtgtatatcttagatatgataattgaacacaaaaaaatcgatttgttcgaagttttaatattcacttatctttgattatacgaagagcaacagatataacttacatgacagttaaggctttgagctaggctacgtaaggtggcttaatgcatcggtaaaccgtgcatgagacgttatttgtttattatagtttaccatttgcttacactaatatttctactcataatatttggttttcagatgagtagagacggtcgattactctatcctccgccgccaccgcctcctctccatcctcctccgccaccgcctcctctccatcctccgccgccaccgcctcctttccatcctccacctcttccaccgcctccctgccatcctccgccatgtccaccacctcctttccatcctcctcctcgtccaccacctccctgccatcctccgccatgtcctcctccacctccctgccatcctccgccatgtccacctccgcctccttgccatcctccgccatgtccacctccgcctccttgccattgaatctcttctgaggcaccatttatttcttcgttttctaactcagcaccacctccaccgccacctcctcggccaccgcctcctttccatcctccgccttggccacctcctcctttccatcctccgccttggccaccgcctcccttccatcctccgccttggccaccgcctcccttccatcctccaccttggccaccgcctcctttccatcctccaccttggccaccgcctcctttccatcctccaccttggccaccgccttccttccatcctccgccatggccacctctataattttgtacatcctcatctgacgcactatctatttctacggtctctaactcagcaccgcctccaccaccacctcctcgaccaccacctcctcctttccatcccccaccatggccaccgcctcccttccatcccccaccatggccaccgcctcctttccatcccccaccatggccgccgcctcctttccatcccccaccatggccgccgcctcccttccatcccccaccatgttgatcaatttcataattgttttcttcctctttctcaacggtagcctcaacaccaacgtctcctttattgagactatccttagcgtcgttttttccttctacggttggtatctctacttgcttttcacctgtttcaaacccccactcacataagaattctatcaagcttataaaacatatacagaaaaaaaagtatagtaaaaaccttgtttcttgtcatccacggaagtctctgccgcaacagctacaacaaccgccgctaccaaaagaaaccatacaataaacgttttcgtattcatttttactaccatgcaattgagtttacaagtttgctcgtatgacaaggtatgctacttcacgtattgttatttatagttgcaccggtctgcgtaagcaacaagttatttattgtagatacatgtcacgatcgatacatgtcaagcggtggagctgttgaggatggacatcactaattcactatcaacacctcatatttagttggcacgtgaagattttgtcttggagctctcttcacttctacgaagctaacacgtacgttttcagactgccacgtacgaggttctttagaggatagttttgaacgctgacaaatggcttctctcgagttacttcagataattagtgccttatcttagcttcttttactcgggtttaaacttcaaaagctcgt

SEQ ID NO: 767 - DNA, 87210 bp, Arabidopsis thaliana
gatcttcacggctcaaactctattactcatgaattaatctttcgtttgtgatgtatgaagaaaaaacaagaacgtgaaatgaaaacacaaacagcaagtaaagagcagttttagtttaaacgagttcaatcttcttagttttatcaagctagttacacttaagtaccaaacaacccttaatatgcaagttcttatcatttctccgacgtacaatttgaaacataatcatatttcagaaagcaagtgagtttgtagtgcttatcaggatacttgagtcaggttcaagcgctttggcctttggtctttatatattggacattaagttacatgttaattagagttttagtgtgcttttcgttccgcatgagaaacacttccccatcaaactcaaataaacactttacaaaactctagtttgaatttatgttacctttattatagactttggattcctgatttacgttaggtattttgaaactctaattaagtaggtctaatgcactatggagtatatgtgctcattgtttacatattgttgttctgagtgtttgtttgcggatagtatcctccaaaaggaatggtctggatgccataaacaaaatgcatcatagcagacttttttcttctttccaattttgcaatacttcaaaaagatggttgttttgaagaatccatatgctaggagagaggtagattcgacctcaaagttaatgttctgtataataaatctatttttgtttttcttaatgttttttcacctaattccaaaacaaagttcttcaaatttcaacatgtcacatgagttagacctagctagctaaagttcttcactaaggcacgctttgtctctggtaatgtcaaagttacttcggccgagaagatcatttaacgagttttacgtacatgtacctcgatgtaatgggcctataaatagaggagaccttttaatcccaaaataaacaacaataatcttaagtttacttttctctctctttttcgtctttagttttttgtttttgtcaaccgatattaattaaatatagtttaaaagagttattcataaggaatgttgtttacatatgtgatatgatgcgattcagtacagattttccgtgccaaattatccgctttaccacgagagattaaagataaagaaaaactaatgaattctcctttgtggttatgtaattccttcaaataagctgaaaaagctggtcattcggttgaagtggagaagacaccatcttcactaggtctgaacagtctgttaagaaaactacatcttggttatcggcgtcaatcatacacctcataccccattttttagttcttccttcaattctacggatttagatctatttcaataaagcaattcctcattaatctcaattagattttttttttattaagatctcgttctcattttatcatcgtaataactaaacctcgacctaaaacttttgtgagattaccacaacactccaaacgcaatccaacaaaattagttggtttcgtacaatatcattaccttttctagtcacaaaacagagtaaaccgtaccaaataacttttccattgccaatgaaataaaaagaaaaaaagcaaagccattaggaaagtgaatagagtgaaattgccgtttgcataagaaaagaaccaatccaatgatctccatgtgcataccaaagcatctctctattactctttaaagtaatccaaagtcgagaccacaaacactcacgacttcactcaaaaatcattatataaatatatttctctcatttacagagatgcttttcttctggatcacaatcatcactaattgcactatacgctatgtttcagcttttcttctttttctctctaatacaatgtcctttgaatctctttttacatgtactcttgtacatgactcatgtgcttgtgattctaaaataatgcacctttctttttcttttttcttctttcatagcttttatatagagtaatcaatctcatcacatgtgtgtttgttcccatttctcaattcccaagttctttatccaaattgttctgaaacatagagagaaacaatgggtgttacaggaggattagtcagaagcattttcttcaggaacaaatcatttggagctcatgactacaacaatgtatgtggttgtcattttcatcaaaaacccatcatcgttctggtttttgttttatctactacttcaaatgttgtaatgttttcagggaagaggcaatctaggagagaagaaacgatggagctcggttagatcatacctttgcggagatgaatttaactctgttcgcgctgtgaatgattcagaatcgataaaggattctgaggctcttcttacaatgtctcagcaactgagttcagagttcggtatgccttttggttcggttatcgcaatcgaagattcagcttctgtgagacatttggaggatgaggactctggttccgttaagagctctgaggcaacagtgactcaacctttactggaggagaaatcgaaaggactggattgttatctaaaagaagaagatgttgaagataaccaaagcgaagcaacagagacacacatacccaagaagcatcagactactccaatctccaagttgttcctcgaagaagacgctgcagtcataattcagtcagcattcaggagttacctggttagtctttcccttcaatatgttttttgtcttcttctggtatgtccacaacattgattgttaggatttcttcaggcaatacgccggagcaaagaagaagaggaaacatttgctaaggaggagagcttctcaggagaggaatctcaagacaatgcatccatggggacatcactagaagctcagacaggtaattccgtgaaagcaccatttttcaggagaaagcgagtatctgcgaatcgaagaacactacagaagaacaacactcaagttctgaggataaaggtaagtaaagatctcgtccagtatagaggaattcaaagaaatagtgaaaaataaccataacatgctcacgtaacaggaagactgggatgatagtacagtgagcagcaccatatcaaaatcaaggattcaaagcagagtcgaagcaatgacaaaacgggagagagcacttgcgtatgcattttcacagcaggtaaacgatttcaaaacacttgatcacagattgaatcctaaaagatccaaagaacttatcttttctaaactagtgaaacatttgtttaaagctaagaatttgctcaaagaagaaacaaatagatcgtagcagtgaagatgattccaatatcggttggagttggttagaacgctggatggcaacccgtgtaccagacagcattccaattgaaccaagaacagatgttgcaacgaaaaatcaaagcttgataagaaagaatagagcttttggtacagctggcgagttggagagctgtgcttccaacgacctacctctccattttgaaagcatatcagagacacaaggagatgcaactacagttttgcagaccgaaaaaagtagttttaaaccaagtatatctaagcgtaaatctgttccaagctacaaaagccagagaaagcatcacaaggtaaagaaaaaaccccacaatgcatagaagtttctgagtcccatctatctcaaacatacttacctgtctcgttttacgtttgcagcttcaggccaccaaaagtgatctgcaacaacaaacaaagaaagcaaagaaggccaaaaccacacccacaagctgcaaaacaggaaacgaatgcgaagaaacctcacataagctaaatagcagcacctaagataagcattacctgtaaatctttgcatttaaatcacaaaagtttgttctttcgaatcagataacaactttctgtaaattatttagggattcaaatcaaaccagtaatagtaagggataagaaactggaaaccccagaaatacataacaatgatagtatcacaatcttctgtatctaagaagatatgtatctcaaatttgataatacaagctggaacagagagccaacaacaaaaacaaacttagatcctatcaatatcctcatcctcaaactcaatgtaatcttcaccaacaacatcatcatcatcatcaagatcaccaacaataccttcgttaagacgagtattctccggaagctcaccatacgccttaagaagcctagcctcatcagacatatacttgagtataacatcagctttatcatcctggtaatctcttagaccaacaagtatgatgtcaccagcagcaatccaaaccttcttatgcatcttaccacggatatggcaaagacgcttaacaccgtcaatgcacataacgtcgcatcgaccgttaccgagcatacgaagaacttgtgcgtattcttgtccatcttctttgaatataagctctcgcttttcgtcatcagcttcgttctttcctctcttcctgttctttcctccctttcctttgttcttcggcatcgtctctgtatcaaattcgatacagaatcagaatctgatcatataatggcgtaaaggttacaaaaggttgaagaattgattcgttttttttttcaatttcagacaaaaaatggcaaattcgagaatcaaaattcagatcaaaacaattccggtaacgagaaacaattagatcgaaacataattgggtaatttcaattcagtggaaaccctaatttggagtttgaattgaaaaattaaggcggtgtaaaggaaaccctaattgagaaacaaagggaaggaagagattaccagtaaggattgatcgagttgttgaaagtgattaggaagacgatctttgaagagaatcgatttcaccaagttttttctttgttctttaaggaggtttcttagctgcgttgtgttgcttgttctacttttttttatcgatgtcgcaagagacgtctttttatttaaatagtgtagctatttgtaaaacaccctcgaaattaggttttattacggagtcatgccattttttattttatttttttgtcaacatatattatttacggttcaaacgagccaatcttgacgaaacttgtttatataagtgatatgaaacgattcagcacaaacttattatccgccttgacatttacattacgaaaaattaaagataaagaaaaagaagtgaactcttccttgtcgctctgaaactcctttaaatatgttgaaaatgctgatcatttagttgggaaatatactatcttcaccaaatctgaacagtctgttaaaaaaactacttattggttgtttgcatcaaccatacacttcattgcccagagtaaagcttggactttagtatggaaaggagaaagatttctacataaattagcagctctcttttcttaataagactttgagtttttttttttttaattagaaagtttgtgtctttgtgaacatatgacatctctttgtgacatgtgatttctctcgttttatcttaataccattatttagttttaatatacttaattatctatatcattattattttaaaactataatttaagagacacatttcatttcctttattttctttttcatcaatacaaataaatataaacataaaattactttatcctacgttactattacatcattttaatattgtcaaatttattaaaatagattgtcttgccttagattttgtttttacaatacacatttaaatatttgtgcacgaagacataaattaaataaatagatgaaatgttgtagttacaattatcacatcttctataaagtttttcctttcatcacatatattgtacaagagattttgatcagaacataatctctctttctactgccaaataatacatgcatgtagatatatttttttatctctaaaggatttaattatagtatgagaacttgtaaaatcatggatttattaatccgactatcttttgttttgtcttgactgaaatggggaattgatgctcaaaaacattgatcgatttcacataatcatgtttctactttctctatctttatattcattttgagcttatcttcattactttccaatatcaatttgaccacatatattgcataataacaaaccaagacatcttccattatatctttctcacctatttatatgtttgcatattgaataatcataatctgtaatatataaaatctagaaattagttatattctattgaaaagggcaaccaagaaaagaaccctatacgaaagaggcttgcgacatccaaccttgtctttggaaaaaaaaattcattcgtcaaaattgattgattagtttttattttccaatattctacagtttaattctcatggtttaattattcattgcgattactagagaaatcgattttgatggtaaaatgaatttgctttttaagattccttcaagttgctaataatgctagtgaattagatatctatttaattgaggagtcgaggagtatggcttttgatttagaaattatgagcttattcttttggttctaaattacaaagtgattgttgagctttagaccattttgaaccggaggtcattcgtaatctttatttgagaaaaagatggataagtagaatatattacttgaaaggtcatatattactattttgttgtgattataaatgtagtcatatgtactttcgtatgtacttacgaaaatcggcattttttctttaaaaatataccgttctactcttcaattatcatatcgaagctaaagaataaattcacaagtcatgagcaatgtcgacgaacctagatatgcggtgaccaaagctgaatggaacagagaaagcgacggaagctaacaacaactcgataccggcgagcagaggctctttctccttcaaagcttcatcttcttcttcttttcaatatcacaaaaatagaacaaatcagtcacaaaatttgtaaaacattttacttgggttccttctatactatcttagggtttacttttctctgattaaaaacgatttaatcttgtagaaaaatgaaaaataaaaaaggaatcatgaaggaagatggagatgaagaaattcggagaaaaaaagtcgtcagagttacaaagacggctaaggaaaacgtcaatgtctcatcactttgctaggggcaaaagcgtcaattgcaagggatcaaagttccatttttcgaagtacactcgggaagtgcccaatatcaaagattttttttaaaatgtgcccattttgatcgggaagtgcccaatatcaaagatttttttaaaaaatgtgcccattttgaaaataaccctataattttatttcttttcatttgatcatttcaccataaattttattggatttgacaatatcatgaatggtcaattgttatttattataaaaagactaagatagagttttgatgatgatgcatttgaaatatatcaatgcatatataaaaattatggatacaagtaaacattaaaagctatggttattatgttaaaaaaaacatgtaagttatgatttaaatacatattaaacataaaaatatacgttcccttttaaaaacatatttaacacatattatttttacatgtaattactttaaattaaatttatgatttttgtgttaaaacttataagttttattttttttggtaaatgcatacagaccaattatgtatttaaacacacattaaatatatgattaataaatagaacattgtaagtatttaaacacacattaaacgaaacttatgttcacatttaattatttgactacatatgttatttttgataaccgagaaaaacagttgaagatgtatttgaaatatgttaatacatatataaaaaaatatggattcaaacatatatttatttttggtatgactgattcgaacatacattaacacaactattaatgtgtaaaaaattataagatatttatttgtattgatgaatataaaaataaagtaaaatttgttaggaagtgggtgttttatccgctaatcagtctagacaaataatataccgatttacaactaaacgacaattaaattaactagagaatccttccactcctttcatttccttgtgtgtcccatatccgaaactattattgttacatatgatgtatatatagtattacacttcattgcttgattgtcccttaaagtctattcatattgttatataatgtatgaattttgctgtagacaatatgaacatgttcttgtagttctcaatgtcaaagtgattaaagacatctagaccattttaaattagggctcattcgttatctaaatttgaaaagagagatgtatgaatagaatattttactttaacaatcatatattaccattttcctatctaaatttgtaaatgtagtcacatattatattgtttttaatccatttacttattaattgtgttgctcatgctagccaataattctatttatttccattttatcataaattttgttggatttgaccatatcatgaacggtcaattgttatttattataacgagtgtaaaatattagggttttgatgatgatgtatttgaatatatcaatggatatagaaaaattatggattcaaacacacattaaaaactatgattattatgtttaaaaactgtatccaatactattatttgggggagtatatacaaacataagttgtaacattgaaagtgtaacaaatatcattaggatgtcattataaaaaaaattaataatatataaaaaaagtttcatccttaaaggcaatgatcagtttaacaagggtggtcatggaggaaggtgagttcatctttaggatattttttttcttaaattgttaggatttgttttcaattaaagttttttctgctttatataattatatactcgatcatcatggtctatgcaggggaggaagaagagtggaatattctggcggaagagagggtcagattgccggatagtcgctggaacaaagctcagaaagtagaagcatgaaagctttctttcgactttgtctctctttactaattgtattcgagttgtacttatattaactttatacttaattctctaaatatttagtaatccaatcaatatatatatatatatatatatatatattaaactaaaatcttattgctcaattaaaaattaatctatgtaatctgaagtttatattcttttaaaattaaattcaaaacatattctgatttattgtaccataaatctgaaatgtatgtcttcctatcttactttaaaaaatcaaaacattaaaaatgcttataaaaacaatttaatatatagatataacaggaagcttgatttatcaccgttccaaaattaaaagcgttatcgtgtttaggtttttatttttaaaaactgaaacttttaaaatgattcaaaatgttataatttaaatttgataaagttgaaacttaagtttaacaccatgataaatatttaaactttatcaaatgtttaaagtatttataatatttaaattacataaaagtttataattattaatatttgaactatattaactagagaatcatatcacgcttttcgtttccttgtttgtcccaaatcgaaatatatgggtgttagacatggtgtatatttagtattatactttgggtcaggtgaaatttccaattgggcgagaaatctcattaggggtcgatgcatgtcgatcagcgatgttaaggtggctctggtcaagagttggcacgaccggtccggcttcttcaaacggtacaggtcactttgtggaacgaccgggccggtgggagtggtggcactgtgccttttttgtgttttcttattttctattttcttttaattttgttttatgaaaaacctgaaacaacaattaaaatatttgtaaaaaaaaaaaaccaaatttaaatccttaagaaagagtatttatctattgggttgtctcccactcaacacacttgtttaacgttgttggctcgacatttagggtcttactaggcataggaagacgaattatttgtccctaaacaacctctctttgatttgaacccgttaggttattcttccgagtcgatatttctcttacgaaaacttgattctcttatcttctcgaatgtatctcaaacgcaatccttggagatataaatttccatgaagagtcgtttcaccgaaaacttctcccatgcttccagaaacgaagtgtcaagcgagatggctctaactaagtctataaatgtgcaacgcataccgttttcatgtgtagtacggatcatcttctcgatatctaaagcttctatctctccatcttcttcttcaatcgaagaatgggtggctgattcatcttgcgaactcgatgaattgtatccctcttcttcctccgaattctcctcgatatcgatctcatcctcttctccttcaaactcgaagatctcaccatctcttacttctcgcaagggcttgacatccaatgatatcactgctttgcaatcaaggatgggtctcgggtcctccttgttgtcttcatgagagttcccttgaattccaaggctagggttctcggcttccatcgtgtgttgcagtttgtcttccctgaagctatctatggagattgctgctttgattcaaacagagttccaacaacagctcaaagagtttgaagagaggttatttggatcaagagattgctatgtatagatcttaaccctgcaaatatttacttctaattactcttaagagtttgctttgagaattgcattagtttcatctcccttcctgtaaatagcatgttctgctttacaatcagcagactcacactcttcatttataaatatgtttgtacatgcagtgtaatagaaaccgtactccttatatactcaagtctcaaatcacacatttatgatacagttttacagagaaaatgccatatcattaactaggaacctgtggggtgtgactcttcaatcatggacttggcaatccacaagagacctgggtcatttcgtttcagtaccaaatatggttcttgtgctcctgtgctttctgataccatctcatcgacaaagccaacgacggaaagtatctcaaccgcagctgcaaaacatccgaacacagacggttaaaacacaaagatatcataaaaacaatctgttgtgagaagatggaaaaagtaacaatacctggaaagttgagaatgttgcgcttaattgcaggatttccctgaaatgttattcatgtagttgaacaaatcatcacacagtcagttaaaaataactcaaaggaactatatattatatcagcagcctaatgagtcctcaccttacgcagccttttgaatttcatttcatttggttgttcaatgatgttcctgaaccacaaaaaacaaacatagtatcttcagtcatataacaatggaattacatctacagacacgcttataagtttccaagagctgaaaaaaagtacctgactattttgagaagcatttgtaacacagtggttgcttgaccggggctgacttcatttctcaaggcctttatggctttcttgagacggttagagatgatggtaacagagtcttggatcctctggatttcttgatcatctggatccggctcatcaacctccatgattgtttccctctctgtgaccaccaggttatagtctggatacggttctgcattattaggctcaggtgtcgcctgcgtagcttcatctgcattcagattcccacacaacattacagtgtcatttacaattttcatattttcaacttcccctatacttgtgtgtgtttctgagtcatccggatcaggctcatcatcatctttagtaggatgcgcaagatcacttgccatttcatatgaatgacatgattcggttttggttgcatcatctgcagtggtatcatcaggatcaggctcaaacttagtcatagaatcagactgagctttagggagaacaagctgtttattctcatcacgaacatcaaccaagtcatcaggatcaggttcttcgctgagttttgaaacacttgtatgggagagacggcgataagcagcagcaacagacgattcacgagcatttccaagattatcggactggtttccaccaagcctttgagaaacagtttcattttcatcgaagaagtagtcttcctcatcatcgtcattgataaattttgttccattcaaagtgtgaccccttgatttagtccaatctaagctttcagcttctttgttcaactgtcacacaaacactcattcgtaaaatctctaccgaaactaaatttgcgattaaaataacataaaccatcacttttgtatatatacattacctggctatcaagagcataaaatttctcatcatgctccgtgtataccatgtgagcctgacattttgattcagagaatataagctctcaaattcaagttcgtatagaaatgttcatagttatcagggaacttacaagctcatgcaatagagtcttttttatgctctgatactttctgaatcccttgagatcatcagtccgaaggcgtagagaaatctcctctccttgattctactcaagtatttgggaaaatcaaaatcagaacagactaggagaaacacaagacgtggttttgtcttataaacataacatgcgtaccttgttaaaccccagaaggcatcgtggactaacaccaacataaccaactggagcaagttcagtcataatccctactctccaacgatgctacaaatatgaaacagaatctattagtacaacatcaataaacagaccgttgaattataagttgctcacaatttagatataaccttgttcataacagcaataataccagggtctgctgcaagcatgtgcattctctttaaagcagcagaaggaggagggtttaactgcataaacgaacatctcgggtcactttatatcgaggcagattttaaagtacttaacggtcaaattatcaggaaataagtttatggtagataagagagaagatagtagcaacaaaggacatagacaaaagtctaacatgacatattacttacaaaaaacgtaagtacaaatgttagacatggaaattcagaggatgacttacctctatacccgggagctgaagagtgcggaaatcaccgaagatgtaagtcccttgcggaagcttgattgaagcgctcgaaacatacgacttcttttgcttaagccttctttcctcttcctcaaagccaagtatcctcatgtcagacactgcctcttttagaacaccttcgacctcttcttcagacactcccatcattctgatagttttatcctataaaacgaaaagaaagtaccaaagaagtatatttaaaacagattaagtgactttcaccaattggtaagtgcaagctttaggtattgttcaattgttcttggcttcttgataataaccaccaattcatgattaataaaggaacaatcttttctgtgctaatcatgaaccttaagcaaaaatctacctaagaaaatgaacaaaattgaatttttacttactctgctacatatcaataacctcaaaatgcactcttaagctataatgcaataacactaatgacaaaatcaacttatctcttagcttcctaattgtaaccaccagttcatgatcaataaaggaagaaacttttattttcttaccactaaccttaagcaaaaacctacccataacaatgaagaagattgatttcaatgcactgattaagatataactaaaaaaacaaagactaacctcaattatgtttgattcctgcaaactcaagctcgagtgttcatcagaaaagggtaacatcaagcttgatcctttttcattcaaccttggaacgatcaaacgaagcgtctccgatgtaacgccggttaactttctcaattcgtaacctaaatctttcagagaagctccagaatcgatctcaacagagtatttgtttcctttccaaagaagagaaactctgattttttttcctgaatcttccatgcgatgagagaccattgattcggttaatctgaagatcaagaaatctgagaatttgtgataaaaaaattcttcaatttagacagaaccgtaaagattagtatgtaagaacaaatttattattatccattggacttgttgaagaagaaaagaaagatctctctctctctatctctgatgatacgtatgcacatacgatgaatgacgtaatcgaaagtagttctgttcttttttttggctgcaaagattacaataaccgttccgtttcggttcggtaagttctgatcggatatggcaatataataaccattcagatattttaggattacaattcgggtcgattcggttattttattaaatttggtttagtttggatttttagccagaataaccgaaatgaaccgaatagaagtgaaattaatcggaaaaaatacaaaaagggaaaaaattagaaagaaaagtataatttggttcaattttttaaaagattctttgattttgacaaatataacttaaaacatttggatatgctgcttatataaagtattgattgtttgatttctaaacgtaattaatattttgagtttataattatggttttgtgtattatttttgggtattttggttaaatgtttggttcttttcgtttctgttagtttggataggggatttcactaaccatttgcttattttatgaacttccatttaaatgcggttcaatatttttggtttggtttttttttcggttattcggtcgccatatttttttgtccaggcctttcatacatataaatatacaatgttacgttggacctgattgtagaaacaatatcgtaaaaattttagatttttagtttttgcccaattaagatataatgtggcaaatactgaaattgagtccaaaattaaggggggtattgaacgaatgaatgtgatggaatttaatagaatattgaattctggtgttattcgtttagatactttataaattcttttaaactcatgcgttattggactaatatggaaagagatacatctcgtaaagctaatatggaaatgagtagctttgcttggggatatgcaacatggatagtggacttagagctaaccaaatctctcaaagcttgaaggaacaatatctcaaaatgttttagttatatgtaactttgatctggagtttatctatgttctgagtggatgggagggttcggctcacgattcaagagtgttaagtgatgcattaagtaaaagaacaaacaatttccgagtactataaggtagaacaattacaaatttatttatagatcatatgtcttatagtaacatatattatctaaattttcaggaaaattctatctggttgattgtggatttgcaaatcgtctcaatttcttagctccatttcgcggagttagatatcatcttcaggaatttgctggtcaaaggcgcgatcctgaaactccacatgagttattcaatcttcgtcatgtttctttgagaaacgtaatagaaaggatatttggaatctttaaatctcggtttgctatttttaaatctgctcctcctttttcttacaagaaacaagctggattagtcttaacatgtgcagcgttgcataactttcttcgtaaagaatgtcgatcagatgaagccgacttccctgatgaagtgggaaatgaaggtgacgtagttaacaatgaaggtaatgcaatgaacaccaatgaaattgataatgaggaacctctcgaagcacaaaaacaagacagagaaaacacaaatatgtggagaaaatctatggctgaagacatgtggaaagatgccacaaatttggaaattcattgatagatgattttttttagttttccagttttcatttaataaaaatttggttgcaataacgaaacattgttttttgttcaatcacacaccatgctctttgcttctacgtcccttttcacacaccatactcattacccatatacacgtattgttgtacatttgcagcagactttactttccttcttctactaccaaaatgcagtcattacaatgaactgggagtctaagaacaattgcaaaaccaaagagtcttcattccacgccaacaagagggcgttctttaatgataaggcagtcttcactacaatatcttctgctaccaatgtatgggtgctagaacgataagggacagaaatgtctcgcaagggaacttcaagtgttttagaaaacagcatgtccaaacaagatgcgacagcgagtccacaaacaccaaccaagctttcattccctgcaaataaagatttcccaacaggggaatttgataaaacatagatatgagctaatgtagttgatgagcaatacgaagaaccacaacacaatttctactttgattgaaatacttaacgaatcaaaataaccatgaataataataatatataactatatttgttgtttacatgatgaattgatgatatgttatttgtgaagggatgaaaaagaagatgaaggaagccattgatattcatgttgatgatacctacacttgaacgatcttggatgcttcgacggtgaacacacacactttttctttccatcgccactgttaccaccgttacggtgaccagcggtggcttccacatctattgccaccgtcacttctgccaccggggtaatttcgtggaagctctccggagagatagcaaagaggtagaagaattttgtaaatatatcttttaagcttctcagccatatatatttgagaattaggcaaaacgtatccaaacaaaattatctcacaaatatgtcaattacggtaaaattggattctattaatatttttatttgtcagaatggcatcacatatatagaaatcaacatataaatatttaatttaaaaagatattttgaaatgttgcatgtagaaataagttactataaatagaaatatttatattaaaacaaaaaggataaatatataaagatatttacatttcagtataaaaatatataaatattctgtgactattttgaacttgtagtcatagaatgatatgttttaatgaataagttacatagtcatagaatggatatttcaaaaatgatttaagatcaaggtgatagatttgaataaacaagttacttactcaccatgttgcagctgatttgttggtgaaatatgagaatattaaattcataactaatacacaaaattacacaatctctatatgaagtaactctatctaaatcatacaaaaaaaggtaactctatctaaagcatgcatgccttagtaatatcactaacattcacattcagaagagaaaaacacatgtttttatacaaaaaggttcagctttgattctctttggttattaattagtagcttttataaaccctattaaatcaatgacaactcatttaaccaaaaaactaaacaaatttgttgttgattaagaatattctaacctaatataaattaaataccacaatctctatataagtaagtcatattgtactccaataacattcacaataaacaaacattttccataaccttctataatatttcatcctctcaagaaaaaaaaaaaaggaagaactatttgtactcatataaaatggagaacaaaagaatgggtgtatttgtggtggtgatgttgatgattggaaccctaatggttgaatcaagggaaatagcaactactccaatcactgtaaaaccaacttttcctatttgctatactacatgctttgcactgtgccttcttaatccaatctttctaaacaaaaaaaaatgtcctgaaaaatgtggcaataaatgtctagaatcaaaaccaaatccaccaaaatgatatttctgcaaaatcagttgtgtttctgtcgaatatcaaagtaagtttatcgcaagcttaatcttcatttaaaattttaatatggctcatagagctgctttttgtgatgcttatatgtatgtatcatatacaatattatgactctttttaagtattaatatttatcattattgtttttgttattatgtgttatgaacagatttggagaagtatgaagcagcattgtattttctatatttactatttttcttatttcaaataatagaagctttaagcctttcagtaatgtggtaaattcgtataaaatataatatgagtaaataaaggtaaatttggtggcctaaactatatagctaatgtcacaaaatttgtagttctcaaaaaaaaataaaaatatttggtgggtaaattaaattagtccgaaagagaattcgaccaaaataataataagccttagagaaatatagctaaacattatgtttatgaagataaaagaatgaactaatgaaaaaaattcgagattatgacaatttgaacaattgcaatttttttatataaaaattctatattgtgtgtacacattgtaaactaaatgttattgttttctgcctaaacaattatacaatttcgagtttagaccggtgataaacaaaaatgaaattggaaatgaaaaaaaaaaggtccaataaacaaaataaaataaagtagaactttaacaattcaaaaatgaggtttacgtacacaatgtaaaacttgtgtaccaaaaccctctttgtttgtatacatatcaaaccttgttcttctttctttgtgtttcctttgtgccaatcaaaacttcacgcaataaaccaaaaaacaacgatcaaaataaacattcaaacgcgtcatgcatctttattattctcaccatcaacctcatcctcatcattgtctgccttcgtcagcaattcttgatcttggacagtgggactggactcggaagctccatcaatggacaaattggagatttcacccgctacagagtttgcgtcgccatcatcagtggcgtcttctgagacagtagactctgtgtctgattgttgttggaggctccagtacatgatgctggctgccaagataagcatcatcttctggttcacctgtatccaccacacaagtttactgactcagaaaaaccgaagaagcactcaagtctgtttcaataccatatatatgtctctacctctatgatatcttcaggcaacaagaatatggaacatccaagctttcgtgcaacactgatgatgtatgtggcattcaacttcttatcctcctctgtttaagtgccaattacaaacaaacaaaaacggtacagacaatcaaaaatatgacttaacaccggagaataaggacccagcaatgaagttgtaacatcatagtttttacctgtttctccattggtaacgaggctccagttgacaactcttggctctaccgcactaagaagttccagaaagaacattccactagacagattcttgtcctaatatcagaaaaaagcaaccatcaaactattaggtttctgaagatgagtctccatgaatcacatccgtacttggttaacacttaccctgaagctatcagcctgactagttcggccacctctcttcactttcctattcgcccagttaagaatatctgcatctgtaatttctttaccttgcgagtgtgatctcaagttcctcagaagttggagcattgtatatctcattagttgccacaaaaatgctgcagaatcaatgatggtacaagaaattatatactgctaccaattagaatgaacttactatagcagatgcatctttcaagaagagaaaagacagaacaaaacaatactaacagttatgtgagtctgttatatgaaattgcataatcttatcagtgtgacttttaggagaactcaccgagaagaagtttcttatttccttgcacaatgtcattcccagctacattgacaagggaaaagcgcagttccttcccaatctttataacttcattgcagttctcaacctttttgaatggcatttttatgggaggtttatttgcgtgtttccagttgaccgagccaggtgaaactttgtcgagaacttcaagaagaacccacctgaataaaatgaggtttagattaaagcagatacaaaaataaaacgtcctcaaacaaaactccatagctcacccattcctaagatcctcaaaaacattattgacataagtggctgtgccaagactgttaatccagaggcggaaacatctttcttctcgtgaagtttccacatcatctgtcatcatctcagcaaatgatgtctttgaatcgtcaacagtcaatccattcctgcaacaaacaaaacagcactagtaatgtagcagaacagaaatcattatcatcattttcttactcatttagaaacttcgtcaagacactatcagagacataacaaatgcaaacattgccacacattatcacgaacatcattgggattttaagataatcaataatccaaacacaactgaaaaaatgcactcaaattgtttaaagcagccagttgctacagacctgtgctgaaatatttgcgccacaaatgcaaggttaagatttgctgagccgtccactatgtctttgggagaaaggtatcgtttacaatccagcttctcagcctgctcaagaacctttttcgctctttctgtggggtctttggtctctaatgccacatgtgtactgtgttctggagcaagggcattaagcaggtacgcatatgcctcaccgtcctaaaaatagaaaagaaagctcatgttatgatcaacaagaaattggacttcataacattcttagttgctaaacaaatcataaacagatacctaacataaggagaatgtatcactgtcaagactggtataaagtcgtaactcatgagaaacgtctattatatgagatatatgttattgaggagaaagagtagcaggggcaagttaccttcaaatcagaagaaaaattcgtaacctgcttttcataaccagctttcttcagatggaaattcatccattttagcaaaactttttcaggagccaatcccatgagctcctctgcatcctgcatcgtcaagaacattttgtaatgtttcaatatcatgaaaacaaatcttcatggaaagcgctgaacaactcaaatatatttacctgagtgtcgtccaccagttgaaaaagcgaaggagttttcttaaaattgagatcagccaacatttggatctgatattttgcaccaagaacaccaaatttgtcaggagttagtaagttttttaacaagtcaacattaaacaaaatgaaaccatcatataaattcctataaactatcaatgaaaaagcttaaaggtggtacctttataatctgagatatcaacccaagtacgagatatggctgcaagaaaataagaagaaggaggaggaccaattaaaattgataaatcaagcaaacagaggaacaatagatatatgttttcattgtaattactcactcttccttcagctatgtcctgtgttccaatgttgaccactgtgcagccaatagctttggcagaattgagacctaaagtaaggttctcattcctctcccatgggttaagcgttttctttgtgttgatagctcgttcgtcgatggtcccaggaacagcaacatttataagcttactgcaaaaaagtgacaaagatgactactaagaaacttcaaaacaaacagtaaacaccaaggacgaaagtaaccaaagacataccacaaaagaacaccatctttaacaagatcaaagaaagcatttgttgcgggatcaataggaagatagctcttcaagaaaggatcatctctcaagtaattattaacatgcgaaacataagaagccttctcggattcattgatcgcatggtgcaccgttgtagtactggttttgaggaatgaagaagcaccttttgaccctcctgatttctcaactcctcgtgcttgcacacttaaaaaggcctatcaaacatgtcaccataaaccatgtaaaaaaaatgaccttcctagtttctattctaaaccttcagactcatcatcataagtacaaaaactcacccgaagaaagaactcaaaatcgacttcatcatcagcattgggataagacttgtccaatacagatttgatctcatcctcatcaatggtaccgttaaaagctttcaacttttcgaaaacaggtggtaaatctccgacagtgaaacgtcctaattgagttttgttcgaaacaaactaaaatgtacaaaaaaaaatgaaaactttcaacacagaggtaatgtaatgatacacctgaatcaaaaagaatgcgatctagatataccttagatttaagggtacgcaattccacttgtgtaaattggctctgtaaccaaggatcagagacaagaacaccaacgtaactagacattttttctaatcgatttctccgcagaatcaagacaaaacaaatccctgcaacataaaaatgtctttaatcaaacaggaaccagaaaatttgtaagaaaaaagaccaaactttttgacccacaagatcaaaaatggcaattcgataaacaaacacgcaaagaaacgattttgagataattatggcgttgatgcatcgatccgatgtaatgggaagaagaaaaaagagatgatcagaatcgaaatattgaaaagatgataatagaccttagagcagattgagagattgaatgtggttcgtgttcatattctctttatcaggataaagttttgatctttgaagcttaaaaagagatctgtttcgaaataatgaatttcgtgttgagtttttcgagcgcacgacctgcgatgaaatggaatgatttgacagagagagaagaaggtgagggtttctatttggcatttatttaattttgttatttaattttaatcatttttatctttcttattaacattgaacaaatcgttgaaattacaagaaagataaaaatgaaatctttcaacgattgataacattgataatcgttgaaagatttcatcgttaaaagaatataagaaagataaaaaataattattaacattgaacaaattgttgaaataattagatttaatcgttgtaaaaacacattggtgtttaagaaaaattcgaataaattctcgtaaaactaaacttatacattatattcttttatataactatataaaggatgatattaatctaactattttaatataaaataaacataaatataaataatatagttaaagataattataaataacttaaactttaatattaataatattagaccatcatttttgctatgctgcaattttatttttttataatatatttttatatatataaatttgaaatatttaatcatccactcatttaatgagtactacttttagtgttacagctttttttaataatattctcaataatgtatcattcacaatttttaaataatcatttgttagttttgaattataaacgcgtcataaactaattttgtagatgttaatgttagaattataggcagcctcctcctctttgccaagtgttgctctgatctcggcaaactacgtctcgcgtacacaaaaccaaaaatcgcaccaagataaacaacgctttactcaaaaacagacttagaatggtaaaaatcaacaaacctatcagctcaaatctgacaactgaatgacaaagggctaccaaagaaagtgtcaattgtgtggcgtgtttggtcacatcgccaaacgatgtcctcaacttcatcagcaacaaaccaacccacaacaatgtctactcccgtcacctttctgtctgtggcactcacgagcaaatctcgctgcaatatccccgcatccaccaatatgtggcttctagacaatggcgcaacacatcgcttaaacagtgatcttcacaacctagccttgcatcatccttactttgctgatgaatctgttctcatcggagatggttcgggtattccaattacgcatactggtcactttccctaccctctactactcgaaacctgactttaaacaatgcttaatgtgttccaaatattgccaaaactctcatctctcataatttatgcacaaacctacaactgatcatcttcaatctgccaaacgggttctctgttacttggtcgggagtactactcatggtatcttctttgcagcaaagaatgagctaactctacatggattctcggatgtagactaccattttattcgagggcagattcagaatggagttttgcgcgttgttcatgacaacaccaacgatcatcttgttgacgcattaactaaaccgttaccaagagcaagattccttaactttcgagacaatattggcgttgcccttgcacctccatcttgagggggggtgtcaagaatattcaaagatcctccattatgattagaatgttttattgattcgattatagaatccgttgtaattaccattctctagaattaatatttctttgtaaacactatatattcctctatacattttaagggtgattggattagacttttaaaacttacgaagtttttgaatgttttcaatgcttttttcaatcaatttattttgtctttcatatattttaaagcttttgaagtttcttttttattttttactcctgttttcatatatttttataagtggggtatatgtgaccttagaaataaataaataaaaagcttatactagttttcttcttttcttcttcccaatatttatataaactctcataacattcacaaataaattaatttttgaaaaattttaattgatttgtaaccgatttttttttgttcttttaagatccattttcccatatatttgatagttatttaaaatcgtaatttttatagtcacaatctttaccaagagtataaaatttatgcagttaaagtctttatagcaaaagtttctacagcgaaagttcttaccgtcaaaatctttacaacaacaattaacagtcgttatcaatcctcccctctattggtaatatacaattaattatcattctctagagagaatagccaaaaaaaactcaaagatagaagagaagagacatgatagaacatagagaaaagatggtggtcaagaagaaaaggaaagaaaagagacaaggagaggaaacatcggagaaaactaagagaaggaagctcgacgatcaaaaacttcaaaaaatagctaaaaaaaatagttaaaattttctattttaaaaactctttgcttttttcaggtttctcgaaatttgtatctgagagagtcccttacctacgcttttgagagagtctagttatttttttccattttaaacatttaggtgctatattcttacaccccacattcaagcattcgatttcaaaatccaatctacgttaagtaatattatatgtcagttcaaatccattaaaaactcaaatccaataacgtcctcttagcaacatttgtatgtgggttattcacataaagcgtctttattaacagatagaatatccttaaatattagtttgaaatactatggatattcttcatgtatctagaagaatcccataacatattgtatctagaagactttcaatatctttcacggtattagagcgcagctctttctaaatcgcttcttttctgattaaatctttttcttttctctttctcgtcctctattctcttcctgttttctccaaattctttcaatggccgacgcagtcaatccctctaacaagatctatggagtctctaacatcaagtctcacatctctgtgatttttgatattgaaaaaaaacaactaagatacgtggagagaactttttctcacccactgtctcagctttgacgttctcggacacatcgacgacactctcctcccagccgatgacaatgatctcgtgtggcagaaacgtgatgggattgtaaagctttggcttcatggtaccctcaccccaaagcagtttcaaggctcattcatttccggatcgacgtcacgtgatatctggttatagatttttgttaaataagccaaattattcagactgttaaatggtttgattaaaccgataatttttccgttagataacttaacaattcagcgatgtaacttatttagtaaaatcaacaaaaaaaattaggttgaattacattgattttgtttcttttatttaagaaggagtgaacccaagaattgttcttttaatatattattagtaattgaactgaaaatgttgaatttctaaacaataataagaaggagataatatacaataaaattagaaatttaattcaattgagatcaaaaagttcgtttacatctgagtttcctgctttttgatggatattttttcttatggttttgatccgatcaaaaaccttattatatttcatatgaatttgtaagttcattcggaccatcaatcctgttcacgaacaaatcaagtttgaccatcgatgacgactttcattccggcattagtccatggaattgttttcttttctttttaacaaaatcagtaattatattagttattattttaaaaatttagcacattatattgagatatcgaaacgctataaatcttttttggtcaacatttggaccacaactggccgacccattagccaattcactacaaattgtagggagcgggacttgatctctagtgtgatggtgcctgtcttcagtggacttatctctattaatcccgaaataaataaacctcataataaatttttttatgaaagcctaccatagttaatttatggcactctacgcgtgcttgattattttttgttttctttaggatatttcatatttcccatataatataaaaatattaaaaaaatcatcaaactaaattagttatggtttttttaactaattaccaaattagttatggctacacgaatgagttccacaaaaaatgtttggatttgtagcttaccagattatgttgtcggtttggttagagatagagcattgcatctaacctgtgttttttttgtggcttttcccattaaaaagaaaacgatatgtctcgagagagttgcctttaattaattcaattcctctgctttcatatacagtactacaaaagcctaaccacatgcatttcctatatattgcctcttcgagaacaaaatgttattcactccaaatacaaaggaaaacagaaacgtagccaaaaaaaaaaaaaaaagaagacaatgataaagtctatcttactatgtttcttcttccttttccctctccttttaaccctctttaagaagcttttaccttcgaaatggaagcttcctcccggacctacaggtcttccgatcatcggaaacttgcaccaagcttggaagattgcttcatagttcttttcacaagctctctttagaacatggaccagtgatgcttctccgtttcggggtcgtcccgatggttgttatctcttccaaggaagcagctaaacaagttctaaagtctcgcgatctagagacatgctcccgacctaagctggttgcgaacgggttgtttactcgcaacttcaaagacattgctttcgctcagtatggtgaggactggcgagagatgaaaaagctcgtggggcttgagctcttcaatccaaagaagcacaaatttttcaggtatatcagagaggaagagggtgacttgctggtcaagaaactatccaaatcttctcaaacacaaactttagtggatttgagaaaagcctttttctccttcaccgcgggtatcatatttagagtctcctttggacagaacttccgcgagtgcgatttcatcgatatggacagacttgaagagttggtgcaagagtcagagaccaacgtattcagcttcgcattcactgacttcttcccaacgggtctcggttggcttgtagaccggatctccggtcaacattcgaggatcgagaaagccttttcaaaactcaccaagttctttcaacatgtaatcgatgaggagttgaagattggacaatcccaagatcactcaaacctcgtcagttccatgttggatatgatcaatagatccactgaatacggttctttcaagatcacttctgatcatctcatagcaatgatgacggtgagtgcgaataatctcttagttagtaccattcttttaggttctgtaacttaagcagagaagttatagcttggttagaaagttaactcgcaatatagacataattaattgtcttgtacttctacatctattttctaatttatttttgttttctcttaaatttagaacctaaactacgtatgtcatttaatcaggacatagttttggggggagtgaacgcaggaacaatcacaatgatatggacgatgacagagctaaccagacatccaagagtgatgaagaaactccgagaagagattcgagcaacacttggacccaacaaagagagaatcacagaagaagatctagagaaagttgagtacttgaagttggtgatcaaagaaactttcagattacatccaccaggtcctttcttgctcccaagacaagtaatgtccgacatagagattcaaggctaccacattcccaagaacgcacatatcaagatcagcacttacgccataggacgtgatcccaaatgttggactaatcctgaagaattcaatcctgagaggtttgcaaatacctcaatcaactacaaaggtcagcattacgagcttttaccctttggagccggtcgtaggagctgtcctggtatgactttgggaatcaccattcttgagctaggccttcttaacattctttactacttcgattggagtttacccaatggaatgaccattaaagacattgacatggaagaagatggagctttgaccatcgccaagaaagtccctcttgagctcatacctacgctcccagcatcactatgcattaaataagatgactttctcaatcacctacttttgatgggttgttttgataatatttatctataataaaaataaatgaagatttgtattttttttttttttttttacaaaaatgaagatttgtatgtttgcctataccgtagtatatttgtttttttttttatttttatttttcttacatttatcctggtttgtttgtatattatacagtaaaacttctatatgttactaatgttgggaccataaaactttattatattttattaatttattaaaattattaatttattaatatacgaattgaaccaaaaattaatttgggactaaaaatctattaatttagcaatttattaattcatctagtattaatttacagaggttatacggtacttagggatatttggttctaattttttttcataaaccgtattaaaccgaaatttaagttgtttacttaaaaggttaaatactaaacaaatagaaatattaacaccaattgttgcctggctaagtggtaatgactcggtgtcttatcagggtttgatattggtaccatatgcctataccacatggtgaggtaatctaaattacctttttctaattttgatttttaatttacttttcaaatttataaaaacataaattttattcgatatacattttagttttaatatatattgcaatattttattcaattcaatgttactttgattataatttgttcaattaagtaaatatttttatttttattcgattttttttttaggttttaattttattttttaatttacttttgaaatctataaaaacgtaaatgttatttgatatacattttagtttttaataaatattactatttttttattcaattcaatgttactttggttataatttgttataaattaagtaaatatttttattttgattagatttaattttgcttaggctgatgagcatagcacacataaaagagagacggaaagtccccaactcaatagtctatccctcgtaggcagtctttctttcatagctacccatgtaatgaaagagaattttggtattgcttccttaaaccaaataactttgttccatggtaaaagaggagagtgatttcgcaattgctcccaagtttccttagacacggcgccaaaggtatatgtcataccctttcgagctgtccggtggagggattgtcgtaagagttatcataagttgttgttgtgcctcagatcttgctctcggcatccaccattgcccatttctaactgcagcagaaactttagcttccttagctacccgtaactgagctggtccattttctccaatgaaacttattaacggtccacgaacattccaatgatcaaaccaaaaagaagctgtttgtccatcattcaactcacatcgcataaaatcaacaatgtaaggtcttagacgaatcagattccttattgtccctgataatctcggtgatttgtcaagagtccaataacatcttcttgataggatgtttcctttaatccatgcaacccatagagaacctacattagtgagtagatcccaaatctgtttgagctgaaaaacaatggcaaagtcctctaggagacgtatgcctagtccatcttcttcctttggcttgcaaacatcctgccaagctattattgctccaactgcattggtaatcttgttcttccaaagaaaagttgcacataaggaatcaactttcgcataaagtctctttgagagattaaaaactgccctccaaaagtttaccatgccatatatcactgaagagataagcttaatgttcccagcaaatgatagaaaccccactgtccatgcatgtagcttgttggttatcttctcaataaaaggctgaagggttgtatagcatattctggcctggtttaaaggcagccccagataccgagtaggaaatattccaagctttgtcccttgcaaatcacttagaacaacaacttgaatgtctgaataactaccaaagaagagttctaactttgcttgatttacatccaacccacttagttctttgaagtgtttcatgacttcacttatactagtcagagagtgctttgcttcatcggagaaaatcagcagagcatcagcaaatagcaaatgagttagtcttggtgagtcacaaagtgggtgcaatctgaactttccttcatatgtagcttggctgaggagattggagagcactttcatgactataatgaagagatatggagaaattgggtcaccttgacgtagtcccttttgccctgggaagaaaccagctagttctccatttacagagatggaaaaccttggagaagtaatacattccttaatccttggagaagtaatacagaggcgactagggttttttgctttctcatcacgcatgataccgtcagcggcttctctgagccagcctggaggttcgccagtggccgtaacaggggtttcttctccccatgtggttgttacaattccagaagtcggttagaaagaggtaatggagaggagatctcagtttttggttcgggatcgaatgtagggttagggggaaccttttcaaaactcaatcaggcagcatcgtcatctcacgggaaagggaatcagaacgggaaatcctcttgggtcaatgtggcaaaaaagcatatcttcactcaacaaaagtttgtggtatcggaggttaatggtaaggagagagtagtagtaccaaaggatgtgtttgtaggggcaaaactattgtgggaagatttcttgataggaaagttcataaacaccaaggctccacatgtggggaaaattcatatgatagtgaataagatttggaggttgggagatcggtcttcccttatcgatgtatttgaagttaatgaaaccacagtgaagtttcatataagaaacgagggtatgaggcagcgaatcttgaatagaggattgtggaacattacggatatccctatgatagtctcaaagtggactccatttacagaggaagctcacccggcaatgaaatcaataccattatgggtcactctcacaaatgttccaacaatgatgtttacggacaagggcttggagtttctagcaagtgtagatggtaaaccgatccgtcttcatcctagaacagatgcatgcgtcagttttgatgaggctcagattttagtagaggatgatttaacaaaggaactaccaaaggaatgtgccttcaccagagaagagaaaggagagcttgactcggttaatcagtactcttatccttggttaccaccaaggtgtagttgctgttaaaaatggggtcatctacgtgcaacatgtctctccccgaagaacaagtccacttaagatatctcacctccagctatgtcccaagttgatggcgaagcgataatgcgggaccattcctctgccatacaaagtgtttcagagcagcttggttttgcacctgcagaaagagacctgcaatttaaagaaattgagctaggggccacaagaagtggtggtgcccaaggaaaagaggaggggaccaacaataaggacgatgagggttggattatacctgcaaatacaggccgcagtccggggaaacaagcagaaggacttaagtttggtgaggtatccatcctatctaactctttctctactttgggagaagagaaagttttgggagaagaaaaggaatcaaaggaagtagttaatggagatttagagcctgttatgacagagatagacacgggaaaggagttcccaaaggaggctgaagataaggagactagaccacgaggaagtaaagaaattcttatgcgatcatctttacctcgtgcatcaaaatctgctcataaagtgatttctactaactcttcaattttcacaagggatatccctaaggatcagaccaagaaaccccctcttaaacgttgttaatgtcggggttctcatggaatgttagaggtttaaataagacatcaaagcatgctgtaatcaaaaagtgggtggaggaaactcaatttcagtttggttgtttgttagagacaagggttaaggagaagaaagcagaaagtttgaggagtaaaccttttaagaattagtcggttataacaaattacgagcataatccaagaggccgcatatgggtcatgtggcgtagcagtacaagactaagccccttctataagaatgctcagttgattacctgctcagttaaactcgaaaaccatcaagatgaaatcttttgctcttttgtttatgcgttgaacagtgccgaagaacgtaagatactgtggcaggaattgaaagatcactctgattcaccaattattcggaaacgtccttggttaatattgggagatttcaacgaaactttggatttagaagaacactctcaggcggtttttcaccctgtagttactgcaggtatgaaagattttcagcagattgtgaattactgctctataacggatatgtcttctcagggtcctctttttacatggtgtaataagcgagaaaacgatctcataatgaaaaaactggatcgggtgttgataaatgatgtttggctgcaaacattcccacaatcttacgttattttttaggctggagggtgctcagatcacttatgaggaagaattaaccttagtagagaagaaggcagtcataaaaatagatgaaaacctttcaaatttgttaatgttattgcagaaatggaggagttcaagcctgtggtagatgactactggaaggatacagagccattattcctatctacgtctacgcttttccattttacaaagaagttaaaggatcttaaacctaagataaagttgtaggcaaaagatagaatgggtaacctggtgaagaaatccaaagaagcttttgagatattgtgcaagacacaagaggagaacttatcaaacccatcactgcattctatggaagcagagaatgaggcttatacccgttgggattttgtggcaggcctggaagagaaatacttaaagcaaaaatcgaagcaacattggatgcaagtgggagataagaacaacaaaacttttcatcgggctgtggtggctagagagtcaacgaatcagatcaaggaaatccattgtgtagatggtagtgttgcaaaaggagataagataaaagtggaagctgagagattcttttgagaatttctgcagcttatcccagatgattatacaggtgtcgaagtcagtgagcttcaaaacctgctgcctttcgttgttctgatacctatcaaaagctgcttacacgtgaggtgttagcggaggaggtgcagagggttctgttttctatgccaaaggacaaatctccaggtcccgacggttataccactgagttttataaggcagcatgggctaccataggtcatgaattcactttggcagtccaatctttttttgtgaaaggtttcctccctaaaggaataaactcaactattttagctctaattccgaagaagctgagagccaaggaaatgaaggattatagacctatctcttgctgtaatgttatctacaaggtaatttccaagatcattgctaatagattgaaagtgctactgccaatatttgttgcgggaaatcagtcggtatttgtaaaagacagattactcattgagaatctattacttgctacagaattagtcaaggactatcataaagattcagtctctacttgctgcgctattaaaattgatatctctaaagcgtttgactcggttcaatggtcttttctgattaatgtcctaacaactatgaaatttccagcggtttttactcattggataaaactgtgtattattacggcctcgttctcagttcaagtaaacggtgatctcgctggttatttccaaagtgcaaggggtttgcgtcagggttgctctttatctccatatctgtttgtaatatgtatggatgtcctctccaagatgttggataaggctgctggtgctcataaatttggtttccatcccaaatgtaaacgtctaggcctaacacatctcagttttgctgacgatttgatggttctttctgatggtaaggttcgttccatagagggaatagtggagattttctatgagttttataagcattctggcttaaaaattagtatggagaagtcgactttgtatatggctggagcgtcaccaatagtaagagctgagattgcagataaatttctttttgaggttggtcaattacccgtcagatacttaggcttacctttggttactaagagactctcggctggggactatgctccgcttctcgagcagataagaaaacgcattgcatcatggacgtcacgctacctctcttatgcgggtaggctcaacttgataaactctattctctgcattatttgcaatttctggttagctgctttccgattaccccgacaatgtatccgggagattgataagacttgttcagcttatctttggtcgagtcctgaactgaattcaaagaaggcaaaactttctttggataaggtgtgtaagccaaaaacagagggggggtttaggcttgcaaaacttgaaagaggcaaacgacgttagttgcttaaagttggtctggagaatcatttcaaatagtaactccttatgggttaaatggatttccacatagctaattcggaggaagcttttttggacaatgaaacagagcacaaatgcaggctcttggatttggagaaaaaatctaaagtacagagacaaggctcaaacgtttagtaaaatggaggtggggaatggacgcttaatttctttttggtttgatgactggtcagctcttggcagattaatggatgttgcaggtgagaggggtgttattgatatgggaattagtaaagaggcaacgttggcagaggcttggactggaagacaaccaagaagacatcgtctagatcacctaaatgaaatcgaaaaggagatgttaatctctctgcagaacagaacggacgttgatgatatagctaagtggaaaggtaaaaatgatgcgtacacaacttctttctctaccaaacatacatggaaccatatcagagctctctctcccatagttccatggcttagaggggtatggttcaatcacgctactcctaagtactcgttttgtacttggcttgcggttcatgataggctttcaacaggggaacgcatggttaaatggaatagaggagcgtcgagggtttgtgtcttctgcacgaacactatggaaactagggatcatttgttcttctcctgtacttatgtttcgataatttgggttgaggtagctaagaagttatggcgttccagattcactacggtatggccacagattttggcttatatctctgataactcgctgaaccaagtcgatggttttttaatcagatatgtcttccaagctacaatctacgcagtttggagagagagatatgggcgtcgccatggggaatctccaactacccaatctcagttgatataactgtgtgatgaatccggtcaccatcattaatcgtaccggtgatcgatgctacgacaagggcatgcaagactggctcaaaaccagaaactgaccacttcaaaccatctctaagaacatctaattctcattttttttttcctcagctttcttcttcgataaatgtcgcacaagttgtacaaacgttattttatcttttttgaatattatttaatattattttttttttaaaaaggaggataattctgagcctctagtgctttaagcaccaaatctcaacaaactgtatcaaaagctttgtgaatgtgcaactttagcttataatttttggggcatgttgttttctggtaattcctgatcagctccgaagcaagcataacattctctccgaggctcttcccttttagaaaagccgcttggttattggttggctcgaaattcaaatctctctcaagatagttgaaaaaaaaatccaaaaataagaaagatctggaaaaaaaaattggattgatggattttttatatttagaatttaacaagatgtatgattatatttattggttataaagatgtatgattatactattattttaagttaatcttagaaaaaaaagtggtgtactatttattttaatcacagaattgggaagttcaatttagaaaaaaactgaaaatgtgaagaagataatatacaataaatttagaaactttaattgaatttagattaacaagtacactcatatctcagttggcatgttttttatggattcttttctaagagttttttgatccggtcaaaaacttcttgcatttcatatagccctataaaatcctatgtttaatccgaccactaacccaattcacgatcaataaatgatcgtcggttcagtctggcccttgatcccgttcccgtagatatttttttctttttggaaaattagttattagtttttcaaaaattaacacatgatatccagattttatcgaactatagccaactaatccggagataagtatcttggttaacacatgatatctaaattaaacctacgtaccacatgaacacaattcatttcccttccgatatttcatattttccatataatataaaaagggtaatactaaaaaatcaacaaactaaaactaattagtttttttttttggttaaatgaattagttccacaattaatgtttagatttgttatttgtatagattagcaaattagttatggttaaatgaattagttacacaattaatgtttagacttgtagataagcaaattagttatggttactcaaatcagttccacaaaaaaatgtttagttttgtatcttaccacatcttgttgtcggtttggttagagagggacctttacatctaacctgtattttttgggcttcttctctttctcaacccattaaacacagaattcttctctttctcaacccattaaacacagaacaagatatgtctcgagagagttatcttaattaattcaactagatgagtatccatgctacgcgtgggcttttgttttaaaagttgttatagcaattctctgttgatagtttttgttgttggttatgttcatttttttatgagcatttgttttaaaaattgttgaaatatctatattggtagttttgttgttaattatgtttatatgttttttagtaaagttagatctacttatatagttataaaactagattttaacctgcggtataccgcggaaacaatttattttttaaagttagtatatataaaagtttacaaattgtatctatctataaaataattttattttatagtttacaaatgttattaaataacgtcctgctaaacccgtcctgtaaaaaaaaaaccatttattttattaatgttgatcttatttatgatatgcttatgaatcattgtctaaatattttgtaattttgtagtaattaaatgctatcagattatatctctgcgctttgatgattataatcgaattgttatagttatggagaaaatcaatatcaaaaatgataattttatagtaattaaatgatattaaatattttggaagtattattttagtaaataatcgtgtagttaatgtggagagattttgggaagattgttaaatgtcaaatatttaattcgaagattttatttttaattatcaaaaacaaacattaaaatccagtggcagccattgtaaataagtcccaactacaggatttatttcacaaaatggctgcaaaaatgtatatatagattagattcatcttggctccagatgacaattaaacatttcttgcaagtgaaactataaactaaaattaaattgtcatcgtggaagagattttggtagagagatcacattgtaaccaaaatatttttcattacttgtctcatgtgtactaccttgaaaatgaaccagaaatatcatgtaatcgtcccaatgttaaaacttttaacacacatttcaattcttaaaatagagcaaaggtttgtagaagagactgtaagatcctcatgactattatagccgcttttgcccacataaaaaaaagaatttttggtgagcgatagatttaatcaatcacataactctcacaacatctagtttgtgctataatcgttgcatggttatgcttaaacttgtgtcatcccaatcatttggtcccggtataccagcttctcatacttgtcatcatcaacataatgattcacactgtaaatgataggtgagatatagatttagatgatatattttcaagatgttaggaacttattgaccacaagattgggcccactaacagaattcaggatatgcataacttattgtatatatgatatataacttcattgacaaagctctattaggttcaaatatttactctttgttttgaagatcaaagagcaagtcaagcatgtaccgttactaaaataaaaatttaatcatataataaaattatagtaaaaatattaatattttttttgtttgagaaactatttgggtttctctttgatggagatgctctttgactatatattttcggttaaattttgccaatttttttttaattttttaatatgctatttataattattttttccaaatacacgtattttttctttaagtaatgaggtgtcagaaggatgaagagagttcaccttctttcatatgattagtctccaaaagctttaatttactgaaagccttaacacaccaatactaagcctacaggctttagtaaagcccaaatcaatacaataaaaatcctaaattaataaacaaagagtcttcttcttcttctaaatcccaacggaaaaagaagaagaatagagttttcgcttaatctctactcaatacgttgaatttgtgaaagcggagatctacaaagcgtaaaagagttcttctgggtttcttctttctccgatcgatctgctagacgatgacgatgagtttccttctataaaaccagtaactacgagatttgatttataacaatcatgaaactctggtcatgtttgaaaatccagcttcaaatagtcctcatcttcgtaaatctagtagcaaatctgtcttcattgatcctggtaaatcccaatttccatatccaattgcatgttcttagattcttcgataatctgatctggttggttactgagaaagagatcgatctacttggaatgtttatggatttaagtttttgtttaggtttaaacggacatttaggtgaaatgggtgaccttaaaggttcaaattcaccacttcatataacaactatggttccttctcctatcttcctctggagatttaaggtggttttgtttctgttttgggctttatgttgctgcaaggtaaagatcttattctgttaagtctgtgtattgatgttaaaatgtgaatctttgatgatgttttgatgatgtgaatagattggatgggattcagttatgagaatgagtatcgacctgcgagatttatttttgtatgaagcgtttctttattacaatcctcttcttcttgtggttagtttactctcatttatagccttttagagaaactcttttctcttctgattagtgattgctttgtggatttttgaatactttagacaatgatggtttggctgtggggagtgaacttatgggtgttctctcaaggaagtgttaattattccaaagtctttgatcttgatcataaccaccttactcatagagagatgtggaaggtattttaagtataaatttaactttttttttggctttccttgatatgaagaagactgctgctccatgatgttctcaatttgtatctggatcttttgtgtaatatttggctgcagtgtagcatgtggatgacaatcattgtcccaactagcatgacagcgtatctatatctgtattctcatggggaagtatctttggctgcttcacaaccggttagcattttgctctctagcttcgtgtctgtataatgttaattgcaaatgttctgtttgttgctttcctctgtttcctctttgtatgccagataaatctgtgaagatatgtctaaggtttgtgttatcattgctgcaggtgctcctgtacattgcttttgctttggtactgatatttcctttcgatattttctacttgtcaagtcgatattttctgctgagaacattatggaggatagcttttccactgcaggtaaagtgatagacagctgttgattaaaattaaacttgcaattggcgaatttctaggttttgcttaatagctggtttataagtgttatgcttgatcagtgacgtttgtgtttgttcaaactcttacattactttggtatctttgtataaattcattcatttaggcataaatatctgatcctgtttcttttgtttcacagccaattacatttccagacttctttttggcagatattctgacctccatggtaaaggtattaaatttcaaccagttctctgagagatcttcctaacttctaataattatgtggttaggaatatattgatagcaggaggcttagtataacttgtgccttttttattggccaactactgctctttagcattttattttgtgctgataactataatgccgctgatacttgattctcattcaagatttgacatcggtaactatatgcaggtcttttccgacttagagcggtccgtttgccggatggtgcatagacaggtaattgattcatttttttgtgacatccaatgtagattagaaatatcttatgctggaggaactagttccatttatttcctttgatctctggaatatatggatagctctgtagctaccaaaatttatcctccaagactgaaaaacagcgggatatgatttatttagccaaattttcgctatcctagttttgctgatgaaccaatggaaatcctggttgtctgtctaacatgcacgggtctcataccgtgttgtctgttgtgaaatgatggaatatatgagattaaaatggactttcaggtcgctacaattgcttggtttgaagctgacgctgtctgtggcagtcatcaaattgcaatcccattggttcttgttttcccctacatttgccgtcttttgcaatgtcttcgacaatacaaagatacaaaggaaaaatcatctctattaaatggtaaaagcctaaccttctagcattaatgttaaattttcccacactatgaagaaagatgttcttttcctaccatcaatcttatagttgatctgtgattttttcagctctgaagtattctacagcagtacccgtgatcttcctttctgcgcttaaatatcacgtgatgcccgagagctggacatcattttaccgaccgctctggcttttctcaagtgtcatcaactcactgtactctttctactgggatgtaactcgggattgggacttgaggtaataggttgaaactgcatcttcctatccactaagcagtatttgcatatcataatcacataacttctctctgttgtgcagcggtttcactaagatattcaagtttagccgtccaagtaccatatcaaacttattatatggccgacaatgggtgagattcagtttccaatgaaaccgccatagtgttttcttcgtattgtgatgtctgaacctgtcaagtattgttgcaggtatatttctgggtgatagggagcaatctggtgctaagatgcgcgtggacatacaaattatcagcacatttgaggcacaactacataacggtgttcacaatgacagcgatggagatgttgagacgatttcaatgggtatttttcagagtagagaatgagtggaacaagatcactaaatcacatccaatgggtgagatttcacttgaagaagataaactacttggttctactacacctcatgatgtttagcatccaactatttttgtttatttcctctaatcctatgcaaaattctggttttcctattcggactctagacacttttagattatacacaatttttcatgaattgaaccaaatttaatgaatgacatattaataggaaaaaatattttcatactgtttaactgagacatcagattatatacggagatctgctataattaacctacaaatttttgtaaaattacctaacaaaaaaataatatagaccttctaagaacattttccccccatatatggtgttaaatttaataattctaagaagaagaaaaatctgagaattagggattgaagtttaatttagggatttatttgtcgttttggtcacaaacatagagccgataacggaggataacgtcggctaatgggtctgttaaacgatttaacgacattggacctgctcaacggaaagatcatgttttaaatattggtcaacgataagttgatgttttaaatgggttactatgaagttgacttattgaatgaccactttttgaaagttaagggattaaacaacatttttctctcattttagaatgtgtgtacaacatttatatcaaatttaaaaataataatattgaattttaacagtaaatgaatgttctcatttttcacatttcattctctatttttattatttttacactcatcctcactttcctctccctgtctcataatcccaataattatgttacgatatttttactctataatttgagttttgcattattgttcggttgttaaataaagtggatgggtttaagtgcttaatcacactttttaatataataggctgttacacctaatcgtgagagtaaataattgaaggcgaacaatggaatttatccctaccaccatttgttattaaacaaaaatattataaaattatatgtaaagaaaataaaatatagctagatattgataaagagagtagcactaataatgaaaagcaaattccaagttgcccacttgcaaatcaatctttcacacaaataaaaacaaagcccataacgtttcctctcttcaaagtgcctatatcatcaacacaagaaacaaccaaaagagactaaactaaactcctaaaactcaagatcaaagacaaagagatgacgcagatgctttccgtactccgtcgcaaccttcaaaaccttcgtaagagccctcgcgtagctgacgataccgagttaccttcatcgactagtggcgccgggccgggagttgtagctaatggaagacgagacgggtttaactccgtgatcatgcggttcccgttctcgatcatctcttgctttgcggtgccccgtgttagcgggacagatggactatgggtgtctggagattatggtagcatctcggaggttaaccatcttatggttagtgatagtatgagatacgccattttaatgtaataaacatacttatagtatagttttgtgtttttcttctttctttcttatctctacaatacaattaattttcttctcgatcttacctttgtatagtgttaaatctatgagatgtagaacaagttttgttcgtgtatatagaatgaagattttattattgtagaatgaaggttttatttttgtatatgtatctgtagcatataagttaagctttttagacttttttttccacttttttttttttgcctacttttttttgctttcctataatcaatcatgaaatacctaattcttactttctttctcctatattcttacttcctacccccatttttaatttaaaataattctcaatacgtatttccattttctagtttttaagttaaaattacagaaatctctaaaccattggtataaataaataaaattgaataaattcaaaatatggtcttttaatataacttggtgatcttgggccgaaactcaatctaattctcggtaaaattgagttatgttttgccatttgatgtgtgcaaaatggttttttttttttgttggtatagacgtgcacaattgtttttgttaagtctttcaatctttaaatcctaattatgttccatgcccataggttcgcaatggtacgtgcaaattcaaacatatagaataagtgccaattagtctgctgatcggagtaaaacaacaacgtttacatagttgcaacattatactatccgaaaagaataaaaatatatggcgacaacaaaaatatggcatgcgaaccattggaccgggtgaccagttaaagaacacattaaaatttgggaatggtcatatgtagttatttatgtactatccatcgaaatctctttatacgtttataagttgaaatataaaataaaatggtaaaaagtatttatttatttttaaaaattttcttggacaagaaaaaggaattttagattccgttctaccaatgacggaatagtttgccaagttcttaacgaatatttgtctttttcttaccttagtggatggtagtcacactctcagtatttgtcccctttcaacttttgttgccctctcttagtaacatcaatggaatatgttcttcataagctatctttatattcatttgaattttatccttctttagtgatttggatgctgtacatatatattctactgctactttgatatatcatgatttgttttttctttttagattcataaataacgaatttacttttcttatattatatttatagcaagaaagcataccacttctactactactcatatatttattttgtttatataccttggtaccaataacgccattttgggtcgatgatttcttgtattttgcacaaaaccatctaggaaaaatagatatgtacgtaaatctatctactggaaagcagtcaagtaagaaacatatacgttgaagaagtctacgaacgccggtgttgtacgatatatctataacaatcaattccgtatctataccatgagagttagcgtaaatgttatagtattgtattattaagtatgtttgatagtttatgttgcgtgtactctgtatggggtacttgttgtgtattccttgtatgcttgtggtgtgctttggttgctttctattattgtttgggaatgggattggagatttattattaactagactcggattcattggataatcctagattactcatgatgcattttttgttccgctggcgatattagtaggagagtttgtagcagtgcactgatccttaggacggctggtatatatgattttccagctttttgtcaaatacgtagtttttactatgtataaattttcaaaggatctgaaaactatatatgttttagtaacaatttaggtatgatattattactaaaactaaaagtgaccgaataatatatcagtcttgttcttgattgacacaactcgcgactgttgtatgggttgaaaagccttagactataatgtagaggaaaatattctcgtggttggacgatcatagcaaacaaattggtttcgcaaaacttaggttggttgactatgggcgttgtacatgacacaccggtttgttcttaatcctatgacggtaaagggtgttgcaaaatatgttttaaagaaacactcttggatgttcataatggtactctcgggatcttggactcttggttattgagaaaagtcctcaagctctagaatcaggtagctttttttttttttgcgttaggaaatttcgcaataggagaagtcctagcttctggtgggaattaatcttggctgcctatactgtctcggatcggagaaagcagatgaaaattgtttcaagaagtgcagccaaacaaaatttgacgagattgagaccaactatactctgtgttctagttccccagtcagatgttggatacgacacttctctttggacatgatactataaacatgaagcatatggaagaaaaacgaaacacgcatataaaagattaatgactccataaatcgatatatctataacacaatgaataaaattgtatacataatacatacatgagcctacaaaatatcaaatcaaaaaagaatccaaaatcgagtagaagtagaacaaacaagaacaagtgtagaaacaaaaagtgaaactaggcgtcctggtgatgtggtccagtggtggtggtaccattgacgccgttagagtacttgctcgaagttggtgcagcgactgtgttacctccacggctcttacggcgaagaacaatgaaccaagtgagtggctcgagaataaggacacaagcaccaagaaagatgaggatcccaatgtaagcccatcgccatttatcctccgggtccaaaatgtcgaatcctttgaaaatgttgacaatagagaggatgatggttgtgtatccaacggtgtgatggtacacgttccagtacgttcgatatttgtggtctggctttggccttacaagcagagcaaatacttgaagtgtggcaaatgtgaagagtgctattccaaggttacgatgggttgagtaagatgtgcctggtgagtcgttaccaagcttgattccggtggcccaaccggctaccccgatgacgtaacccgacacttgaaaggcaatgtggagatagaaccatgttggatcggcgaagactttcatgtaccgagccatcattgctcccattggcattagtactccccagctgaccgcatttagtactccatgcgtctgttttcataaagtttccagtgtttagtttatttttcatagagtaataaactttatattccaacaaataaaattttatagtctaataaattagctcctaaagttttttagtttaatagttttcatgaatcttcatcaattctacaaataagtcttttcaaataatagttttgattatagaagtggagacagaatttgtgagtttggttaaagtgaaaccgtgacagagaagtccactttctttttcaaagaaaacctaacaaatgcgtcgttaatatttgactagcttttcaagaaattatcacattactattttactatatatgaaaatatatacatgctaggtgcttctattaaattatttattcataaaataattgaatgctaaatacgccatcatttcactttcagtatgttgacaaaacacgtcaatatgtgtttgtcttattcaagcaattatcatttgacaacaaagtattatttaaactaaaatttctcatccacaatatttcaaaattattattcttaaagcatttatttgctagttttagatattttcaataaattattataaaattctcaaaatactatatatattttaaattatcatcaaatatttagatatcaatagaacagaaattctagaagaatactaaatgttaaaaaaaaaaagtgggttccaaatgatttagtaactcttacttcactttaaagaaacttctcataaggcttaaatttgtggtaattttagaaagttgccaaagtagtagtagtataaatttttaatagagaaagacttggacttacgtttctcttcctcagcctgtcaccggaaccaccaccaccagctgatgcctgaccagtccggaaatcaatcctaccactcgatctcatattatctcctgaggtttgatgactcgcaggaacaccgttgacaacaggtcccacctgccaaagctggttggccgtgatcagattcggagacaactcaagagttgcaaagatcgtaacctcgccactgaccagagtcgcggagaggccactcacaccgaaacttaggctactacgttcaagccgcgtaccataggaactcacggaagaggtataggcctggaattggttagttgttgtgtttgtgaaggctacgagagcttgcgtcccaaccatctgagtactacttgggttaagtccccaagcaacccaagaagaagcagaggttccagggtggcgataggcgattgagacggtaccgttttgttcattgtaggtccagtgaaggaaagagcctaaggccgagaggtcagagcaatctgcgaaggcgaggttattggtgaacctgtgtgtgttacaaagtgactggccgttcacggttaagacaaggagtgttgccaacacggcgaacagagctgtctttggagattgtgttcggtccatgtcttcgtgttctgttttgaaaggttggttggatttgagagtaatggggtttcgaagatatttatagaaaagcaaacgcggatgcttttttaaaggctacgaaagtcggagaagctgttctttgttgactatttttgcccattttgtacctttctctttttcacaatatgacgtaagcgtaacactcaaatttgtcaaatttaaagtttttttttatttaatttatttaataacataattataatatgataaagttttttaaaaaacttcttttttagtaaaacaaaagtcactacgttatagaataaataaaagagaagaaatcagttctatatagaaaaaaatgtcaaaaaaatcacgaatttttaaatttaagatgatttaattttgaagtaaacgacgtcgttttggtttaacagagtaaataaacgagacattaacgccgtaaaaagtttttgttaacatatttaatcacataactcaaataacaacaataaatttgtcatttatttcgaaactcaacaaaaattttacgatttatttgtcttttgtgaaattcaagactaaattgtctcaaattttaaagtttgggattttttttaacatttttttctttttatatgttacaacttgtgacatttttaaggttgtaatcggtataaggacattaaggttaatatttaaaaccacatggggcggctcactttgtattgcatgagtttctaaaatattgtaaatgtttgattctgattaatgttagttttagaaacgttttaatagctctacctatttaatatttgttatgtactaatggtgggaagttctatatgcaataagaagtcttatacgtactacacaattctatattagattttttaatcgttaatatgacaaatcttcaaggttatgaaaagaacaaatgaaatgttgacgcggtcaattatattctcaaagaaaagaaacacaaaagagaaatgttaaacagtaatacagttttaattagtatataattacggtggattaggtagattagttagtaatcacgacataatcacattcacatgtctgtctactgattttctggagggtaaattaaataaagattacattagtatatgattttatgtttctttgacaaaaactaaagatttggagaaaaagatagtcaaatctctcgcaatactctatgcgttcacatgtggtctttagttctctgtaatatattccaaaatgaaaatagttgaaatgagtcagtctcctttaacgtaatttccaatcacgtaaattgatagttctttgcttttggcgatcagttaattttattaaatcgaaaattaatctattagacagttcaatcattttaaagagaacactaaaaaagaaacacaaatgatgttattttcttcaaaacttttgggacaagtgactaaatcgaaaaggagacatttacacacatgataataggagaaaatgtcccaaggaagatggaaagcactttcgtatggaccaaacacgaagtgtacgaaacgacgccgtcaaatatacgcaaaaacaccgtggccatgaagattaatatgatcccaccattgagagtttgagacccacccaaaaaaagcattctagaaggtttaacttcacgttaagctaaataatctttttttttgtaccttctcttatatatgtatatgactcactttttttaataaaggctttcttttaaaataaatttcctcaaatcattattcatttttaaacatattttgataaatttgatgagaataaagaatacataagtgtttaggaagaattataatagactttcataaaaataaaattataaattatatttttttatatagagatgagattttctaatctaagataaagttaaatgtaaataatatacttaaatctccatatcccaatatatttacgtaatttaagccaattaccaaacctcactaattataaaaactatatttttttgttgaatataacttaacattatattaaaaaaaaaaaatatagccaaatcactatacttctcatccgcattacataatacttaaaaattcacattacaaatcaaaaagaatagtaaaaatcttgtatagaataagttaaaagaccttgagagtcaacgcttcaccaaacccttatttgtaatgtaaagattcaaacgtagggaagaaaagttcttcttcaccgaaaataacgatcgcttcacaccaattaaaaaactaaaacaaaggttttgacaaaataaaccaaaagacaaaaggtggtgattcgactaagaaacgcgtgcagtaccgtacgtgtcaatgctgccgtctatatgcattcaaacatattacctctcagtgcaagactttgttctctcgatagggtttggtgacccataaatgaactcaagaaaacttagtccaagtcaacctgaaaaacagatcacctgtgaggtaaagaaattagtttgctccagtcaaaagacatgtttttaggcagtaattgtttaatttcatctgtatttatatttactaaattattttccgtatgaagccataggccgatgttgtcaacaaattaatttacaataataaaaagccacatgcaaacaaattatatatacgaaagttgatcaactctctccatataattgacacatcattattttattatttgtcatgtgtctatagaataattaatgtaagctcttcaacttctaatttataggttaatgatatatttattatttaatttaacatatttaattgtactattactatatttattttaatattaaattggtttaacacaaacattgtttatgaattatgtgtatgatgcattgttgagaatgttgttagaaaaaaatatcatttactaattcgcaatagttacggaatctacaaattgttccaaattttttttttttttatggaggttattaaatagagcggttgctatggaagatccacttaggaagattaatactgcagatggatgtctaatgtgtggtaaagaaaaagaaacaatcaattatataatgtttcagtgtcttttggctagacaaatttgggctctttctctgattccctctccttcgaatggttttagaagttcaatttttacaaatatgtgttatatgcttgatatgtcaaagaatccatgtttgactcctcatataaaagatattagcccttgggtcctatgggctctatggaaaaacataaacaagaacctctttaagggtgcatgcttagtgagtataattaccaaagtgtatgaagactgtcatgagtgatttttgattcaacagaatttggggctatctttcaaaccggatggtacatgtctgtaaaaatggagtcctctgaaacatggggatttaaagtgcaacattggttttgcttggtccaagcaacaacatatttcaggagcttcttgggtagtaaggaactctcatggctctgtcttactacatagtatacgatcctttactcaagtatactcgatatttgatgctaaattcagaagttgtgaatgggctttactttctataaaatgagcattatttgcagaatgttacttttggatttttatcatctaaattcatccaagatttgcataaaccaaaggaatgacatgcgttaataggtcacattgctgaattgttaagtttcactaacgataaacctcacatgtatcttttgatagaaccgcctcattgcaataggggtgcttttgaaattgctaagagtgtgataattggttttagatgtcagtcttatgtcgctcggggagctccacgttggctgaagttgctctttgatgaagaaatgggttttatacaaggagggtatgattagattttcgtttttgtcctttatagttttagagatcaagtttctttttagaattctatcttttgaaatcattactcttaatggttaaataagttttgttgttttctggcttttttattaatatttttacttaatcgtctttttttttttgtttttcctcagttcaatattttctagctttatccttctttgacttagactttttttttttttttagttgagtcttttaggttatttttcttcaagtttttactatatatatatatatatatatatatatatatatatatatatatgcgttgtcctaagtttagtttagtatcacaacctccttttgtgtttcacctctctcttttcttcatcatggcggatgagttatgggatgagttacaacatttagagtttggaagggaggatccagctctgtttattgcacatgcagcttatgcaactgttgaatctcggaataggcttagcttgattgctaggcctcttagtcctcgttctcaaaaccgcaacgctgtaattgctattttaccaaaatcatggggtctgacttctagagtttatggaagagtgcttaatataacttttgttcaatttctctctcagtctgaggttgatcatttgtatgtgctaaaaagggaaccgtggttatataacagttggtttgtcacggctcagagatgggaggtaaatcttgcttttgagttcttgtcaaatattgacttgtgagtggagagattctgaaacctccaaaaaaacgctgaacactctgaaaattttgtcaattttttttggttttatatgctgcttaagatccatgaaagcagtcacaagttttgaataatagggtataataatggtattcctttttgaataatgacatacctgcagctttttgtaatagggtataatgttctactttagtttcccttgtagtttggtttgcaacatagatgactctttctgaagataatctgatgttgtatattacatatgagtgtaaagtcctgaaagtagatggtttcactgttgattggtaataaaaaggataacacttactagaaataaaaaaaaattcgcaatggttgcaacttgcaacaatagtttaatagtaaatatataatcgctctttgttcgacaaaataatatttagaaaaaagaaaaaaagaaaagggttatatatatattccaatcaacaattgataaataatctatcaattcatcgaactttatttttttaaaattaaaatagatatactcattctttttaggattgtaatattaaaaattaaattatacaattctttagtaaagaaaaaagggttatatatactccaatcaacaattgataaataaatttatcgattcatagaattttactattttaaaattaaacaactatactcattctttatagggtttaataagaaaacttaatttatacaatttctttattaaaaaatttctaattagtttaaaaaaaatgtaaatatcaaattgaaagattgacttcattattggacttggcctacatacatatcgcctcagtgggccgcgtagcacctaatcatctctcactacactttttcagccagactcgagagtctctctaactccgaccaatctgttgcgttgtgttggatccaaattgtgcttgtctccatttccgctcccaatcccaagtttgttctgttggatgatcatatcgatgcattcttgtacaagtaattcaattcccttccctctcgtcgttcgagtactaatcctttgactttcgcacctggaaatggaagcaagttaccaattttcttatgatttcgaaagaatagtttttttttaacctatatcaatgaaatctaagtagaaagttagatccttttcatgagtgatcagtgatactacaacactcgcctaaaacagaatttttgaggtatattgtatgaatcttttatgtaaaggttcaaacttgagattgtggtggatccagagctggcctcaaggttgaatcgccactcattgatcatcctagttataggtagaatgtgaaggctctccaaagcaagaacctgttgcctttcttactttggttgctttacttaggatttaaagtattctgttatgcccttaggtttctcagttgttctactgaagagtttgttattcttgaatcattgctttacatcaattaaaaattcttgtttgtatttgtttggtttacattgttgcttttttttttggttacaggttttggcagaagtaatattttcttgtttgtttcgactgttctaggcattggcagctaaattaacgtggagtgaatgcgattcttgctggctttgagatcacgttgaattggttgattgatatggctgcaatagaagaacttcctacatatgagtttaaaccagcttcttcaagcgggactgaaaaagatgatgctgtcactgataatgtagaggctggaacgggaactaaaaactgttgagtcaaagaacttcatcaatgaggtttgtcaatgagattctagattctaaattcgcagacttcaaggagcttcaagcggtgtgtgatgtagatattacttccgaggaatctgaaaaagcattaacaactcttgagaaagtactggcttacctttgcagtctggttcaatagggaacaactcttttatccgtgagaatgtaactgctgaatcaggagttactatagatgttcaagttctggatgtgcggtcaagaaacaggtagaaaggtcatcttgtgatgcgaagttgcttataacgacatacgagggaaaacatgaccatgatatgcccccaggaaggacatttgctcactagaagatactgaagcaaggaattgatgaagttaagaacaaagatctgagttgtatagcagaagatgccaatgcgactccacagagtttagcccttttgaccattacaaaaggccaacttgatgatgacagtggcgcttcaatatggaaaatcaggcaaacaaagactgatgccaaatctttggagtaaataataggagaatcagatgaaaccaaagacctagctgccaatcaggacatgccacaatcagaacaccaaagcatagcttgtcaggagaatgcggtgagaacagtgtctgtacaacgctaaacattttgttgcaggtttaaggcttattaacatagattagtacaagggcagggtaaattattagttgactgtatagttaattgttttggccgcaccagtttagttagtccattattatatagccacctacattaggtggatttaaataagaggagaacttgtaaagacaaagttgatgttgatggatctctgtagtatatcgatagctcctatactgtatatgacttgattcaagtatgtatttccattacattcatggagacacttgttctttcacttccatgaacagaatgaaccaatgttgttatatggtagcactgtgtgataacaacgtattctaaacagaaatggaatcagcctattactgcgagtctgtgactacatgttaagtactctagattgagcaatagtaccagattgatgtatattcgatactgtagaaaatctcaatgcacagtaaaagcaggttgttgaagaaatttttatctcagactggagtgtaatgggagaacagtacatggatactgctttggaatgaaaacattacatagagaaaacgtataaatgcaaaatcatagcttttcatcttgctgtatcttgtctttgctgtgtcgtttgaatcaggggttatactcatactggcaagaaccatggcctgtcacaatcatagctggatcagaaacagatggttcactatctactaagattcaagggagaaagagagagaggagaaagcttactggggtcaagctcagtgatcatggcagctcctttgaagtaacaagaaccacctttgtttttataagtttggtagtaactgttgaaagcaaaggaggcatgatctctgattgtgttaggcaagaagcaaggctggttttcctgctgcattttgctgcagtctgctccaccttttccgcaagcccagtctaaggctgcttgcaactcatcgtctggcgtttgttcatccgctatgcaccattgttccgactctgcctctgcttaaacatacactcacatacatctgcataaggccaaaaaagggacatagtatgaacattgcagtggtgtttttacctgaacgtcgaggaagagtcattgctatgataagcaaaggaagaagtatccttatcaagaaagttgacatgtttctagagaaggcaatgagtggtgcagagagatccagatctgatctatctagttaggaagtttgggagctaaggaaatgagtgcaacttgataccctttatactagttagaaagaatcattagtccaaaagttcaagatctatgactagggaatcttggtttgcttcagatgcaatcatgtgccagatctgcattggttttgacttttgaggaagattttgttctgcttctggaagcttttcagaacacactgtcatttatacgcttcctatcatgtaatcaagagccattactattactacacaatatacaagctgtttcatagttaagaggacagagtttgggtttatatatatataaaatgaatataatggagctataccctaggaatctactatacacacaggcagagatcaatgaagacaaagtgtctatacaaagagaaagatcggttttcgcagtttttctcactcaaccagacgaggtcttaagctgaaagagacctgtgaagaaaaattgacaatgaactggttcttgccttgatctcaagttgaattgcaggtcatggatgttcaagatatactacccgatgtcaaaaagctctcgggttgatatataatcctacaagggaaatggctttttcttttaacaaggttcaaagaatcttgctaccgctgtgtagagcacttcctcttcaaacggttttgatacataaccatccattccacatttcatgcattcttcatgagtagcctgaataacatctgctgtcattgctaatatcgggacgtgccaactactaaatttacagaacatttcagctgaaacttctccagaagctattttcttattgatttccctctccagctcacggactctccttgtcgcttcaaatctgcgcaaaaaattataaagttaccaaggacgacatccaagaaatgaacaagctgaagagataagattgaaaaatagttatctacccatccatttcaggcatctggagatccatgaagcaagcatcgaagttatgaggcggcttaagcattgccaatgcagctttgccactctcaacgcatgtaacaatagctccatatttcttaagtgcaccttctgcaactcgtctgttcacaagattatcatccacaaccagaatctgtttttctcttagcaagtgtccaagatttcttcgctgtctgttcggttgcctcttcttgccattgacaagggtttcttgcaagcaacatattaagacactcatccgaagaggctttatcaccacctcatcgatgagaccagtagacttcatctcactgcgctcagtaagagttgcagaagttgccaaaagaaaaatctttgggactcttgtaaaggttactttgcttcgggtaaacaactcgtcaagtactgaaaattcttccttgttccaggcgtctttgtctattagaatcatagccaaattttctaatttgctgcaaagattccagaacaataaaacgcttttagtgaactcactataatctctaaagacagacagacactaatgtacgtaaagtacctgatacaacaagtgcatgccattctcagacttgaaacaatgtctgcagatattcccagtctccgaagttcgtacctggtgacctctgctctaatgtttctgttatcaataactaatgctctcaatcctgtaaactcctgaatagctagatcgaatcgttccagcttagtaatcgacgtatttgtttctgctttcccgaaaactccagtaaatgaaaaagtactgcctatcccgggctcactcacaaaccccatctctccttgcatgagttcaaccaaacgtttgcttatactcaaacctatgccagttccaccataagtccgcgatgtggaactgtcggcttgcataaaaggtgtgaagattcggccttgtgcatccacaggtatgccaactccagtgtcctccactgtaactagcaatttgatttgatcagaattctgactctcagtactgtaacatgtcttgaaattcttccagcttccccatgcatttaccgcaggaaacccgctaactgtctcaccggactcgctgcatcctaaagctagtcgctgttttagcactgcgtcttcaatagtaagaggctcctttacctcatctgcaaggtgcactgagataaatatgtgtcccctttcctgtgtgaactgttattaagtaaataacaaatgagtactgtaatagtagagattcgtgaagcctgttgttctgtaagaagtaaggagtaaattactttgattgagtttccaaccaggtttgtaatgatctgccggaaccgactcggatcaccgactacaacatcaggaacttgactagaaacataaacggccaactgtaacaagaagtcaacatttcattacatatggaatttgtttgccatatgaaaacattaagaaagtagaaggtcatgcagtttataattatacctcaattcctttttcatttgccttgccagagaggagagatgaaacattatcaagaataaaacgcatatcaaaaggcacattttcaagctcgagccttccggattcaatctttgcctgatcaagaacctcatttattagtgatgtaagatccttcccactgccatgagcagtttgcgcatagtccatctgcttcgcatcaagatcggtgtccatcagcattttcagcattcctgtaacaaaatgcttaaacgtttcagctgattttaagagaacatgcaatattgaccaaggataagtagaaaaagtacctaaaactccattcatcggagtccgtatctcatgagaaacagttgctaggaactgcaaaataagaagcatttcagtgaaaaaacaagtaaagcttttgagactatatgattcacaaagatcacctgtgactttgcaatgtcagcggcctcagcacgagctttgagttccctcatcttctgacaatcctcttcaactgtcgcaattcggttgatggcttcatataaaatataaccaacaagaaaagtaataaccagaactaagatcgacggtgttatcgctgtccagggaatgggaagtttatgcttaaacctgtaaatgaaaaatgccactttcatacttcagaaaacagagaagtgaaacatatcttataaaaatgtaccataacagttagagctaactaacctgcaatgcatctcatggttccttgatggatcaccaaaatcaaggctacttatatgctgctcacttatatccccaatttctgagccatacatttttattagacctgaagtgttagttgtgtcgtaaacatccacagcaattgtctgtttgctggcaagttggtgaagaagtttctccaccagcgatggcatatcatatgatgcaccaaggtacctgtttttaagtgtatcttattaatattttctggtccagagatcattctttgttacataggttcaatttcttcagtcctagaatcattttaagtagaagtagtacccaatagttgcttcaacacgctgttcttctgtagcatcaggcggtaggctcgtgtcatagacagcaaaggtcaacacaacaccaagatgatttgacttaagaagcttaaatggagatgttaacactccttttcctgatgcccttgcccgtaagatgttttcacggtcttcctgcaaaatagttagacttttgaattctcttttaaggacattggtttggcaaaatagttcaagaaacttttagacgttactgacttctccagacatcatgtcgaccgatacaatatgggaaacagtttcttgagcaaatataactggcgcgtattcgtcttgaatcggtgcgggatcaaagttttcaggaacacaatcttgtacaactgtctggtcctcagtttccattttctttattgcccatccatgctccttttcaaatttctctctttctgagtgtgggactttcaaagcatacgctacaccactagtaagtggcctctcaaagtttgttctctcagtatattcttcaaatgttctctgtaaatgtaacagaagttgatgatttaaacataaacttgagacacaaaatgtatttagcagtaagaaaaaaacatcacctgatcaatggcagatgggattttaccatgatgaaatgtagatacaagaatagacaaggcatgaacatggttcaagctaacattgaactgatcttgtaaaacacgtgctcgttcgtcacacatgtttgccaaagtctccctccttttcattatgatctcctcattagtgtcccaaaaccaccaaacagagaaggaaactcctcctaaaataccaaggagaaggatattcttcctccatcttccagcccctctagaagaagtctgagcacgttgttgctgcttctttggagctaaagcctcttgcagatgtactttctctttcctctcacctcgtgctttagaatgagatacataaatcttatggcacactaacacaccaaggattagacaccaccatgcatttcttaaatacgatgacaaaccctgctccagcccttcttcatggttttcttcctcaaggttttcaggttgctgtaaaatctactcataaccaaacacattcacaataaacttttgtgagaactagctaaacaccaaatcttaaagcatttccttcacatgttgtcgaatcgaatattatcttaccggttcaagattaccacacatacaagatgttgatgagatagaatgtcctaagccaagattccagggaagccctctagtctcttgtttatcagaacgcacactcagggaacatgtaataccatagtttgtccacattccagggcttgattccttatgacattcaaaggatgttacctacaacaaatacagagaaactgttacactttaaggcaaatctggtgcgtattcaaaagctcaatttcaacaaatacaagtcaattcatgcaattacctgatctgaatcagagaacaaagagaccaaatcatgaatctcacttcttgtgacattttgatgtctatacaacactttctcttctccattacaagaatctgtctcctccttctgacttctacctaaccgtaagaacataaccaaaacaattaccaaagagccacacaaaatcaggaagaagagaggcttctttagccatttcttgtcactgctcgacgacttcttagctttctttgaagtaagattcaagagctcacaagttatagacatttcgactcctaatctcagattcagctgaagaaattcagatctcttcaaacccaaaactaaaactctatcaacaacaatctcatagttgagttcttgaaaccatccacaagaagaacaagaagctgtgacatagtcccaaacgcaaagcttttttcttttttcttacttaagacgcaagaggacaagatgaaccaaacccagtggttgttgcaatgggagaaagaagacattgttgagagtaaagaaacggaaaagagaaaaaggacaaagctttatcttctttcatggtttcagggtaaagaaaaatgacaaagctttctctgttttagatgtttgtgagcttaaacaaaagaaacccagctggtgtctctcattacccaactggactcaatgatcagagtttggataaaagaagcatttgttagagaaattatgagctaaagaaaaagaatgtcacttctctcttcttttactctacttttgattattattattgtttttgtcttttggtgaataaacatttttaaaaactgaggtttttgggtccatgattatctcatcatctaggtggggaaggtattataacatttttagttaaattagaaaaagtgattggctaatgaaaatataaataaactcaactataccaagaatcaatacatgcttctcctaaaacctactcattgttatttgttttttgtttggtctttttggtgtttttaaattgcttcattagcatagtttaacatctactcttaagtcttatcttatcttgtataaaatataacgatgagtgggttttacgagaagtgggtattgatttgattctatatgtacatcttatttctttttatcagtttatgtatctttgtctcccagttacatttatgattctgattatttttatgtaagaagttctgtttaaaattgtatttgactttgaaaatatattaggactagatcataacccgtgctgtatagcacgggcattaatattttgtataaattacattgtatactttgttatgtttgttatgtttatcaaaattatttgttatatttgtcaaaatttagtaaaatatattcaaatataattaaatttattaaaacttaataaatttaaaagttttttttgtttagagacgcactatctacatacaaaatactcgtttctatttttttgagtatttttagggcctgaaactttttatccaaactgacccaaacccaactggacccgacccgaaccgaatatttagaattattctattaggtagtaaatcatatacccattaatcccaaacccgaacgggttctacccgaactcgaatgggttactcatatgcccagccctattctctgatttaattatctaaaaaatcccaataaaacatatgttttgttgaataccttttattcaaaaaaatttacatcctcttctgccaaaatcatttcataagacatcccaaaacccttggaataatgattctatgaatgaagaatcctaatttgaatataccaagaggttttgaaaggttttaagtttttgataggtgtgtatgtgagaaggtacatccatcgtgatggtaatctgcttatttataattttaacttgcattatacagcaggtaggcttatattttagttaaactaaaaacttttattgtaaagttgattacaaatatatgatattattttatttgattttaaatgtatagtaaactgctagttgtatatgttttgttgatattatttatattgtttaatgtttaaaattatatacttgtattttgattgttaattttagagtttcacctgtactataccatcttgtattaatattgatttaaacccgtcaattctaggattttccaacttgtattaaaaattgaatcacatcatacacattaaaaaatctaatatgttattaattattttagtatataaaattataaattttaaaataatatgtatgaaattgaatataaatattcaaattataacacagtactcagtaaaatttttttttaaatctacttttgacccgttatagtattttttcatgtattgaacagtttatatttgttttttttaaatttaaattgtggcatatgcgaaaaaaactctaattatttttttataacgatgatattatttttttgcaaaaataaaatcatataaagatgagaggtgaactataataattaataaaaaattaatatgataatttagatatcaaatctaatttgttgattttaattggttacttttttggaaattaataatgtatttcgtttttgagttaaatttaattaattaaattgactttttaatttttaaagaaatgaattaatttactctttaaaattttatttctaatggcatacatatgtaattacttacaaaaaataaggttatatttaaaatgtacttcccaaataatatagtaggatagaaaaccaggatttatatatatatatatatatatatatgtgcttaaattaaataaattgaagaaaataaagttgattttttcgttaaagtgtttgtaatggaatcgctattgtagtattgtgtctacacccaaattgaaaccagacataatacatgaaattgaccaaaattgtatattttgaggtgatcttaccgtgttctcaagatgaccaacgaagcaaagacaaagatgaccctataacttttattaaattgtgtttgcattagtcatgcctatttagttagagttggatgaaatatttgatttgatttttttttgtttgactccaatatctaaacccttatacagtatcgtgccaaagtcaatagaggcttaagacatattctaaaattgtagtctcacacattctatttttgagattttttttgaatgttaagaaaaataatatatatatatatatatatatatatatatatatatatatatatattgctcatttaagaaacaatttcagtacaaacaagatttagtagttaatgtaaaggaaaaacaaacaaaattttccataaatgttattgatgagttttctttccaaaacaaaagtcttaaaacgctaaataaaaataaatactgagtaattcagaaataaatgtggcattttatttgtttatttttgtatgacctaagacaaatgtctttttcctacatgaagtacggctctgcctaaataacaatttattttcatttaatcgatcttttttggtatttttgaactactgtcgtatgtacatatcaaacctcattattctttcattcctatatattatttagttgtttaatatgtattccacctaagagatctcaattgataattagttagtctaaaaaaaatattatctattatttttatctcaccaatattttagactttagaacaaaatagaaaatgacaaataatagcatgagacaattatttttattaaaaaacaataagcaatataaacatgtagaatattattcggtttgggatttacggctttacttcatagacggcttttaatgaccctcttaggacgtcaagttgctacgataaagccatgaaaacagttttattaaagatatgttatacacccgaagactcacaattgccaacaaagtatgaaagtaatgtttcacgtaataaaagtcttgtgctgaaacaaaaaagattaaaattttcacgatcgagattattggaagataactagttcattcgatcactatcgccacccaccaccccacattagcagaaacagttttagcgcaagaagtcctgcagctctatatcattaggcagctgcgatatctcaccttcaacaatgaaggattgctaattggtttgtcatatcaaacttcccttactttttataaaactaaacgttgttgtcattatagagtttgtgtattttaacaaaatcaataaatttaaatgcggttccgtacaattatgtacaataaccgatatattgattaaaaatacaatgacatactggtaaatgctatagggcatataaactaacacatgaaacaacatttggataatcattttaaaataactgacacaagaatatcaatacttgacacgcaagatacagttatatgttttgttttctaaatatctataatatttttaatctctttttctaggcccctaattgagaatcaacctatagaaaatggtcagtatatatgcagatgaccttataactttttttttattgtgtttggatgaggcatgcctatttagttagagttagttggaatatttggtttgaaaaattctggtttgactccaatatctcaagttatgttcttcctttttaccctctatagctctttatttttcatttaatcgtttttgtatttttggacaacattcgtatttacatatcaagtttcattattcttttcattaattcttatatattatttagttgttaaatatgtattcattccatttccacctaagagatctgaattgataattaataatgtttatcatttttatctcaccaatattttacaatatgaagatatagaatattctttggtctgggatttacggattttatttcaaagacgacgatatccaaaattcttggtacgtaagatacacgtcttgttttcgaagttatctataatatttttttactctttttttccagaaccatcccctaatttgagaaccaatctaaagaaaatggtgagtaatgatgtatattcattagtgaagactggtgcctctcttattttcttcaatttcttcaagttttggaggatttattaaaaattcaagataattaaaattttgcatatatcaacaatataaaattacaaatattatatttaaaataaaatagaaaattataaagatcataatataataatttttcttaattcaaagatgaaaaggaaattataataaactgtctaagaatactacaattataatttacaaagaaaattaaattaagttaaaaacattacaaaaacaaagaaaaaaaaatctattgatctcacatattactaattgattaaagaagcccaaatatatgtaacaagctttttagttattttaataattcttttttgttttacaattagtaatttactatattacttttatttacatttttaaaaaatatatatattattttttagttttaggatcgtaatttattgtatatatttttgtgagggccttgtgcaaaaaaactcttaaagccgtccatttttgcaactttatcttccacgtctagaaaatgcaaaataatcctatgaaatgcaaaataataggcaatatagaccatttttgcaactttacatatattgtcaacattatagatgatctcctcatgatcacatacatttgtttttgaaaattctgaagttataggtgaactcctcatttcgagggcttcaatttgatatattatttatcaaaattttaaaatttgacaatatctaaaaagaattatactgcgtattattttggatttgatatgattattttgcaaaatgaagggtatagttgcaaaaatggatgagtttgagagttttttgtgtacataacccttttttacaaccacaaattaattaaaaattaactctggttgttatataattttcttttaatttgtatatttttatttttattttcagaaaaacgatataattttttatttatcaaaacctaatcaatagatattacgataatgccagttactaacattgaaatcatgttttatttaataagattttaaataccttaaacacaagagctcacctttctttgtcttaatctcctaccgggttaacataaccaagaaactatattagttgtcacacaaaagtttctgcttcatctgaaacaaatatctttgcaatccaactgatgaaaccaaaggaactcaaaatgtagcatcatccaaacttttctgaagcaaaagtgacaagtaaaaagcagaatgacattggctacattttatactaaaggttaatatagaaagaaggaaatagagaatcgtaataacaaacagcaacaagtcagactatgtttgattcttcaacattgctaatacaacagctccaatgaacgaacagaggcttgcctgtgtatatagttcctgacataataatcttcaatatagagttgggtttctacactgagtcaacaaccgttacattggtaatataaagctcttactcttgtctcttgcagcgacagtgaatgataatcaatcagttcctgctccattgtgaagcaactcttctggtatagcagatgggtctaagtcccaacagtttccgggcacaccacaagtttcttctttaagaaaccgagatggcacttgatgcgaaaatcgcagcatctctctccgcggtatccatttcttgctctcctccttatctctcctgcaatacacggttttgtatccatctactttcacaagcggggcgatgcaaaccccaaactgttcagaatattcatcaaggatctcaaccattttgtattggtgcctcacttcatctggagttgagttgttccagtttggtgaccagttcttgtacacagtccaaatatctccggtttgggggaatatcctaacacaaccgcctcttcctgttttcttgccttttaagagatgggaaaatatgttaacatgatcaactatgtcagtatttcgtatcctgaaatgtccacacgactttgtaaacccatactgcacccatttcattgtaccaaactcgatgtcagttttggagctcaagtaggctatgtcaatcttaaaaggttgaacagatagtacttcccggaccatgcaatataagcgtggcataccatcatcttcatcataaattgcccatatttgcctagcctcgaagcactcctctaatctatttttatcaaagtcatggaagtcggagtctggaactgttattggcccgtttattttccgaacaggtggatgaccaaaagaaacattttttcctaatctggatacatcatcccccaccttggaggacgcacttacttcatcaaggggagtcgcgtcctctgtagctgtcgcagcagcttctgaagccaatctcataatctctagtctttgcttaatatctgttttagctttgtgaatcagtatcttccgtgtatccaatcctgttgtagaagaccaccgtctcattaaaccataactcttcccaggatgtttgaagtcatgttccatctttgcatccaaatttgttgctttcgattctggatttgattttgtaatgttctcaacaaatccattaccagatgaccctaaaccaacattcctcttcttctcaggtctgctggctttaatcacttaaggatcagcagaccagttgggtgggcttggatatatcagatcagaggctgttcctttcatcgagcttgtcctgttagacccatctttgactttttttcttcctttacagactactccattgttgagcttataaggatatccgttggatgctgaagacattcggtttgactccagattcccaggagatgttcccacatatgagctccagtcatatgactcatttgtaacatattcatatccatgtgctggatactgacctaagaaataagtggaattggtaggcatgcgtgaaacagcatcatagccatgacctccatagccattacttgttgtatgagatggaggcgcatactgaagtgatgcactaacaggagccggcccagtctccacagcaataaatgcacctcggcagttcttacatgacaacctcttattcacatacttccgcagatactcatactgaaccttgcaatatgtgcatacagtccagaaagtatcaagccttttctgaagctggtggacaacaatcgaatcctaggggcgtgggggcatactctgtactactcttctgaaccaccatagagtcgataaagtttttttcttttgtaataaaaggtgcttttcttaaactcacttgacaggaaactccaagcttccgaaatgatctgaaatgctctgttagctccaaggcatttgttcttgtcgggatggagcaatacagccatcttcttatactgtttcttcacttctcttttcccacatagtaatcaatttccccactgcgcctactctgagaagctatataaacttcatacgtagtgagcatttgagacaaaccctccaagtcaggaaacagtgacttcgccctcaacgcataactccttgcacctgcaaaatccttttctgcaaatcttctctcagcgaactgcttcgctttaagagcatcttgtgtgtatgcttccatctaaaatcagctcttcaccaccaacagttctacaaaaggaaactaagaccgttctcgcaagctaaatctcacaaagttgtccattatctgcaaacatccaccagcgtaaaattattatcttcagtcactaaacaacataacccaatacaccaaagagctcaaacacacaacattataacaagaacccaacccactcactaaaaatcacatctttgctcaactctgaatgcaagatcaccctcaagcttaaaacccacttctccaagctccatttcagaaacatatactacctaaacatcaatctctactactaactcaagtagatttgggtatctaaaagcatcgtctttgaagtcaaagacagcttaaaaatctctcctttccgacgaaatttcagttgttacaggtacatcctcaaatataagctaataacttcaacataagaattaaaagctcttaactttaagattcgctaatttctaaacctaaaaataacccacaaatcaaaaacagtcaaattcatcttaaaaacatagagatacaagaagcgatcttactgggtttttgcgtagaaatggtaacaatgctgcaaattcatcttccggagctaagatcagatcaagctaaaacactcgagaaatttatggatctagcaagtatactacactaaaattagggtttctgatgaagtgaaagctgattcaacactctgtgatgcacacatcacgaatgaatttgccggcgaaaaactcgagattttgcccggagatcggaaatcgaaaatttaggagaaaattaacgataaataaaaatacgatgctaatttgctaatagtactacttcttgctatcgtgcactgtaatgaccagtacgcatttatatattttatatctttatatctaaatttttattttacataaactaaatgtgataataataatacattaatcattatgaaaaacattataggaggcaaaacttgaaacatgaaaacatattctcccgccactgcccaaacaaatttgcgccaacaaagtctttaaggcatgttggatcagttatggttttgttattgttgagttattggtatgacaccacaagcttttggattgttggtttttctcaaatatttggcacaagcttctggattcatgtctctattgatacaaactttatttcaactttccatttgagcttgtcatgtaccaaatatgattctttatgtgttgttgatctccacaaactctaccttagcgtaaaagatctcacgttcttggtaaaatacacttgagagacatatctttactttgttcctatgatctttttttttttggtaggtcacggggagaaaagctctccccacaatttattaagaaactaaaaaacaaaaatcaaattcggatatgctttggaaacgcagtttctcagtcatcatcctctacaaatgacgccacaaagggtggagcaacatctaacaaatgaaaccataaagggaaagaaaatgcatagttcgctaacccgtccgcaagacggttagcttctctataaacatgagtaacatggactaaccagtctcttgataagaagccatggcacaatcgcaccaggaacgataaaggatgagtatcactaatccccctcgttaaaaaacccaccaccaactctgaatcaacctccaactccactcgcctaaaccgcctctcccaagcaatataaagcccgtaacagacaccaatattcaaggcgaacccaccgcaccaacgaccttgaccatcacgcacaactcctcctactgtagccaatcccggatttccccgtgaagcgccatcagtgttaagcttcatccaatcttctttcggtcatttccaggccaccattctctccatttgagtattcgatctgcccgtatagcgattcagtttgtgagcttgacttacttgagaagcgaagtccttaacaaactgaactctatctctacatttaccaatctcgccaaaaacgtagccacaccgccacttccaactccaccaaaccacaatggagaacaaggttgcccatgaatacccgacctcatcattcaccattcccagattcaaatataaccaaccaagaagagacccattgaaaaaatcatgtctcctgcgaaccggcactaaccttctccaatgcaagactcggggtgagtctcacacggggatagatatggtggcttcacaagctggcgatcgcttctctcttgtgaaggaaagatggtcgaaggtggaaatctgacacgctagcggtcgcttctctcgtgtgagatcaaatcagggttttgatggtggattgatgatcgccactcaaaagtgtgaaagcctttgtgataagatcacgaacctttgtctcaaggaatccacacaagagacattgattcacacgtttactaagtaaaggaatctacctaacttaaataaacaaaaacaaagcctaagctttagagaaaactctttctattactttcaaatttcgtggtcctttacaatgaaacaaatgagctttttatagctcttacatgactaagctacattaaaagaaaatattctaagttaaatacaaatcaatcgatataatagagaaagcgtgattggtggtgacgatgaggaacaaatcgtgggcattgatggagctttatctctagatgcattctctggattaaatggtggatcaaggatttcgagcaagcaatactccttagcaattaatgctaatttaattacgtcgaataacgaaagtttatttcctttgaatttctctttgattccttttgatattccggccaaagatgttttgcaagcttcttcttcatttggagggtttgaaatctccaacataaacgatccaaggttgatggatgattcactttccttgcttggttcgacgtgtagtagttcaggaagtccttcagcaagtctttcaggaagttcgtcagaaagtccatcaatcagtacatcagcaaatgtgatgtccgcatcatactctccttcttgagaaagttttgtcctcaaaactaatttcatttttttttttttttttaaatcacagaacaagaaaaaaaaaatttaatcgaagaaaacaaaacagaagcaaaaacgattgatgatataggagctttgagctctgataccaaatgatgcaagactcgggggtgagtctcacacggggatagatatggcggcttcacaagctggcgatcgcttctcttttgtgaaggaaagatggtcgaaggtggaaatctgacacgctggcggtcgcttctctcgtgtgagatcaaatgagggttttgatggtggattgatgatcgccactcaaaagtgtgaaagcctttgtgataagatcacgaacctttgtctcaaggaatccacacaagagacattgattcacacgtttactaagtaaaggaatctacctaacttagataaacaaaaacaaagcctaagctttagagaaaactctttctattactttcaaattttcgaggtcctttacaatgaaacaaatgagctttttataactcttacatgactaagctacattaaaagaaaatattctacaaattacatacaaatcaatcgatataatagagaaagcgtgattggtggtgatgatgaggtacaaatcgtgggcattgatggagctttatgtctagatgcattctctggattaaatggtggatcaaggatttcgagcaagcaatcctccttagcaatcaatgctaatttaattacgtcgaataaggaaagtttatttcctttgaatttctctttgattccttttgatatttcggccaaagatgttttgcaagcttcttcttcatttggagggtttgaaatctccaacataaacgatccaaggttgatggatgattcactttccttgcttggttcgacacgtagtagttcaggaagtccttcgttcagcaagttcttcaggaagttcgtcagaaagtccatcaaccagtacatcagcaaatgtgatgtctgcatcattctccaaatgcccgctattgacggacaatcccttcgcacatgcaagattggttcgtccccacctttgcagacctgacaaacacttgactctccaatatgacctcgaactcgttccacattcgtcatgataacctgttgagtaaccaaccaaagaaacgttctaaccctttccggagccatcacctgccacagtctagcaaaaaaggaagacatatctgttcggcactcagaattttccatcaacatctcataagccgacgtaaccgtaaaagcaccatcggcagagtaccccaagataacctatcccgcacgccagtcacgttatctaaagcaatagaggctaactccaactgagtattatgagaaacgtagggcaaaattctgtcaagtctccaacccatgccatccacccatagattgtgagctcgcaactccttatctgtatttggtatctctagaactgctctttcagagactgatacgataaccatttatccgcccaaaaacgaatttcttgcccattaccaatcacccatctactaccccgagtagccacttctcttaaccctgccacgatgcttctccaagttgacgagcatggcctttttttctccatccaagttcgatcatgaatctctcccactttatactttttgcgcaagattctagcccacaaactctgccgatcatgaataagcctccagccaattttagatactagagctttgttcataaactttgacttttgaatgccaagacccccctctctctttggcaaacaaactctatcccaagctaccaaatgcatcttctttttctctaacgaactaccccacaagaaagctctcgccagcttatctaatccctccaacgttgactgtggtaaagagagagtactcattgtgtgtatcagaatagaggagagaaccgacttggttagagttaatctccccgcaaagcttaaagaacggcctttccaacccgctagccttgaagccactctttcaagaacctctccaaacgtatctttatttatccatctttcgagaataggcattccaagatacttccccaactctcttgttgatttaatcccactctcattactaatcaacttttccaagtctcatgaaacattctttgagaaaaatatcttatatttctccaagctcactttttgtccagaagctacacaaaacgtttccaagattcttcgtataacccttatttgagagaccgttgcttctgcaaatagaattagatcatcgacaaaacaaatatgtgaaatcttcggccctccctaagacagaccaataggcttccactcttttgcagctacagatcgatcgatcatgtgacaaagtcgctcaagatagagaacaaataagtacggaaacaatggatctccctgtcgaagcccacgtgacggtttaaagctagcagtcttctctccgttccaaaggatactcatagacagaccagtgatgcattgcaaaatccattggacccatctctcctccatacccgcagcccgtatcgtatcctccaggaagtcccaccgaatacgatcatatgccttcttcaaatccagtttcaaaagcatctacccttttctcccttgtttccttctcatcgagtgaacagcttcttgcaccacaataatgttgtctaaactgagcctctccgggatgaagctagattgtgctggaccaattagctttccaataacttgctttaagagtaacactaacatcttagtaagcatcttaaaaagagcattgcgcatcttagtatgtgccaaacttcaagacttgtagagttttgacgagtggagtagaagacttggattttaggatcctccagacagtagagaccttcaagtgttcttcccattatcagcagcttcttggttgccttatcatttatacgaacactatcaacatcaaactcaatagagcacgggtagtcacttgtgagttttgaaacagacaaaagagatttagcaatatcatggcaagcaagaacttcttttaaaggtattttacctgaagaggaagcaatactacctgaaccagtgtgagtaatgggcaagaagttaccatcaactaccattataaaatcagaaccatgatagggttgagactattgcaaaacttggtgattattggtaacatgagctgtagctgctgaatctggaatccacttgtggccatgatggtttgtaacatttgtaatgcgcattgtaccaagagtcattggtaagtcttcgtattgatagttgttgtcaaacctatgccaacatttcagagcatggtgaccagctttaccacagatttgacataccacacttgagttttccgactgagaaacagatgaagataaaatttgttgatgaaaatcatgtcctctagtcgagaatgaactcctgccacggctagagtttgacctttcttttcctatgttgttgcgaaattagccattgtctgagtgagtgacattgaaagcaacatgaggagagatagatgcttcagtcacatagctttgaagacggtcatcatagccttttaacttagaagcaacttcatcaagagaaagacttggagtagagtcaacagagttttcaatatttgttttaattggctcatactctcttccaagaccattcaaagcagaaaagattttcattttctctggaacatggttaccaatagaggctaactgatcaaatatatatttcagatctttgagaaaagtttccatgatgttatgtttcttttccagagtttgcaatcttctttgcagttcaaacaagcgagaggatgatactctattaaagtgattagcaagagtcatccatacctgatgagaagcgaagcagttgaccaccacacttaagatatcttcagcaaacgaaccaagtaaccaagacttaacaacttggtctggttggtgccaagtgtaaaactcctgaatttgttcttcaaaggtgacactgttgtgagtagcagtccgagtttgcgtcagagcaaagatagaaccaatgacaaagccgaccagcccttgaccagataaaaaattctcgaactagctcttccttctagagaatgtagttttgttggtaaagagtaatggtgaaacagttggaaatattgagaactgggtggaattgtataaggtgccatggatcttacttctatgagatctgataccatgttgacatttctaaactaagaatggtttatgctcaaatgagcttattaacatagaaatctaaaattggaaaatacaatagttcaatgagctttattgaaatataaagaagaaaaagaagctttaggttttgtcaccaagaacacttagaagaaaaatccaccattttcaatggaagacaaaaatccaatcagatttcccataaaaacctaactcttcctcaagtcattgaagagctaaaagagctctgggctatggttttaccaatcatagcaataatttttatatgtattagcgttcttggtgaaataagaatgaagcataattgttgtaaatcagtgacaaatctaatatacttcattcttttttctccaagaatgctaatatatatataaactcgtcaaacaatctaaactattgtttgttaattgaacttcaagcaagcattatgtataagtttgacatgttcacaaaacatgttaaattcatttggtggttggttgaggaagttttgctcacctatgttctttcaaacaatttcaacaacacatttgatggcacgttgaattaaatctaagatcataatctcggtgatcaatctacactacgcaataagaaccaccatagatgtataaccatatatgtatttaatattaatcttattaattctgaattttgttgctttcaactcattaccccgatagtatttagaaagcgatgttgtttaaacatgaattaattgattcaacatcaaaattctggtaaatattggttggtaaattgttcaaaatcgtgggtagaaaattaacaacatttcttcgtttataaactaaattgcacgtttttattagtatgtgttttattttacataatatagtttgtcatacttttattatatacactatacattataaccgtaattccatacgaagaaaacacatattataaccgtaaacccaaatacataatctattattcaactatacgaatttcattcaatatataaattttattaaaaaattgtcaaaatctagttattaatattagaacttataagatgaggacccaaataagggtattagaaagtgaagatcacttaaactctctcatacacaatgatcgaggcagccttatcgaaccctttctccgacgtcgatgaagccatggctcgccggcgtcgggatttgtcttccctttactacgttgtttctctcccaacacatccaaatcctttctcggcccatgtcccacgatctcccatgcccactccttgcgacgattcctatatatctgaatttcttcaagttacaatcgtcttcctctgctatcaaacaacaccgtttgatgcggctcagcccactcctgaaacaagatcttctccctctaaaccttttgtgattcctgtaaatcgtccctctcaatggctccccttgaagtcaagacctgcatctcacaactcctttctttgggattcaattccccccacctagtgtttttcttggtttcgtttggaccggagctctgctttgacgccggagccgatgaggatttcgacgacggaatcttcaacccactcctcagctttggcaacgctgactcgactagctctattaccaagaaaactcaccgtcggcgtgcggccaccgttgacgaataagggaggtagcttcctaaccctaatgttgcttttccttatttggtttgggcctagcccaagaactgtttaccctccctccaatccatttttcaagtcctcgaagcccatgaacagtttttttaggttaagcccacatcttgtttggcccaggttaggtctttatttcactctagcaaacccaaacgttttgatttctttctcgtctttggagagtagctaccttccgagattagttgtgatggtcattgtttggttttggttttctctcccacaaagtttggcaaataggttagctcgttggttttatgttacaaatctgatctcaaaaagctttgggctaactccacttttgaagtgttttagagtcttgatgcccatgatccgtattgttatgtttctgtcaattacaacccctatagcaccctttaactttgttttggctggtcgtggactccacgctaacagagtaacagttcttttaggctgttttgatagatacttttgtcgaggtcatttgttaattttgtttcgaaccctatttgagactatcatcccaaacctttggcaatgtccaaaagagtgaagaagaacgccattatgatcccatctccacggagcggtggttaccgaagcttcttcaactctctacctccttacccgccaattaccaagctccttcaaggtatcttcaagtatacggataagttgcaaatctgtgaaagcttggcaaagagcggcgttatgatctaccctttattttctcccgtggagcaccttttcaaaggctcatatgcattgtttgcaatagccgtttatgaccacacgttggtcgaggatttcgcgaagcccgtcttcatggtcgaatccgccaaagcctcaacagatttttcaaaccttgtaaacttttttaaaagtgaacacctctttgcaaaactcatgaagcctctatcttcattttcttgtactatcttagttctaatttgtatgaacttccctttttttaggcttaagtgaatgaaaattattgtttgagaaaaaaaaaaaataagatgaggacccaaaagctcatagttcgtcatctgtaacatgctgcatttttcaggcaaagcaatccgactaaaatcaaggagatgtggaggggagaagcttccgcctgataccaacggtaagagctccacatgcggtgtagcgatgcagagtagaaaagggagatctacggcgaagaacgagagagacaagtagatagatctgagaccgaaaattgtggcggttccacgagatctttgtcgatgggggaggtatatttgatccggcaaagcgaagccaacgtcgaaggtctctgttttctattccctactattttctctctttcatgactgagcaaggatctcttcaacaaaaacgagatcggctctcttcctccttctcaaaacaactctacagtggcggcatggcaacaaattttggatcaccatctcgtttggctgtcctatttcagcgagaatctgcagttttggacggcggctcgatcatgttttttgattgagattagggttttcaatcttggttagttaaattcggtttgtaaatttgagatggctttagttttgagctgctttgtttattgtattgaagtttgtggattgggtttttgcgattttgtatatgctctatctagaaatagcccattagacattatatataacaaaaaaaaaacatgaaaaacactagaaatcatacaatcaaatccgcatacctgaaacttaaaagactggcacattcgctaataatgaaacatgcatcaatggtctctcaagagtcatattatttgcataagttgatttgtccctgcaaattccaatacaaagccttgtggacttaattaagataatagatgtgaaaattcaaacacatgaatctgtttaaaagacaaaataaacgtggcattatatcaaacatcttgtaatttcatatacataaatatcaaattgatatttccctctctttgagaactgtccttacgaattcgtttctaaataacatgttttagatcctaactgtttgtgttcttatgtgatggttttttagggaccggtaggtacaacgtgactcattcttgtgagaatccaagttttgaactatgatttaaagtcacaatatatggttaccatctcaaattttatgtagagtgcaactttttcttgaattggcgtgtgtttggtcttctcgaacttgcttctaacgctatttcaaacttggaaaattttgattttcactctttatcatcttgtttgttcaatgagattagccgttttgtttgtatattgggtgtgtccaattatgctcttttcttatgttattgtttatgaataacttgttgaacattttacttatcaattcactccaatatatcctaaaattgggatatgctcaaatcacatctagatctcatgattcatatttctataccattctttcgattttgatcttgtttctgtctacacctcctgtaaaatatattttttacacaaaatgtatttaaaacccattatacaaaataataaactccagtaaagtgaagaattacaagtagaagaaaaaaaaaagacatctcgtacaaagtcagaattgagagagccctaaacacaaggaaaaaaacaagaacaacaagaaaaagtccactttgtttggttttagacaaaaacagtaacttacttttttggtcaaactctgtagaaagaatcaatctcccttgtaaatctcaccctcctgtcaccatcttccctccgtcactttcccaatttaatttataatcagaaaccctacatatacacctaggtttagggtttcgctttttcagagaaaaatagtttctttttcttcaagttaaaaaaaaaaaattattaatctggtacgctacagtgcaccgaaatcccatagatgtataatactctgagccgttgatgaagctgacgcaaccgccacatgtctatcatcggcaacaatggcgtcaacttctcctactctctccctaatactgtacagatactctcctctctctacctcccacacgcgcattataccacctgcgcacattagcgcgtgcagtctattaacacaacccattactcttctctgcgccgctccactaacacggaactcacacaccgtttgttgcgtgttcacccttcgcacgctagcgtttcctctactgtccaatctaacgtacgcttcgtcgttggcatcgaagcctgtcactattagtcctctacgttgctcttcgtcttctccgatgatcactccttggtttcttagatcgatcaccatgattctccatctcgtgcatgctaccgccgtctcgttaccggagattctgagacggccaagggacgttgttagctctgttaacgtgtgccatcccatgacagcttcagggtcggtgagtgtaccaccgacgaatgttgtctcttcgctgttacagtcccatatgtgaaaggcacgacctggcacacccgcgaaaagaccgacccaccaacgtccacagccagtgaaatctaccaacgcaccgtcgttaactatatctcctgcgtaagccgtgcgtgtgtgaccaacaccgtctatttccgccacgtggatgtctccgtccatcgtagcgaacgtgagccttgagtcggagataacaatgcctgagacggctcgtgagaatctaccaaagcggtcacgtagaggtggccgtaaggtcctgacgtggagtcggttgtttaaaagaaaaagccggacggttccgtcggcgaaccctgcggctaagtagaggtctgagagggtgagacaacggcaagagagactatcaggctcgtccacatcagacgggtcaaattggagagtgaagtaggtgtgagtacgcgtccggaagtttctagccgtccgatgacggtagatgaactcgtcccgccacgtgtcgtgcatcaaatgtgttcttgcccaaacttggcgagatagtagttgccatagatggtcggagcgagagacagcgtgccacgtggtgcaaacctgcgattaagaaaaattattataagttttaacaaatattataattagtagcttaattaataaatgtataaataagggagagagtaaaaaaagacatagaaagaagataagtaggcctgcaacgaagcatgaaagactctatatatagggactaggaagatggaaagacaacgacagactcagacacaagctctgcgtaatatttgtcttactcatcgaaacacacaactcatttttataaaaatctattttatgacatatgttcaattgacgggactaatcaatctctggaagctatagatagagatataacaacagaagccctagtgtaaaaggaataatgagaggaagccctagtcccatgtcaaaagaacaaaaaacaaatcaatgtgacaataatacaaaacagatgatatgttaatttattaggacagatgagaagactttaaatgagttaagctgaacatgagattccgactttgccaacaagcgtgcccttctctctttcatttccaagaaaggatagcttttaagcctttggtcttgttaaaagtagagcttcccataaatacacaaatattacacttatatatagtagatgtttctctgtctctctcatccctctccaacaatccgtggacctacattctctacatttacgtttatattgttatttattgtacatctttattcctcattaaacgcaaagtaatgtatttgacttcgtactctagctctatagtacaacctaaaatcaaatatttcgaattctatacgaaaagaaaagatatcttgtcaaaccaaaggtttaatgtctattagtcagataatcattataaaaaaagaataatctaggcactagggcacgaaatgtaacataaaatagattagtacaacaaataacatatgatggaatggcaaatcctatttattattatgcaaattaccaatcacatcaatatgatatacttcaaataagaagggaaagaaagtagttcaaatattcctgagttctaagatgaccagattcagaatatcacttttgtattttaatgtgtgatatatcaaatgtaagaacatagtatataatctatagacaccactgcacgtgctctaagagacccttaacattgggttccatgtgcttttcggcatatgtatgcccataatgtcgtctcttttgactgaaaaaaattaaggaaagaaaaaaaaaagataaaaacccacttcaatggaaaagatgaatcgagtcaggaaaaaagataattccatgatcaatttcaaagtaaaaaacaacaatgaaaactctagacttatagccttaattctctgacaaaagtgttatgctgtaactacactgcagtttcttaaaattttagggcaaatttgaaaattcaattaattagaaaatattatgggatttaataatgatttagaattatcatgtatacatagagaagtgagataaaataagagaatgagaagttgtcagaagctctgcatgcattactcagtggatcataatattggcagagaaaaaaataacaaaagcaggacgcaaaaaatgtacatatgtacttatatactattcctcgttactatatatgagaaaaatcttcagcataatatatatatgtattatttgtttttttatgaacaaaagaaaaaacagctattttcatatataacataggattattaaaaagaataatatgaatgcctgatataatacatggatcatatatctgttgatgaatagagttttcatgtatgtagaaaataacctaatgtggtaatataggactaacattggcaaggcaaaaagacaggaccttacttaggtttcttttcattctctttttagatgttgttaaatgtgcaacgacattttctagttttatgagtctgtcgtgagaggtcactttctattattataattttaaaacaattagcagataaataccgttataattataattctaaaaaatattaaatctattgggcattggactaaagactgtgcctaatgtctatcaaccaatatttggagacaagaaagtgtttaatttgattattattgtaagaacttttgagtcaaaaagtggatttcttgatcttaaaaaagggctttctacatgccaagaaaggaagatttaaagccaataaaataaaataaaaccttgattttgtgccctaagggatccaattcataatataatattaatattagagttactatgcccaaatgttgtacaaagattacacaaacgagatggggttgtatggtctccttagaggatccaaaaatagacattaaaaggtatcaaaagtagacgagagaacaatgaaaaagaaataaacttattgggtaaaaatggaagacaaaaagtttctaaatacataaaagaaaaacaaagtccccaaactatatgatatgtgaaagagacatcaaattaatgtcgtcttgttagacataaaagttggacttggacccatcatagaaacacagaaagggcggttacctttccaaaggtcagtttttttttttttttgtctcttcagaatcccaaccttacaaactaatatcacattcaatcgaattgaagtaacatcatcacttaattatgatctaaagagtaagaattcgttataccaaaaagaattagaacggcagaatcaaatctaagcttagaaacaactaaagtacaagacacttgaaacaagcagtacatttgactagaccaagattgtgtccctccacttaagttattatagacccacgactactttgactttgttttgtctgcataagatctatgtctcactattttcaagttcaaatataagctaataaacgaattcagatagtgtaacgaaaatattactttactacctgaagtacatatatatatagagagacacgagataattgatgtgtctcgaccgttacaaaactaaaagaaggtattcaaagaacgttagaactgacccgaaaaacgttggcaagagccggagctgcggcgaggaggccggcggatgtggaagcgttaacggcaacttgaacggcgagagattcaagaaaaggctccggccaaacatcgttggctccgcggcgagggcgggatggagatggggcctcgaaaacgccgccgcttccaccggctccgttgtcggaagaagaggaggaggtagacatgagacgagaggggttataagaggaacaggggaagaagaagaagcggagagaggagaaagaatggtgggggagagaggaaacaaaggacaaaaagtgtagataaagacatacttctccgaggtgggggacccaggttgtgaaggtatgtttttttcctatttttattttcttttgtcaagatttgttattatttgtttttgtttattcttaatagatgcagatttgtttgtgaaatagcttcaattttatattttttaggaaaagtattggttcagtatggtgacatatttcaaaatttctttcttttgatatgcagattttgaattataatggcaatataacagctatattattataaatcactagatttatattttgacgattttttatatttaaaatagtgttatatatcattaagaattcaacaatatatttgctaagtttatttccttccgcgaacattagtaaattttttgtatatggtaaactattggctaaacacaaatatttgtagatcgatc

SEQ ID NO: 768 - DNA, 11026 bp, Arabidopsis thaliana
cattttaaaaatgagaaataaaataatatgtatacgcaaaaaatttgtcagagagatcaaactcgtagcaccaaatctcgactttcataccagtagtaaaaacttttaaagcatagtttaacatatttttttttcccaacatactattgtcattataagtaaataatttttggaaatctggttaagcatattcttatcattacaatcctcaaacctagaattcgccatattctgtcatcacaaaacttaaccctactttttctcatattgcagctatcacgatcctcaaaaccacggttcatcgtgaactttagtccaaactcatcacaaaccaacacatgagcatgcgatgcttttaagtttattcctcaatctaaatatagaaatatttacattttctgaaaattattcatatatatagtgcttttatataattacaattaacatttttgattagtattttttagttaaaacatttttattcttttttaattaaaaataattaacgaaataatgatgaatcacgttattaagagagaaaaaaaaataaagccacattattaacgtcactaagaggaacattttggttttcctcccagacattgttcatcttgggaaaaaaaaatgtcttctcttttactaggtgtttatccgaaaacgaagaaaacctatttctcgtggctattctctctttctctcgtctcttccgcccgaaacttttaacgtcgttgtcatcgagtcacatttcgtctcaactcaacttgtttcgatatgtgtcaaatctttatttcgatttttccgacaataatcagacatctaagttcaatagcaagtgattcccatgattaaaaccattttctaaaaccactgttatgatattgatggtttttatcgacgcttattacggctgatttttgccgtcgatttacatatggtggctgatttgttatttctattcgatttgatggctgagttattgtatgctttaggactgatttatgatttattaatgcatatgtggttgagtttgttttgtgttgtggcttggttactgtatgttttatgactgatttatgatttatcaatgcatatgtggctaggtttgttttatgttgtggatgagttattgtatgtttgactgagttatgatttatcaatgcatctgtggctaaatttgttttatgttgtggctgagttaatgtatggttatggctgatttatggtttattagatggctaaggttatttctgaagaacaagcaaaggattaccctctaagaatttacgcagaaggagagtctaatctagagaataaactcattaatcacaatatcaagatgacatatttctatgggatttagagaattagtatgataagatgtgtgggatcaaatgaaggaggcacctattggaataattactaagttatcgaatagtcaattcgtgtggtctcgtaagactgtacattttctattaagtagacagttaataatacttttgaaggagatttggtgtctcgttggttaatgctataaagatgttgaggcctattggaaagtcgtacaccatcagtggtatggttttcatgttacaggcttgggcatatgattcagtcaaatgctttggagagcgatataggaacgtagtcaataaggatgaaatatcgttgcttagatggggtggaaaccgtacacgtacaacaatggaatttgatgtaggtcaaattgctctaagtttactccctcaaataagagatcgtcgttagtacttaagggtaaaattccacaaaactcttttgttcacacaataggctaaagtatcaaaatcaagctagatagatgataagaaaataaaaagaaagcaagtaagtagatagtggattgtgaagttgtaagacaagataataaaaacgttaggtttagggtattctcaggaaatagatgataagagatatagaaatagctaggatgttatcgaatcgttcttaaactcaaaccctaattacagaataagcggtggttcgccgtgctactcaatatgcctagggctaaagattcccagcggtcgcttggcaaatccctatattaagacatgcatgataaacgagtttgataagttcacctaaatagataggccgattcttatttcacatctataaacttggctcatcaaatagtatttctggtaacatatacctttttgggcatacctattatttaagattaagttctaattagttactctagaactagcattaagaataaccaaagatgaaaaatcctacatatatcctagcaggtgaacaatctactaaatcatctaaatccctaatgagaaaccctaaccctaacaagtagactactcatacatgatggatgaaacaaacaacatttatgaatgagaaagcataaacaaaatcaataagaagaaagagttagaaaatatctcttcggtattattgaaatctctgataaaactcagaaaaatgaatccaatgtataaatagcttataaaatgctttagaacaagttaggtggctaaaaacttgttaggtcacaacaatgaccttaaaactatatatatatatatatatatatatatatataacctaaaaacgtgtaggttacattattagggcgcaactggtgtcgatcgacaccaagagtgtgtcgatcgacactctcgacttgatctgaaactaaattcgtcatttggcttagtttctttagcatttgctccaaattgtctccttaactccattcttgtcccaatccaaagaataccttaaaagactctaaaaggactctaaaacctatatttaaatcatagttaatgttggtgtcggatcccgcatcatgggctcggatccggccaaagattgctacgtgggtaaaagaagcccataagagaaaggcccataaacgtcctcgaggtgagagtatggatgaggtgttgagttgcgaagtgaatacatcatcgaagtcaagactacccggattgaagaggccgaatgggccgaaaggtgaagtcaagaaaagctcggagtggattcaagttccaacgttcaaatagttaattcgaaggctagaaacggacacatttaagatagaatgattgtgagtaaataggtattaaatgtattctttgggtataaattgtgggtcaaagaccatgtaaagacagacgcatttcttggtgcaaattagctatacacactcttttacaatactcatagttttctctatagtcacttgtctattttctagtatatttgtcctcaagaataatccttcccactaaataaataaatacttgagtgtgcgaatccgacatccacagttaaaaacagtaaaaatagggttatatcagaatcgaccattgctaaagatatctaagtgcatggtgagataaggttttggctgtgttgtgatagttactgattgagttatgatttgaaatggctgatttatggtttgtgatggctgatttatattttatgatggatgatttatggtttgtgatggctaagttatattagtgatggtttagttttgatttattgatatttgagttatattttagtgatggcttagttatggtttagtgatggttgagttatggtttagtgatgtctaagttataattattgatgatagagtttaaactaactaatgtgttttattttgttatagttgcgtgtgagtaaaatggttatgaaggatgatgtaagagagttatttcatacgtggccaaatcaagtagaagacccaacacttgatcacttgatcgaaaacatacatgagaataagtttgttaaaggttatagggatgtgaagagaaatgagaagaagaacaaacatgtaaatggtaaagtagcggttgagtctgaatctcacgcaaagaagcagaaagtctcccacagtgagggtggtgaatattatgaaggacatgcacaaaggaagaagaagaaagaaagaagcaaaggtagtgatttgtgaacaaaagtgaggctggtgaatctggtgaaggagatgcacaaaagatgaagaagaagaagaaagaagctaaggtaagttatatggtctatggtgagtttatattttatgtaatgtttggctagcttgttagtgtttgtttttttgtatgtattgcatggtgttagtgaggaggatgatgttctcgaagatgtgttggttagagcagtcgtggatatggtgtccaaattaacttcaagttttaacactgttgatacaagcattagagaaatgtcttcaaatctagagaaggtgattggagatagagtggaagcgaagatggatgcaaagttggaaagcggatttggatatattgatagtgagttcaaacagaagaaagagcatttgaatgtcatggccatgggggtagagcaaactgaccaaaaagctaatgattacgagaactcagaattcaaaattacagatctactcagtatttagaagcagcgagatcagctactatgacaacaacaacaacaaaaaacaccaaaaggttcaagaaaacctcgacaaaactactatgttactagtcctcctcatgtaagctaatagtgcaacacatatgtttgaattataaatacattgcggctgattaataattttcttatttacttacggctgagttatcattatcttatgactgagttatcataatgtttatacaggcgaaggatattgtcgatgtagtagagaaggataatggtattgatgaggtcaataagaatatggataaaaaatttgtgaaggccattgatggggtcaataagaatatggataaagaatttgttaaggccattgatgaaaaacgatggtgatattggtttcattgagaagtctcttggttataggaaattacgccctacgacgaggagaaataacaaagagaatgaagaggtaaagaagaaatccgtcaaagagcaaatcatcaaagagccaaccgtgaaaggtaagagaggtagaaaacctgtagaggcgaaaaagttgaccatataactacatcctgctcttgttattaatgagaagggagaagctgatgaaacaaaattacctgctcttaatgtgaagagagagtgttgttgtctccaaaaaagctgaggaagtcactgacaatgatggttagaaggaaggtgacagtgacgtatgagatgtcacataccagtttatcggtgaaaacggaagcacgttccctgagtctgatgatgatgaggattgatataatcgaagctttaaagacgcagagtattaagctgtctacggatggtagtgcattgaatccactctttaatctctcaacacgggtttttcctaatactggagacaacagactgaagtgcatgaggaagaattgtgtgccttcagctggaatatatgatcctctatcaccggctgatacagccaaattgtagaaacttaaggattacttatccccattctagtatgaccctttataccttattaagttgttaattacaacttgttaacattatttctgtatattaacttgtgtttatttgttaggaatctcccattgggcagggcaacaaacgatgttgatttctacagggttatcatctccgaaagaaagcactgaccaaccagagaatatggatggttgttcgatagtgtaagtattacattagcagagttattagtgtgttttgtcagagttttactacattatggctgagttattggtgtgttatgctacattatggctgagttattagtgtgttttgtctaagttatgttatattgtgtctgggttattattttgttttgtctgagttttttttttgtacaacatgtggctgcgttatatagagtcctcaggaataggtacaagcgaaatctctgcccattccacaacaaacgcattgcatttctagacacgtgattcgtgtctttttgggttagagagtatgtacagtgcaaaatataaaagaagatgtttaaattcaaagacaccccgtatgaaaagatagttaatggtttgcttccagataatcaacagacaaatatgaagtgaatagaagatgtgaatcacttgtatttgattccccaaaccagaggcgatcactaggtggcactacacatggaccagattaaggggcacattgattgctatgatatcattgtgggataagttacaagaaactgaatagaattgattagaatgttgtaggccgtttacgagaatgattccagcaatgatgaacgtgctaattcctactacaatcggtgaacataggtttgagcagtttacattcaaaaggagtagtgtctccagggtccctcaaaacgtacaagttggagctgcggcgtgtactcgtgttaattttttgaatgtctaacgcttggtataactttcaatgacatatgtgatttcaacctatacaggttaagatggcagcatatatctacaataaggcacctaatctgcttggacagtttaggattttgacttgggataattatattaacttttgaatcgtatttttttcaacaatccataagaccaatgaattttgttttctttataatggtttgatttcaaactaattttcatatcttggcattttcagataattaaattggaattttacattacaattattcttctcatagaatcaaaatgataaatctatattaaatatgttactatattccaaacttttttggtttagttttatggacttactatattgtgcataactcaaattaaattaagacattttcacttgggatcactatattaatttttgaaccgtatttttttcaacaaactataaggccaatgaattttgttttcttgtaatggtttgattttaaactaattttcatatcttggcctttttagataattttatattagaactattcttctcataaaatccaaatgataaatctaaattaaatatattgcaaatcttccgaacttttgtttggtttagttttatagacttgctatattatgcataactcaaattacatttaaaaactccatttgtcaaacattaggttttaacaaatacctccataatccccatgtggctttctagtacaattatttgtcaaacctacgatctatcttcattttagaatttctgagatttctctcacagcctataaatcaagtacaacattaggtttatagcatgatctccaacattaagaataatcaagtttttaccatttgttgttatttccaacttaacatgatcaaaactaaatgcgtggagtctttatgtcctcgacataacattatgtaaatactttttgactaaaaatagtaccattcacccttctaactctatgtcaatttgactacaaaaacattttgacaaaaaaatgaacgattacaaattacactgatggaaaatatacttagtcgaataaccaccaacggttgaatgtaaatgtggagttccaattattaatcatttttttcggcactcaattcacgaatgtgaatcaccactaacgcatctaggaatatatatagtaaggtatacaacttattttttaatcaaaacaaaaaaatatttgtagatttttgggacctttggttttccttaaaatagataagggaatattggaggatagatatgaatctatatgaattagaatttaaggtcttaaatccctttgtgataaggtttgggatacctatattttaggatctgtgtttatctcctgtggaaactctcttgtataaatacgaacgtgagttcatcaataaaagcaagtcactttgataaccaattctacatggtatcaaagagctgagatcatcaaaatcatcttcaaaaattttgtgttcttaagttaagaattcttaaattgtttcctttctctgttgagttgatagtcttgtgtgtcaagtaacaatgacaaacccaacgtctggtgatggatctttgtcaaccatgtcgagttctatcggaaaacaaccagaggtggtgacgtcggcggtgacagtgtcaccgttcactctttctagctccgataatccgggggctatgattccatcggtcatgttgactggtgacaactacaattcttggtcgacagagatgctaaacgctcttcaagccaaacgaaagacgggtatcattaacggtgcaatacgtaaaccacctgctgatgatcaaaatttcgaaaattggacagcggtgaattctatgatagttggatggatccgagcttccatcgaaccaaaggtgaaatccaccgtgactttcatctcagatgctcatcaattgtggattgatttgaagcaaagattttctgtgggcaacaaagtgcgtattcatcaactcatagcacagctcgcgacatgccgtcaagatggacaatctgttttagattactatggacggttgagttcgttgtgggaagaataccaaatttacaaacccatcactacgtgtacgtgtggtttgtgcacttgtggtgccacatgacaaccatccaaagaacgagaagaagagaagattcatcaatttgtgttgggacttgatgaatctaggtttggaggagttagtaccaatatcatatctatggatcctcttccaactcttggtgaagtatattcgagaatcataagagaggagcattcttctcgcaacaacgagcaacatcgagagtcagttggtctgtttactcgacatgaccagtctgcttcagatgtcgctgcctactttgggaaatcagatgtgactgctttaaacagacctgaatcctcaatcatcaaaccccgagattgtaacgtgctctgttcgcattgtggacgagctgggcatgaaaaacaggagtgttggcagatcgtggggtttcctgattggtggaaggaacgagaacgtcttcaaaaggctagtggtcgtggaggaggaggacgaggagcaggacgaggaagaggacaagcttttacagctcatgccacaagctcacattcctctgtttttcctgactttacaccggaacaaataaaggttcttcaacaaatggtcaccgaaaaatcaagcaccaataacgtcgacaagttgtcgggtaagagagctcttggtaatgtgatacttgatacaggggcttctcaccacatgacgggaaacctttctctataacataacatcaaaaatatttcgccatgttcggtgggattcgcagatggaagtaacacatttgccttgagtatgggagtgttcccattgtctgacacggtttcgttaaccgatgtcctatacgtaccatctttaaattgcacacttatctcagttgctaagttcataaaacaaaccaagtgtgtagctttgtttactgagaccttgtgcgttttgcgggaccaattttcgaagactttgattggaagcggtgaagagcgtgatggggtttactactttacggatgttgtttcaccaaagatacatagcgtggatgttgtttctgacaaagcgttgtggcatcggcgattgggacatccatcattttctgttctttcaactttgcctatgtttctagttcttcgaaatctgctactccaagtccttgtgacatttgttttagagctaagcagactagagaggtttttccagagagttttaataaagcaaacgattgtttttctttaatacattgcgatgtttgggggccttatcgggttccatcttcatgtggagcagtttacttcttgactattgttgacgattattcaagagcgatgtggacatatctgcttcttcaaaagtcagaggtacgaaatgtgttgacaaacttcattgcatatgcagagaaacaatttggaaaaacaataaaaatcgttaggagtgacaacgggactgaatttatgtgcctctcttctcactttaagcagcagggtatcatacatcaaacatcttgtgttgcgacgccacagcagaatggtagagttgagagaaaacatcgccacattcttaatgttgctagggcattgttgttccaagctagcttacctatcaagttttggggagaagcaattcttactgcagcatatctcatcaattgcacacccttttcagttaacaatggtcgttccccatatgaaattctacacaacagcaagcctccctacgatcaactccgagtgtttggttcagcttgttatgttcatcgtatggctcgagacaaagataaatttggagaaagaagtagactttgcatttttgttggttatgcttatggaaagaagggatggaaggtttatgatttggagaaaaatgaatttttcatatctcgtgttgttattttccgggaagatgtttttccatatgcagctggtgatgttaattatgtgcatgtttcttcaatacaagtcattcctgatgaagactggctggtacctccgtctatagttgtaagggggagctcagagtctcaaatcgactctgttccagcaactcaagcggctcctcaaatcgactctgttccagcaactcaagcggctcctcaaatcgactctgttccagcaactttagcggctcctcaaaacgactctgttccagcaagtccggttttgcttgaaaaatccacgagttcgtctcctgttacaattacaccaccagcttctccgaaaataagaacatcgtcttcttcaccaacactagcgccacttgttgatgttttaaaacctgcagattcgcctcatcctattgtggaattgcgtcgaagcaaacgagaacgacaggaatctgttagactcaaagattatgtggctcataaagtagtatgttcttcagaaacccatcacgctctgcccatcactgcctctccatcattgtcttcgtcaacggtctaaggtacgttttcatctgaatatgagtctctgtattcgttaacagattttatctcggatgaacaattctcactaggacatcgtgcgtttttggctaccattacaaaatcggttgagcctaagcatttcaaggaagctgttcaaataaaagtttggaatgatgctat

SEQ ID NO: 769 - DNA, 82035 bp, Arabidopsis thaliana
gatcaaggaagttgatgctcttgaaattaacaagacgtgggatttggttgagcttcctcgcggaaaaattgcacttggaagtcagtggatttacaagacgaaatacaactcggatggtacgatagaacggtataaagctcgtctagtagtcctgggtaataatcagatcgagggagaggattacaaagaaacttccgcccctgtcgtgaaaatgactacggtttgtgctcttcttcgactcgttgctgctaatcaatgggaggtataccaaatggatgtccataatgcatttctccacggagacttggaagaagaggtatacatgaaactccctccaggcttccgtcattcacaccccgataaagtttgtcgacttaaaaagtctctatacggactttaacaggctccacgttgttggttcaagaagttgtctgattcgttacttcgattcgggtttgttcaatcatatgatgactactctttattctcttacactcgtgaaggtatggagatccgagttttgatatatgtcgacgatctcctcatttgcgggaatgataattatatgcttcaaaagtttaaagaatatttgagtcgttgctttgcaatgaaagacttggggaaactcaaatattttttggggatagaggtgagaagaggaccagagggtatttttctgtcacagcgcaagtatgctttggatattgtggcggattgtggaactctcagtgctacagctgctgcaactcctcttgaacaaaaccatcacttagctgatgacgatggtcccttactggctgaaccaaagaagtatcgaaggctggtaggacgcttgatctatctcactcacacacgacccgagttaagctattcgatacacgttttatttcaattcatgcaagttccacgtgaggctcattgggatgctgctcttcgtgtcgctcgttatctaaagggagctcctggtaaaggcattttgctcaaagctaatccggatcttactcttactgtctactgcgattcagattataattcttgtcctctaacaaggcgctctttgagtgcttttgttgttttgcttggtggctctcctatttcttggagaacaaagaaacaagacactgtctctcactcttccgctgaagctgagtatcgcgcaatgtttgtcgctctccgtgagataaaatgacttcgaaaactcttgacaggattgggtatcaaactcactgcgccagctcgtttcttttgtgatagttaggctgtgattcacattgcggcaaacccaatgttccacgaacgcaccaagcacatcgaatcagactgtcactttgtccgagatgctgtccgagatggacttatcactacttgtcatattggcactacggaacagctagcagatgtcttaaccaaggcccttggacgtgttcaatttcttaccttaatgtccaagttgggcattcaagaccaccatgctccaacttgagggggagtattggaggatagatatgaatctatatgaattagaatttatggttttaaatccctttgtgataaggtttgggatacctatattttaggatctgtgtttatctcctgtggagctctcttgtatgaatacgaacgtgagttcatcaataaaagcaagccatgataaccaattctacagggaattttaataaaatgtcaaatctctcaaattcattttgttttgtgggtacttgaattcagcaaacgatttgtcatttaaaaaaaaaatcctaagcaatcaaaatttatggtttttagctaatttgatttgcgtggcaacattgtatttaccgattctgtgcaaatttgacttaggccttgtgaaaccccaaacaaataggatggcaaataatgacaagaaaacctcattttgctgtatgattgatacatttattttgcaaatgtctttgtagtcaaacccgaccatacaactaaatataaaatttgattggatcagaaaccatatattctctcgctggactcttgtaagaaaactaaagataatctaatacgattcaggtgaaaaaaactaacatcacattatttttgtataagttaatattgaactatatatatatatatatatatatatatatataatccttttacaaaaaatatattttatatatatatatatatatatatatatatatataaatctaaagaagaaaaacacatgcctcttttctcgaaatatagatgagtgttgccataaaacaaatatgcaaataagtatgtacaaacttaagtattttttaccaaaaaaaacataagttttttggtcaattatttataataaaagattttctagttcatatcattgtggaggatgggctttaaaaagtattaaaaagatatttaagaaatgaaaaataaatggcagtagaaaaaaagaaaaaagaaaaataaatgatggcaaatatatctaatgaagaggaggatttaacaagatttatgaaaaactataaaacgttatatagtgtgtaaaaaggtaataaataagtaatttttaaaattagtgaaatttataataataatttttaaaattaagattaaattctattataattataagaggataatataaatcaattcttaagaaattatcagaattggcaatggattctgtgtattataattataagaggataatatgattcatttagattcagtcagcgactctaaaaaattatactttacaacaacataataaatcataagaattggcaatggattctgtctaccgaaagatgtggggtgaattcatatgacgaaataagtggtgcaatttcgtaataatcgaaagatatggggactaaatcttaaatagaaacgttaacttgatcacaacggctataattagttactaatcacagtaattaaaccactaaactcaaaagaaaaatggaaacaacaaaaagccctaccctctttccttaaagagaaggcaacttttttctgcattattcgatcagcggctctccatctttctaatttccttgttcctcacgacttcattctcagagctttcgagtctttcggttccattacaatgactatgtacgatctcacggattcagggaaggatatgtgttcgagtctttgtttactggccgaagttgcggttatggttgcggaagaagaacaatttcgtcgtcttctaaagactgtctctaaagaagaagatagcgacaagagtttcttctatcgtttcccgagaaaaatcagatcgtctttggtgaagagaagatacacgcagcaaaaccctaacggggcttctacttcttcagcggttctcgatctgaacctaatcaccactgattacgacttgaaaacccaacaaaaccctagttttgatgagccgttagttggtgtataatggggcttctgcgtcttcatcgttcttgaaccttcgttgttatgatccttcgttacccttggattacaacacggctaagttggggaagacagagaagaaaaacctaacaaaccctaattaccaatcttcatcttcgtcttcatgcctaacggagaacaaaagccgcaagaggcgtgccgtgcagcagaggaagagtggtaaactcaagaaagcgagggttgtttctttgccaaggatgtctatagagacgccagagtgggttttccaggtgatgagatacatgaacgctgatgctgaaaccccgaggctgatatttgagaggactctgttcaatagtgatgtcaaatcaggcctgagccgtctcttaatccctttccagcagctaatcagaaacgacttcttgacgcctgcggagtgtagagccatacagaaagacgaagacaacgaagatgacaagaatattggtgtgggaacgattcttgtgaaccaaagatctaaaatgtggggtttgcgtttcaagatatgggcgatggagaaggactctggacacggaacattgaattacattttgaattggggttggaacgatgtagtcaaaggtaacggcttaaaggctggcgacaatatcagtctttggactttcaggtgccgtggagtcctctgctttcctcttgagacatagtagctctctgatattttcatttgtctcttgaggtttcatttatatagtttcaagtgattcttgaggtttttgcctttttagcatagtagtaacttgttggaagtgttaagtaacttgtctgtctcctctgttgtctcagttctttatcattgtttgaaaataaactattttgtcataagtatggtttgttgttttgtctacttaagttactgcattgttcaatatacctttgtgttatctcagatctctcctctaaacctgttgcaatgatggaaatggtctattcctgcaagagttttggtacattcctccgaaatgctcgatttagaaccaaaaacaatcaaaaaatgtcagagaaaaagcaagttttggtaacaaggatttatctacgcattgataatatcgacaagttagtttactcatattaacaccaaatcatattgtttctgtcgaaagcttaagcttctccaagatctccccatctcacattgtacttagatgcaaggtaatgtgcaccaacaggacctctgcttccatatggatagagctcaggaatgattttcttctcctctagttccttcaaagccggtgtgaatagatcccatgctgcatctagctcatcacttctgataaacaacctcctctctccttcgattgcatcgagaagcagtctttcatatgcatctggtatctctcttggatacctatcaaccccaaaagaatataaataaataatctctataggaaaactagaatcagtagtatgcattgttgtacctggatcgatatagaaggttaaggtcgctgcgatctagtctcattccaagaccaggaactttgttgttgatcctcaggtatatcccttcatcaggctgaactctaatcactagttcatttgttgcattgtctaaattagtagcaaaacttttcttgtacaagtttcctgggacatgtctgaactgaactctgatctctgctcctctggtatggagagcttttccagctttcataagaaaaggaacaccgtcccatctcgcattgttgatgaacatggctgctgcagcaaatgtaggagtgagactgtgatttggaaccgttggatcgtctgtataacctggataagtttttcctcccttgttatggcctttgtattgaccaacaaccacatcttcaagccgcaacggtttcattgatctcaaaactttcaccttacaggaacacataatcatcggtatagtattttataaccaacctaaagcttttcttcttagtgaaaaaagtcttaccttttcacttcttatgtcctcagcatctaagctcactggcgtctccattgcaaaaagtgcaagtatttgcaagagatggttttgcatgatgtctcgtatgattccatattgatcaaagtaactgcatcgatttaacattagtaaggtgttcagtgtcatactgatcaaaggtgttcagtgttcatgctttgtaagttgtttatgaaagcttaccctccacgcccttctgttccgaaatcctcagaaaaaatcagctgaacgttgcgtatgtaatttcttgaccacagaggctcgaaaacaagatttgagaatcggagcactgaaaggttctcaacaagctcctttcccaaatagtgatcaatcctacgtatgtcacataacattgcagttaagttccagcttaaaaatgaatggcagtgatggctgttgggctaaggaaatggctaacctgaagatttgctcctctgtaagatactgtttcagacatctagttaactctccggatgattcagagtcacgaccaaatggcttttccacaatgacccttgtccagccattctctgaggaggctctaagacttgcacacctaaccacatcaacgaatatgtttgggggtatcgacaaatagtacagcctgtttgatatctttcctgcctacaaagcagaaaggaattagaaatgtgcttcgtgccattggtacaagaaataagcatagagagagtgaaagaaaattacctctttctctttgagcttcttgtttagttccgcaaaatcctcttccgagttatactgacccgaatggtaaaagcatcttttcaagaactgctccatcttatccccacatttttccctgttgattccaacttttgttcatataaccaaagcataaactttaactaaaacatacactaaaaacgtatagcagaatatacctctgatcaatccggcaagttaaagtactactaatcatgtcacgaagctcttcatgagtgagtttagtccgagcataaccaaaaacagaaaagtcctgaggaagacaaccctcataaaagagagcaaacaatgcaggaaatatcttcttcttggctaagtcccctgacgctccaacaactgtaatactaagagtagactctccttttgtaacatgttcctctgtaagttgatctccagctgaaacaatttggtaaaaaccatcctccaaagaatcaaaaacacaaacaaaagctacaaaactacttcaattcataaaaagagagactttatcaaccaaattgctaaaccaaaccctcactacctcacaatcactctaatctactacattcaatcctagaatactcaaagacataatccttagatgagaaatggtatccttgagtacaaaagatacaatcttgaactactttcttcaatcgtcaaaaacacagacagaggctacaaaactacttcagttcataaagaaagagactttattaaccaaattccaaaaccaaacccttactcattgctatctaaccaactcacaatcactctaatcttctacattcaatcctagaatactcaaagacataaactttacaatcaaagatggtatctttgagtataaaaggtcataaagatacaatcttgaacaactttcttcaatagacataaaactgttacaatcctaacaacacaatcaacgacaggtacaagaaacttcatcaagaattctatcaaaaactaatctagtcacatagaaactggagaagaaactcacaatcttgtaaagaagcgaaattagtggcacacccatttgaagtatcaagctgagaatgtttctcggcgaagaatctcaagcgaacctgagaaaacaaggattttctcgggaatgtgagagatctactaaagagtggtagagtctctttaaacggagacgcagcagtagcgagagacgaggaagaagaagaaggagaaggaatgatcatagaatgtgtcgccatgcaaattttcttggagcgtcaaaacaaatgtgatgatgatgatgatgccattgttttttgccttatgaggctatttgtatcgtctcttacattatccacaacagtagttttattatatagttttcgatatttcttatctctcacattatccacatatcttatttgtcaaaaaagttttatttttctttgcataaattctttttttctcaagaaagtaaaccgtattaacatccatctctggtatagcttaaccggattattccattcgaacgaccacaattcgctggaaaggtgattttggtttagcagtaaatttcatactttattcattttagtactctcttatgcacactttattaatttactaggtgaatatccgggatttttcgtaaatgttttacttataacaacaacaaaggaaagttgttttatgttatctctttctagcctttttggctttttctaaatatactgcataagctgacttctctgattaacaaagactccaatttagcatgatgaataatgagcatcatttatacaaatattatttctaagattctattttcacctaatttaaccacattttgtagaattacttacaataaaaatttaaaaaacctattcattttgtttaaaatattttacttaattaaaattttatcattaatctttctgtcatttactttttgagtattattgatttttataaatcatatcaaaaaagttcaaaatatttttaatctaaaaaaaacaaagtataagaaaaattttaatgcctaaaacttatgaatacttaaactttttcacatttatttaactactttaactatcttaaaattacatacaaacttattaaatagtacacatgcttgacgacattaaaatatattctcctactaaatatacaacaatcacccaaaataataaaacacaggttgaatcctagtcattatttagaatgatcatctcttgtgtcccttttgtgggacaactaatctgcaaaaccactttagagtcttcctatctcctttgagttaatgaattgtgttaagacgaatttacccctgtattttattttgaatgaataattaatatttctagaaaacattttgaaaaaaaaaaaaacggaaaaaaaaaaaaagctcgagctcgttcttcttcgggcttcttcctccggcgagccgcattgtcgtttttctcctcctgcaagctgcatcaatctactaagtccaggtatggagagagcttcaaaagctttgaattacatattttgaggattttgaaattcaatcaaattagatttggattattgtgttttagcacctacattagaagtttaagtatagatttaggcttcatttggtctgttaatgggtaagcaattgatttcacatgctgattcatactaaattgaactcaaatcgaatatttgttcttgtcgcgaaaataatactggtcgcactaactatagtagtaccgtaatttatatagatagtatgttttaatagcaccaatattacttagacacgtagtatttcatatatgtaatagtattactcacacatgtaatatttcagaattagtaatagtattactgaaaatgtactagaatcgataatactagtaatattgactgagtatgtgtattgttttggcaggttacaatgaaagagaacgtgatcatatattttaaattccaaggtcgcatgtataatgtgatgatgaagacattaggggagaagattactctctcaatgttagaagataggataatgacgaagcttggattagatgcaaataaggtaaaattgcatatgaggtacaatccacggttgttcggagtagaggaagaaatgaacgtttgtgatgatgaggatgtctttgtttatgtaacatccgcaaaaaataactgaagaagtgttttggttgtggaggagatctctaaaccgcccgagccggagcaattgcccgagcaattgtctagagttggtaaaagttctgttggtaagaactatacagaggaggatgaaatgagagtggatgatggtgcactcatcgtcttattagaagaggaacaaggaactcaacatcaacttgaggcaatagtggaggatcacgggactcaacatcaacttgaggcaatagtggaggatcacggaactcaacatcaacttgaggcaatagtggaggatcacgagactcaagaagatgaaacacgctatgatgagtctatggatgattctgataggggggaacagtatgttgagtcgccacctgttgtagaaccgggtatgtttaagaaagaatgggaagacggaattgggttgaccttacgtcaagaatttccaaacaaggcggcattgcacgaggtggtggatagagctgtatttgctaccatttttggttatgtgattaagaagtcggataaggagcgctatgtcctaaagtgtgccaaagagagctgttcttggcgtttacgagcgtccaatatcagtaatattgatatattctcgattagaaggtataataagatgcatagttgcactcggctaagtaaaggtagtagtaggctcaggaaaaaaaaaggcaacccacaattagtcgcagctctccttcatgatcatttttcgggacagttggaaactccggttccaagaattatcatggagctagttcagacgaaattaggtgtgaaagtatcatactcgacagcgctaagggggaaatatcatgcgatttatgatttaaaaggtagcccggaaaaaagctacaaggatatcaattgttatttatacatgttgaagaaggtaaatgatggtacagttacttatctgaaattggatgagaatgataaatttcagtacatattcgtagctttgggagctagcattgaaggttttagagtgatgaggaaagttttaattgtggatgcaacacatttgaagaacggatatggcggagtgctagtgtttgcctcggctcaagatcctaaccgtcaccattacatcatagcgtttgccgtactcgacggtgagaatgatgctagttgggagtggtttttcgagaagctaaaaacggttgtacccgatacttcagaattggttttcatgacggacagaaatgcaagcctcataaaggccatacggaacgtgtataccgcggctcatcacgggtattgtatttggcatttgtcccaaaatgtgaaaggtcatgctactcacaccaaccgagatgtactcgcatggaagtttcaggagttaagtcgggtctacgtcgtggcagacttcaaccgagcgtatgacgggtttaagttgagatatcctaaggcgaccaagtatttggaggatacaaccgtgaaagaaaaatgggcaaggtgttgttttcccggagaaagatacaacttagacacaagcaattgtgtggaatctttgaacaatgtgtttaaaaacgcaaggaaatactcgttaataccaatgcttgatgcgatcatcaaaaaaatctccgtttggtttaatgaacatcggatggaagccgcgtctggatccttagaaaataagatggtgcctttggtcgagaattatttgcatgatttgtgggtttttgccgagaagctaaaagtggtggaactaaactcattcgagcgtgaatatgtagtcacatgcgacaaaggaatagattatacggtgagcttgcttttgaaaacttgcagttgcaaggttttcgatatccaaaaatatccttgtattcatgcattagccgctttcattaacattatggatgatgaagatcggagaagaggtttggagtaacatgatttggttacaaaatattattgggcggagttgtgggcattggcctattataggactatttatcttgttccggataggtcgcagtgggaagtaccagatgaagtaaaggcgttgaagatagttccgctgtctaaaaaaccgaagaaaggaagcaaaaaaatgctaaggtttccatcaaccggggaaaagcggccaaaacgacaaaggacgcaaaacaaaaggcgtccaaggcaatcgtgtcaatggttattatttgggaatacgcctatctgagttttttactttgtttttgcagtgatttgttgtttttatggtatggacttactatgtaatactgtatttccccttctatagtactatgtctgtttctattgtttttttgtaatactggttataacaagtaatatcatgtctgtttctgtcgaatttgtggtcatattagtactactggtaatactaagttggtgttatggagttcgaatttgtttacctcaaaagtcaatgaaaatgaatacagtgagttattaacagataaaaatgtattattaatcatttatacttaattaaattagaaattttaatattaaatcgttttaacttatctttagtagactcaatacaacatttcccttatacttttaagctcacttttaatattatcaccaacttaaaatgaaaaattcatattgctacatatatttaatttataattacacaaaatatttaaacctctatatttataaagttcaatccagtgtactactaaataaataaattataaatataggaaatactgctaaacatgaaaaacatggaaagtaatactatttgagaaattggcactaccaaaaccttaggaaatactatgctgtaaaaaggctgcgcacatgtcaaaaatctccaaaaaacggcgcacacgtgggaaattaatttttttggttttcctccaaattttttggcgcctaacaaattttgagattccctccaaaaccaaaaatttaacttttttctttttcctctttctttttcgatctcttcttacaactttctttcatctctcatctctcttctcccacatctatcatctctctcttcgactcgaattctctcacatctctaatctctctttcatctttctaccatggatagactgtgtgagagagacccctactacgttgatataaaagtggcgaagagagccattgagcaaatggaaatggttgcgatgatggaagggattcctaagttttgtccatgtggtggtagcattgtcgacactcgaaaggatgaaaagagatactatcaatgcgagaagtttaaggtatgttgatgtagagcacaagtatttcaagtttgtgtagatctagatctagatatatttggtattccagagtatttcccgttttggtaatactgcctagaacaagtaatactgcacaagtttttctagtttttgtagatctagatctatatttgataaatatttggtactttgtaggataatagaactgattgtatgcacatccgtaaactttgggataaggctatagaagaagaggtgagtagcttaagggagagtgttgattacaatcagaataaagttctaagtcatgagtatctcatagaagaaatgcaaaaagaattgaaagcccaccgtgcagagattgtgaacgtgagcaaagtggtattccgtaatcctatggctcccaagaagtaatgtgttatcctattgttccttaatcttattgttaatttgcttgtaagactttccctatgctttataagactttccgtatgctttgtaagactttcccttcgattgtaagacttctctttgattggtaatactatggttgttcagtttgatatttccagtatatctcttagtagtaatagcacgaggtatttcccgtattattgttaacaatatcataaaatatcctaatacattaattgaatccaaacatagtcttacgagtacttgcgaaatcctaaaacaaagtcaaagtacaagaaatcaaaatacaaatccggagaagttacacgaatagttttcacacgtcactagactttgcacgggttgaacggctcactcgtttgggcacaacaggagcagccgcattttccttgattgttgattcctcctcatctggtgggttctgagacatctgcattgttaatttagttaaaccttggtattacgcgatattaccaattatggaacagtatatccggtattacccagatttaccttggctttcatctcatccataaatgcttcgaacgttgcttgtttttcctccatttccataagcgccaacaaagcttcattcagcttgtcattgatggaatgaagcttctccattacatcaactaacgtcgggtctcccggtccaacagctgtgggaacttcctcttcatttggggcttccattcgtgcctgcacatcctcgttgtacacctcttcaaatctaatttaacgcccttgaccaagacgcttcatccaactatcaattacaacatcgtgcttatcaacatcatcctctactcccgtgatttcagccaaaagaggtacttcttcagccttctctctaattatactctcaatgacctatggaaataatagacaatgaaatattagaaagaaataaaatcatatttgctcaaggaataataggaaatactaacctcagttgttccgagtacatggttgatttgctcaagggtaaaccctttcatctcggtcctcttgaaattcaccttgcacatccttggacaaccggcatgtgcaccatctttttcttctatgaatctttccctaagtgatggaatggcctcaaatgctaaaagctacacaaaacacatgaaatttaattgttagcttcaattacgaaaatgtaacaaggataaacatgtgacttacctcaagcggcacacagaatccgggaacaggccatggtgactgagtgttcgggacgacaccgttaaaatgatccaatgtgtgtgagatcgattttaacatgtactcaaatgaatatctcccccatggaaatgtcttacaaaacgtaagatcacttgcagccctaacacagaaatcatcaattggactagccctttctccagtcttagtaggcacggcaatgatgcttgttagaaaatagaggaccgccatccgcaacctatcctttgatctagccggttccatctccattagcttggttttcacgtcttcacgtctaattaccccggttttgaagtacctgttggcgaagttcatattaccagcgctctgataattagctggatgggccttgcagttgaaactaaagatcaaagcatgctccctaataccatagcggatgggaactccattaacaacgaaccaaacctccttcttcttctcaatagatgccgtttgaagaaaaaacatccacatccccattaacttgtgggtatatccgaaaggcaggtggtagatgtgcttgaaactcggatgctccataaaataattcttctcaacatgcgttagaggatgttccaagtcagcgaaggtcttcaacacctccgagatataacacctcgttgctaacttcatcttcttggtatactccgacgccgggaagtacataccaagtggctgcattgccatcgcttcctccatatcctgaaaaaaaaaaacattcattcatatatcactcaattgtaaatagtactgcacagtattactctgtatttctcagaagtattccccgtaattaccagtattacacagatactcctattttactatgtagtatttctcaaagttactagtactaactatcgataaatcacaattatagtattactctaaggtattacccacatccgccaatattacctaaatatcaacatagcatttcccaatgttactagtactgtccacagttcacaattgcattattacccaattagatcggtattacgaaatggaatacttaccacatttgcgatgtcctcgtctatggtcctctcctccacgggttttgccactatcacgtccttgtctctctcgtcctcgtttccctcctcctccacggacttttccacattgacgtcctcgtcgctcgcggagctcctctcctcctcctcctcgataacggctaggccgtcatcttgtctctccacctcttccacgggattagcacacgcgagttctttgtttgtctccgtctcctctgaatcggaatcggagcccaaggttcggctactcttccctgattcttcttcttcacttgcttcttctttttcattttcatcttccacctcatcagtttgcatattctcttgaatttcttcagtaggaatatgcttcaaagcatcataaaacgtagaatcatcaagcatcgggctctctgtcgttggagccgtcgttggagccgttgtcgttggagccgctgtcgttggagccgcattggttgccatcgccgtcgcagtcgtttgtgccggcgcctgctcctcagccggcactttctctttatctttcttcgccgacgcctgaaccttcgctttcttcgccggcaccttctccttcactttctccgccgacgccttaactttctctttcttcatcggcgccgacgcttctatctcctttcttttccctacctcctccacgcgtcttaggcggcatgactgatttcgaatcggaaatagaacggaaatactggtgaaaggaagaagaacggtcgattgaatttaaagaaatatggaatgttgcggttaatttcagcggttactaaggagaagaagaagaaaaatcgaaaacggttgtaatgagaaaaagaatgaaattcgaataaagagtaaaggttccctaggccctggaaatattaggtttttttttggattttcaaataaagagtaaaggtggttcgggtggtttggttcggaaacgaaccatggtttttctggtaattaataggttcagatggggatatactagtaatatccatatatttcaaattaaaaaataaataaattatttttgttttttacaaggattttttggcttcctctttgaaaaaaagggactggccagacgaccatcataactacaacatatttataaacacaacaacaaaaatgaaacttgataatgttgtaatacgaacaagaatcgaagttattttcagcacattcttcgattttttttcctggaaaaccgaaaccaactcaacataacccattgaaacattttgtacctggcaggcacttggtagcaatgcctttgtgtgttttaagtctggtttgagaggaccactgtggaagaaatgtcttgggcagagttgaattgggtttgacctgaagaaagagaagaagagtcgttaaaaagagatctttggattttctttagttctttgacaacttccaccatcgttggaacttcttcactaggacccatgcatctcagtgacaacattcggaaagctttcatttgacaaagctcttcttcggaaatttgacccatcttttctatcatctttggatctgcaatctcttccattgatcggtcttcctttaatgttgacagcaaatttcgagcatgtcttttcatcttcctgtcaaatccaccttcactttcttcttcttcttctcctcgataatgctcgaaaaagctttcctaatagaagccttatacccataaacattccaaagccaaagacatctgttctctctgagactacgccactgctaatgtaattatcggcaaagtaactatagaatccctctgctgcctcaacctggacaaatgtgtctccttctggaattcagacgcagtgagaaaaatcagtcagcttcgcgaccccatcttcatccaataaaatattccaatgagacaaaatcctatatacaaagagcctagggaacgcagtgtgaaggtaagctaaagcagtagcaatatcttcaactatcttcattctccttttccatggatgttcacttatttctaatttgtaatgtttcttaacaccatgataaactttgactgaatcttcaaactcaagacaacatccaaccaatttcaaaaaggttttgtgaccactcaccatcgatgaaactgctatgtcgcggctcaaaagatctactttgaagagactcgacaagccaagatctttcttaatgagaatcatgggatggttctcgttcttacctgaataccagtggtagtaaaattcttttcgagaaacaagattagtcgctgaaattgttggtggcattgcggatctcatcaccagagaagaatttgatgggattggatttgccatggccgaattcgatgagctcttctaacaacttggcccctctcttggccactctaccggaaagaaagctttatttttcacataactcaaaatctaagaattaacggaaagaaagctttatttttcaatcaagtgagcaaaagtttcgagacgacctcacactttcttgataactaaattcttgttgagtgttgactattcaacacagatgtccttctgcgaaaatcagaaataaacattttaatggattttgtggaagttagagttggaagaattgatatcatcctattataataaatcaccagtcacttcccaaataactgcagctctatatatttgacacttgtcctaactcctaagtctcaaattctattattttactttcttttatatcctaatttatgacaattttattataataaatcacaaataacttctcaaagaattggctctatacctttaacacttgtcctaagtctcaatttctattattttaccttttttttttctttttatcccaatttacgacaataaaaaaaaaaaatgttattcttccccatcttctccacgatcactataatatccaagcaaacaaaatacaaaatttttaaatctcaaaactacaaattataattggttattttacaattggaacagccattcaagcatcttcaacgtctcctttaagtttttttaacaaaaattctcaatcacaaaaatcatcatcatcgtcaccaaataattttgcaaaataaattgttacactgatttgaccgcgtaaagcgcaggttattaaactagttttatgatattaaggtgattttctacgattttttggccatgctttagttatcaattcaaaattataaacggttgtcttttttttttaaccgttgttattaattgtttagtgaatggtcttcaaaagctcacacactcggctgggattagatcatcaattattactataaatcaatcgttaagattctcggttgctaccttttccaaattaagaaaatatgttccgtaaatttattcctcttctctttttaccaaatatttttcagctttactgatactgaggtaagcgatttttttcttatttgatatagcatctgtgtagtatatgctaaaagaatgacgattttaggctgtgttgtgtgattttaggattttattgtttgtgagttgagtctcatgtattaataaagttatgtgtatttattattaattctgttgtgtttattattaattgtattatgtgtttatatcatattgtatttaaaggctttttaaatgtacttcctccgtcccattaagatagatttttaaagaaaaaactgtcctacaaagatagacattttatgttttcaatacaaaatttagagtttttttcatatttttctcattcgtgagactggtcttctccattaactaaaagtacatattccaacattctccttcctccatgcaccgagattatataagtacaacattttgtgtcatcattttttttattttcaaaactaaaagaaaaatgtcttcttcttcaaattcattaagtctttgggaaacgtgaaaaaggaagaaaaaaacaaatgaagaaggaagaaacacatcgtgaagtttatatcaatcatgagctggacttgaaccaactttctatcgaaaccactatattaaccatgctcaagataatgtttccaaaatatttttaaatttgtgtaagttattttaagaatatggcgtaagccttttttttctttgtaagttggcttaagatttttgtagtcatgattttaattttctagttctaatacaatgatcatgataatgctatatttattcagatcttattgtaagattaatatttttggtttgaaatctaaaccttttatttcggagcatagaggcaaagcaaagaatattcttattgatatacattaacaatcatttcttttttcatgaactattcatttttttgtggtgatattgatcttgttttatgtgtgtgtatttttagatgttttgactattaaatattgtaagtcaaaaataaattctcataaaacaaaataataataataaattctaaaacaacagatacaatcattgaaataaactcgattgaccaaattcaattaggaaaaaaacaaacacacaaatctaaacataacatgttctaaaataataaacttgctaaaaattccattacacctctcaccaaaaatagatcacaagagatttgtataggtagacgaccttctctttccaatgaacccttcttcatatgtagaattttgtacttatttgagcctttggctttcatgatctctaacatgcaagattgcaaagttaaaaagatctgattcacctgtttgcggggtattcgtcaaatgatgtctctgccgccgacacaagttcttctaccgttgttggacatacattgtgttgtagtgattggatagcattaaaaaatccaagatccaatatattcaaatccggtgaattcagtggttgacacatcaagcgtatatcaaacccaaactgtgaagcaattgcttgaaattgtgcatctctcgtatccacatgcgttcttgcattatcttgttgaacgaaaatagttttcccaaaatcttctcttgaccacttttcgcgaatttttgagatcactttttcaatcaagcatctctttatatcctctctcttgatggagaccatcggtttcaattccaacattcccgcttctctatttatgcttcgtcgcttagacaatgaagcacaaaccaagcccgctagcaacttaaacccaagtaaaacttcattgggtgttgattgttaattattaggaattaattgttaaaatattataagatgtgttgtgtgatgttatgcgttaggttgttagcgtgatatacatgttgatttgcttgacgtctttaagacgtatttttaaataaaaatataaagataaataaaagagaataatgatattaaagaaaggataagattgaggatgttggactgtaatggaactgacgggtttattacaggtcattaatcgctgacgagcaatgagaggaaggatcgagctacgggccgtggtcttccataattaggcttgaggagccataagttaacgtatgttaaaaactaagaaaagaaagtaaaagatcttgcggtgagcaagacggaagcttgtctgttatagcttactaggaaagtttaagctatatgcttgttgtttgagtctatgcttatgaaatagaaattgtgtgaaagtataatcgtgttattgtgattcggtggacagttttgactgccttcactgaataattaattactcacccccttttcttttccctcaggtgaggaagagaatgttgagtagctgctcgcttggtgttatttcggggactttgggttttatttgatttatcgttatttcttatatttctaaacatggtttctttattcatttttatccaacgattttaatttatttatgctattattttgagacaatttatttctgattcttaataaaagaaagtttcccaaaattttgatattttatttcaagatttgttttgaagaaattgaataaatgaatggaaaggatgaaagtacgccgtctcaaggttgagagagacgggtattatagagggacacctctgaagacactttacaccaaatgagtagtcgtattcattatttataactaatatatttatatcaatattatgagatgtcatcagtagcggaggcagaatagttagtcataggagtcatatttttttctaagccaaatacaaaaaaaaaagttgagaaaaaatgacaatatcatagtttaaaaaaaaaaaaaaaaaaaaaaaaaaaaaaaagaagataaaatgagaaagaaaaaaattgttctggtaaagtaaacactaaaactaaggtaatttataatgtgttaaacaataataatgagattaacctagtttaatggacttatgtttttatttataaaattaattgggttaacatgctgtaggttttatttttttattagactatatttggatatatatatttgatgggggttaataatactttaggaaaagggtcaatctataaaaattaacaaaaaataaacatattttctaaaatccatggagtcaattgacctccatggttaaacactccctccgccactggatgtcattgataatttattttctaccataaaagttttgtaacaatttatagccacgaagactttcacgttttcgctcaattctcaatatttcagttttatattattctgattttgggtccaaatgaaatttaagatcacaatttatggtgttacaattgacttctaggtgtagttttcaaataaatttggaaagtgtttcacttaaataccaaagaaacgtacatgcatgatgttttgaattccttcttttatcaaacatgttcagcttgtcattaaattcattgaaaagttcacgtatccttttatgtatttaaagtttaatttatttaaaagtaaataagtaatgttaaaattgtcattatatattatctcttaaataacgtaaaatttctaaaaattcatatttgtgggacggaagaagtttttttttataataataattgtttttattttcttatttcaaaatttttactaagaacataaataactaaaaatagttattaaaaattatgtcaatttttgttaagttagtttaattatagttgatattttaacaatttatctacagttattattaatatgcaatcacaaaaatataaatatataaaaaaatataaaattgtaaaataattaagatagagtgttgaattttattaaacaaaactagtgtaatgttttaaaaagtaagtgggtgttgaatgataatgtggaagaaatagaaaatgatgtggagtcttaaaaaatgaagcttgaaaatattctaacggaatgtaagagtaagaccatcttctgttaaagtttggttgtttgttgttagcttccagcatcttccggcacatctacaagtaaaaaatagaatgtttacgattaagttaggtttcatctcttattaaaagaaatgacctttagagataaagtaaaaaaacggtaatgttattaagtaccaacaaatatcacctgttcatcggccaacaccaactcaagcttctcgctggtactcatggtatattagcaccacaattataggatttatacttgcactcagccacgcagttttgtatgggtgtaagtccagataaacgaaagaagcaaccataaaaatgataaatgtttgtttgttggttatatgcaatagttgctttcagatttggtgatgttagaagatgcaaatgatgggattatttatagtggtttagaagtcgataggggatggacatgagttagtagagaaaatcttggtgagcaagcaaaaaaaagaaaaaaaaatcaccattataaaataaaataaatgatttagagacataaaaatctttttaatctcataaatttctgaatttcgtccagatgtattttactagacctgcttgtaattcatgatgtaaatttgaatcacgtaactcggatctagcacgcacatgacttgcaaattctggtaacacctcaattgagaatggttgtggtgtactagaaccacttgcctcagattgattataatcggaccaatgttgagcatatgtctctcgttcatcattaacaatcatattatgcaatatgcaatgttgagcattaggtgaacgatctaaaacatttaattatatcattcaatgtgcctggacacctaaaaaaggcatgccagatcttttgatcatgagatgcaactccttcaaaaataacaatggtggttcccttatctccctgagtaaattggtcttcccacgctgtatgaaattttttctactcctagtgcatgcaatcaatactcccaatcatccttgaaaacccccacaactcgctaacacgcagaattctttgcaggttgtcttgaggcggagctctaagataatcttcttcaattttgttgtgacacactctaatccagttgatgatatacctcacttcaatatgagattatcttttataagcttcgatattgaaaggaaattctgattgatccattggattttttattttagtaagatgatctttgtgatattaattcattaatagaagaatgagttttcatttataaaaaatagagtggttgaaagagaaggataagagaaggatttgattaaaagatcatgtggttgaaatccaatactcaacaattttaccccagtatgattcacttttttggtttttgccaacaatgatgtatgttccataatacatccacttaataacactcaaattttgctcaattctccatttgaggcttttccggcgagtagaagttgatacatcattatttggagtattttcattagcactggtcatacttccaagagtcatttgtgttgaaaatccatgaaattcaggaggcagttaagatgaatatgtcatcatcgatccataatatggatgatattttggaacagatgatgacatagaaaaatttggtggtaaactataatttgggacattttgagattggttgaaagatggactttgaaattgataattattgggatttaaatagggaaaaggataattggtagaattttggatagaattattgttggaatttggataggaaaatggaaaatttataatatttgtgaaggattattttagaatctatttcacaaaataaaataaaaaatagaagcaagagtttattagaggataataaagatattatgatagaaatggtgttttttgtatgtatctgaatgaaatgaatcaagtttccttttatagagcttaaaaagtaataaatatccatataaatgttttaaatttttttttattatctatatattcatttacatgggatttttgcgttaattcccttaaacccggctttaattcatttgggttgggtttcgatccggttttatcgtattcagatcttgaataggatatttgggtcgagatttcttttgttcggatcgtgtttaggaataacatgtgcatctttaatcgagttaaattcttcttttaatccacgtaattatttccttagattctgtccaccatattcggcttactacgacttatccttatatatttgcaatcttaacaattatattgctacctactgaatctacatatacatttttacaggaattttagcaattaaattctcaagttagaacttatttacaaggaataccattgacattaattattatcatttaattaatattcctaattattagcattttcttatttaatatatttccatcaattctaattacttttaaaaaggagaaatcttaggactttattaatattatactttattaaagataaatactatagttatttaaagtttataaaatgtttaaaatatttaacgaaaaaacttttagaatatatatattatataaaatctataaaattaaataaccatttcaaaataaaacttttaaattgatttgaattataaattttttgataaaaatattattaaaacaaacaaaaaaatgtttaattttacggaactggattagatggtggaacgggtttagaatattataatgtatgtattttataacaattaaataaccatttgaaagaaaaaatttgtattaatttgaattatatgttttttaaattaaaatattattaaaacaaaaataacaaaaacaaaatgtttaatttcattgcacggggttagatggtaggacatgtttgggtcgacagtaatacgagacggtataccacgagtgaaatccattagatatgtttagtttcactcaacgggattaaatggtaggacgtgtttgggtcgatagtaaaaagagtcggtatatcacaggtgaaatcctagatataacaatcaaaatacaattatattatcttaagaactaaacaaaacaaataatattaataaaataaagataattaaaatttaaattatttagttataatctagattttaaattaatgaactgtacattattgttcatatatttttaaacagtaaaaatcaaacatattaattgtatattgaataatatacatatataagagttgtacatacataaaatacaaaatatgaaatcatatatattcttaatcgactaaataaattaaatttttattcttaaaagaacaaaatcgtcatgcaatacatcgcgggttaaaatctagtctttctatattctcgttatactctgcaactaaatatactccctccgtcccactaagatgaacttttaaaaaatttcacattctttaagaaatattgtataaagataattttaacctcttaatatactttaaaaataataataaatatttatctaattattagtaagggtaaaacgggaaaacagttttaaaatttgcattggaaatataaaacttctatctttgtgggacaaatatttttcctagaaaatttatctttatgggacagagggagtattttctatcattctaaaaagtttaaactatcagaaatctttgtgccacttatcatattagaaagaagtagcctgtccatttcccactgccaccttacaaagcttgtctatctcccttatgcatgcacgaggtagtctacaagctgcaagccaaaaattgcatatgctccacaaaacccaactgatcagatttaaacgtccagcaaaagaaagaaatcgggacgtccaagattcaattttccttgtaatcttttataacaggggaagacagccagatgctgtgaatcgcttagtgaccagagggagtccgagatacctcactggtaactgaccaacttcgaaagggaacctttgggttatctcatggtggactgaatcttaaattcccgtcagatacattgtcgacttttccttgcttatttttagtcgtgataatttttgcaaaatcgtttaacacatgaactattcctcctattgatatgacctttccatcggataggatcttaaggttatcagcaaagctcaagtgagttaagccaagacttccacatttcagatggtaaccaaattgtctagcacctgaagctttatccaacattttagagagaacatccatactaatgacgaataagtatggagagagagagcatccctgtctttaacctcttgcactgttgaaaaaaacaactaattccccattaacttgaaccgagaaggaagacgtagctatgcagagggtaacccaatgaataaagactgagggaaagtccatggctgtgagaactttggtgaggaagtcccactgtaccgagtcaaacgcttttgatatatcaattattagagcgcaacggctagaaattgagtcattatggtagtccttgactaattctgtcgccaacaacacattctctatcaatagacggtcctttacaaacgctgactgatttcccgctatgaattgaggaagaaccaatttaagccggtttgcaattatcttggagataactttatatgtcacattgcagcatgagataggcctatagtctttaatctctttcacatttttctcttaggaataagtgctaatatcgtggagttgatgcctttaggtaagaagccttcaacaaagaaagactgaatcgccaatacaaactcatctctggtgatttcccaagctcctttatagaattctgaggtaaatccatctggtcccggagatttatcattaggcatagagaacaaagcctttttaatctcagctgcagtgacttcattggtaagcatctctttttctatttccatacaacaaaagggtagtaactcttgaagctcagccactgaaataccttcgaaatcattaggaactagctgcaaaaattctctaaagaaccgttcagcctctgttgtgatttcctcctcttgtgccgtcacagtcccatgttggcattgaatctctctaattgtgttccgtgcctcccgcgttgtaacagctctatgaaatgctttattgtttcgatcaccaatcttcatccaatgtaattttcatttctgcttcaaatatatttcttccagagctgcgaccttgtcccaagtgtcatacgcctcattttcttcttgcattgagcttgtggtggggttagacaaattggcctcctgcttctgacacaatttctcatacgcatcttttgttaaaaaacacattttgattttcttataagaagtttaaacattataaatactaaaactttatattacgggtgaaatcttagaattaacgagtatgagtcaatattaatataggatgatataccacctgtgagatcctaaaattaataattaaaatacaattataaaatcttaaaacactaaataaagtaaacattattaacaagacaaatacaactaaaaatttcaaatatttagttataaaatatagtctatcttacattaaaaccaaacaaaacaataacatatatctacagaatttgttttaactaaaatatatgcatgcggtgtatcacgggttcatatctagtatgctacataataattgattgtaaataaataaggtgagataaaaatctccaaaatctcaattgccaataacattacaacaagtgtgtctctcaataatttctttcttttttgaacaaataataatagaaaacgctttacttgcgagctaggtgtgtgaaacatcttccaatcatatggtgatacgtggcatgggcgaacccaaataaatttttttctatatgttgaatagattcaacacctaaaaatctaatgcaaattttttttcaacaggtccaatgcaagcagttttagtcacatgcagttaaagtattaaatccttctacttataaatattttattcctacttaatagcatgtatgtattttggcaaaaaaatgctaaatcggagatgaagttaaaatatatattgtgcgctctaatatcaaattaagaattatatttcgtccaagctacttagtacgtacatgttgtattcactagttgtccttcctttcttcttttccatggtcacaatttggttcattgtttcttctaagggattgagcaatcacggtttttcgggagagtgttttttgggcaatatctctttatatatttaagaatgctaaaatgtagtatttttgttggttcttgtttcattgccaacattgtacgaggcgtgatgaaggcagtgaagagaataagggtagtttcgtagacatagtagttgaagagctaaagctaagagaagacgaataacacacatacatgttgctaagaaaggagcgtcttcgcaagggagaaatccgaggtgattcgagctaggcaaagaggatggaaagatgtaattgtgttttcaaatcatatatatgaaaggaggtgacctatctccatatgaatgacatgttacaccatagagatgatattttctgtattctctcatcttattcggaaacctaaaaaggtatggtgaaaaatataagaatagaagaatgagaaaatggaggcttcttaaactaattttaaattgtatttgcttaatttaggacttgaaaatatattctgtatattttgaagattagtgaaattaatgggtaattttctcagacatggaaatcttgttttattgtttttcctttatgactttgcaaatatagtaggtttcaggaatttttatgaactattttatcttcaactagaattaatactccaagtacttatatatatatatatatatatatatatatatatatatatatatatatatatcatatttaaattcatattaatttgaaagtgttaaaaatgcccttgaagatgacaaacaactgaaacaagacatttgagcaaacaacttgagatgctaacaaatggttttagtagacatctaaacaaatccaaattctaataagatttattttgttagtcatgtacatataccctataaccctaatatggaaaccaaataaataggtcactatggattatgtattttgaccaaaaaaaaaaaaagaagaagatgaataatgtatttttctgtctctacatacaacgaaacatagttaaatgtttaaagttcaaaatctactagaatttggctactcagaattataaaagagattcaagacatttatgtagtacctctgttgaaacattttttgagaatttatagtgaaaagtgtagtcattttgtgatcttttccagcttcctatatttcatgcgttttagctatatactatcctactatattatttgggaagtacattttaaaatttaaccttaatttttataactaattacatgacaatgccattaaaaaaatctaatcaaagacaaaattgtttcaaatcattaaggttagtaaaatcatttaacgataatatccatctactaatcacacaagttaatggatatataaacgggttaaatatttttctgccatttattaaaaattttcgtcaattcatatttgtaagattttttaaacaataagatctttttgttaccaggtggagaataagttggaacacacttatatagtttcctttgaaaatcaacaaaatcttagccactatatcgattcctatcaccatatctcgctgttataatatttctcatcactatattccggttaacaagtaatattccttgagctacaatttttttaaataatcttctttctatcaaataatctatcttaaacaattaactactaactgatttaattagatcttcaatctattgaattcacccatcagtattataaataagcagataaccatcatgatgtctgtaccttctcacatacacacctatcaaaaacttaaaacctttcaaaacctcttggtatattcatattaggattcttcattcatggaatcattattccaagggttttgggatgtcttatgaaataattttggcagaagagtatgtaaaattttttgaataaaaagtagtcagcaaaacttttctttttttggactttttagataattaatttagagaatagggttgggcatatgattaacccattcgagttcgggtagaacccgttcgagtttgggattaatgggtattggatttactacttaatacggtaattctaaatattcggttcggtcgggtccagtcggttttcagtcagtttggataaaaagtttcaggccataaaaatacccaaaaaaatagaaacgggtattttgtatgtagatagcggatccccaaacaaaaaaaacttttaaatttgttaagttttaagaaatttagttatatttgaatatattttactaaattttgacaaacataacaaatgatttttgaatagtttagttgttttggatatttaggtccaacattaattgacatatttaaatttttttttttttttgtcaaccgatataaattaaaactcaaaagagccaatcccgagggatattgtttacatacgtgacatgatgcggtacggtacgaatctttcgtgccaacttatccgcttttacatttgcactacgagaaattaaagataaagagaaatttgtgaattcttccctatcactctgcaactcctccaaatacactgaaaacgccggccattcggttggagaagacaccatcttcaccaagtctgaacagtctgtaaagaaagctacgttctggttatctgctccaatcatgcacttcatcgcccaaagaagagcttccatttcggtatgtagaggagatagacttctacgaacgttggcggctcccatggttggcgactctccaagagatgatagacagaacgttggagacatatttagatttataattataatcttagataattagattatattaagattaaatatattaatattttggatattaaataaatgtttgggttttcgaatacctttttgggtaacgggtaatctccggaccaatcggatacccacgggtttactaaaactctatccaataaggaaaatttattaaaattctaacctgccctaacccgattttttggttcgggtattgggttggttatctggtctgtttttttgtcagccctattaaagataatctaatatagggcccaattaggccacaaatataaccaaaatactatacaaatactaattctaagttaggccaaaaattagatcctctattacaaacgaaacatgtttcttaccaaaacaacttgtatacaaattttacacatttacttaaaactacatatgttgtatttattataaaaatgacatttttaaacaaagttaatccaatgcagcattatatccaaatagcaaaaaacattgaaaaatattatggcatcacttttacactatactattttttatgtaattcaaacaaagtatacaatttagtttatacaaaatattaatgcctgtgctatatagcacgggttatgatctagtctacttaacatttttgaagtacaaaataaagaatttttcgggtcggttttttttttttgttttacccggtttttttgacccacatcctattattttaaatgctaatcaaatcttaccaaaattaatcgctttaaatacgatttagttacaattaattatttccgttcagcaaagtaaatccgacttatatggaatgaatatattaacattgcaaaacaaatccgacttaggtaacttagtatttatccgttcagcaaagtaattactcgagtaaatattctattaactacgaaatcttcaagttaaacgaaatcaaaatctgcattccactacataattttcggagatcttaagaactaaattaaagcatattcctaagcataatttaaaaaatctcgctacacaatttcctaatatcgcaatagtcaaatcatgggcgaagattgtgattatcatatgttctctatataaataaggaatttgaattgaatttctatgctaagccatttgccataaaaatctcaacaaaatattgaattcattatctctacaatctcgacaatagaaactatatgattgtattaaaaaacggatttggtgcatattccttgaatattcgattaagaagatttgatttaatttagttaaggtgcaaataatttgttatggccccaaacctaatcagaactcgcctatatatattctctagctttacctctcatcacattatcaaacacacaaagctcatcacatatctttggattttgagacagaaaataaaaaatatgattcaggttgagagagttactgaattcatcacggaaccacagaagcgatgcagtggttcatcggagaagcctgaaacggcttcaaaagtttctagagaatatcagaagatcccaatctctaatcttcatagtgaagattaaatagagagagagagaaagagagattagatgtacatcacgtaagattggcgacaaaggaatcgctaaggggtcgagtggtttaatcggaaatcgtattcgataatatcaatgaagcaaaatgaaagtagcacacataggtttgtatggtgagacttgagagcatcttcgaccatcagagagggacaacttcatgagaatcgatggaaaaaaaaattagcttcgaggaagaagcaatggtttgacgaaaaactagatggtcacaaatgattggtaggcatcatgttcaaaagcttagcttgctcgagaagtcaccgacgaacgtggagttggccggagtttctgtcatcaaaaccgcgttcagttttgcattgcagaaatcaaagaagatgcttcgttattatcgatggggaagaagcataaaaaaaagtcttcctctgatgttaaaactaggccaagtatttgtcatgcccatagaacttgcaacagaaagcaacgttagtctttggatagaaaacaattacggtatttttttatgtggtttatacattacactaattatgttaaatatttttcaatagtattaacgagaagcacaatctatatatatatatttttggagaaactttgggtcaaatccttttataatttcttatttatacatttagtccttataaaataatctgataaaaatattgtcttaagcaattttgacaaataaaatttaagtaaataacattaattagttatagatgatttacggcaatatttcctaagaaataaaaaatttgcgacattaatgctattagaaaagaactaaataaaaatcttcaatggtatatttcattattaattcgctttattcctaaaaatatttaaacaaaatttagtcattgatttgcaaatacagaaattgtatatgtagttataacaaacaaatattttcaaatcaaatgattttctatttaaatgctagaaaaaacataataagtttttaatgtcatatctaagaaaatcaataaattgatatattattttaacaaatcaatatctaatgctaacaataaattaatttgatacacgtttttaatttaatgctaataaaaaaataatttgttctaacgcttcctatttaaatgctagaaaaacgtaataatttttttaatgtcatatctaaaataaacaataaattgatatattgttataacaaataaatattcaatgctaacaataaattaatttgatacacgtttttaatttaatgctaatgaaaattaatttgttctaacgtttttaattatggcattaaagatttattgtcaaaaataaaattaaagtacttgatagtttgtatatatattaaattacttaaaagttaaaattaatgtatatataaatataataacaattaaagtacataaacaaacaatctttagttgttatatactattagtaaaaagaaaaatgacaaaatgatttttattttaacagacggggttatatggtaatacggattttagtcgatattaataagagacgatatagcacgggtgaaatcctaaaattgatagtcaaaatataataataaaatcttaaaaaagaaaacagacaattatttaattatataattataccggacaaggttatatagtatgacagcttttggtcgatattaatacgagatggtatacaacgggtgaaaccgaagaattaacaatcaaagtacacttatacaatcttaagaatcaattgccggacaataaacaatattagtaaaacaaatacaaataaaatttagttataaattaacccgcggactggagcacaccgcgggtcatatcctaaacaataatttctttaggataactacaattccatataaaaaactaaatttaaaacaatttttttataataatgttattttaaacaaaacaaaaaacaatataacaaaaatgtaataatgcaccataaaatacacactctatataatgatgcgtataataaatatgttttcttaaataaataaaattaaatcaaacacatactaatataacatcaaaaatgaatagatataaaaggtaaggtgataaattaaaaatataacttgattatttagataaaaacgatatcgaattaaaaaaataatttaatttctaacacaaataatcaactcgcggtacaccgcgggtcaatatatagttaaattaaggttagaaacttagaattaagagatttataattataaccggtgccgtggtcatggactcatgcgtatatatcggtattttaaagacaaaaataacgaaaacggcacgcagtttatccctcaacacccgagacaacacttctcgtagtccgtgcttaaattcgccacgtagttcactttattcaacttaaaaaagcatgacgttttggtgcatctatcttcttcttcccccttcctctcttagcttctctcccaccactaaggagaaacgttccaaagatccctctctcagaaaaatctccaagaaaacgaaaccctaatggagaatcattctgatccctgaaacttttggcttgcggctgaatcgatttcaagattgcaagtattgcctagtgtgaatatgctgttgctgtgtgatgctttggttaaggaagtgactgttgaatgctgaaaggacgacttggaaccttatctcgggttgcattactcggcaaacttcgatatttctttatatgagaaacaaggttacgatgatttcaagaactgtgctaatctttgcccaagatttacatgtaaatggtactgattgagtgttaaaaggaagaagcttcatacatacaatatacattgatcggatatagttttagagtaggttccgagttccaaaacaaagtgaactatactgagtatttcaacatagaaaagttataaaattgacatcctttgcaaagtaaaagccatatcataacaaaaaaatcggaacatttaaccgaaaacagagacaacccacaaaagaagaagaagaatgctaaaattgagaagcactgatggagttggtcgaaggggaccaaacggaagggaatatatcttctatagactgcttacgagttatgaattgagttgcgtcaacgtgtgattctgatccggctgaaggaaaggccgcttcatgtgaatacgcacatggttccttgtacgcctctctttccgaaacgttggctgcaacttcgtatgattgtatttgtagcgggcctagcggcattagtttcagatggctgatgattttcttgaaattttttggtggaagcgaattagagataacatacttcggaggatatgcattttaataacatatttataagttttgagtatcgcatattacgaaaacgaaagcatttgaaagattcgagatttcactatcgaaagtgggggaagacacgcaaaacacaagaagataaacacggaatgaggaaacattactgaaagtaaaaggaaagaagaagtaaaaggtcaatgaaagcgactgctagatattaatatcgctaagcccggcccgttaacaaccggcccttctataacaaagcatcgttttattaaaaaacaaagatggaaaactgtgtcaatagggagttgaactgctgacctacttacacacaagagactttgagctatgataataatctcatatataattaacagcgcatatatatatatatacacaaataaataacaatatataattaatttaaaatctatgcaattttctttttatcatcagtttttatttaaatctcaaaagagataattctaaggaatattatttacataagtgacatgaaacggttcggtacaaacttttcgtgtcaaattgccagttttaacatttacattacgagaaataatagataaagagaaacttgtgaattctttcttgtcgctctgaaaatcctccaaatatgctgaaaacatcggtcattcggttggagaagacatcgtctgcaccaggtctataaaaaagctatatcttggttgtcggcaccaatcatacacttcatcgcctagagtagagcttcgactttagtgtggactggagatagacttctacgaagatttgcaactcccatggttggcgactctacatttgatgacttacagttcctaaaaacttataactttctttgcatgattcgtcaacaaagcagcagaatccttaatatatattatcatgtgagatatccctcacccaaatttgtttttccgatcccaaggagctgtgattttcacaatgaagctcaacttgagctaattgccacgattgtacctttttcagctaaacataatacctctaacggatctttatccacattctctaatatttttttcattctttgcttttcaatgtagaatcgaattatgaaagtattcttgagaataagtgatccaaattcgcataaatagaagtcgtgagaaaaatctctgggacagtaggaatctgtgaaagagttcatatctgtctcgatgggtgacattggaaaagtgtatggttaattgtttcctctagtgcgtcacacctagcatattctgaatcacaatttatatctcttttctgcaaattctccgttaccagcacaaaacctaataatatttgtcacaaaaatgacgtaacttagacggacactgtactttccaagtatgtacttttaatgctttgatttctgggccaaataaaggtaaattttcatccaaattttttaactgctttgtatgataaccagatttaactgtatatattccggattttgtaaaatacaggatttcgtgaaataccaacctagagtatcctccttcgttgacgcacccaagtgtaatgcacttatctactgaatattttctggatcaaatagctcctttaaaagattaatattccaaaattttgactggctacatgatttttaacttttaaagatgaatcaatattagacccaatacttattgctgatctggaaataccaacctagagtatcctccttcgttgacgcacccaagtgtaatgcacttatctactgaacattttatggatcaaagcgctcctttaaaagattaatatttcaaaattttgactggctatctacatgatttttaacttttaaagatgaatcaatattagacccaatacttattgctgatctggaaaattgagctgaaattcaatgtttctcccaaactgagatggactcctcagaacagactcttttattaaccagagatttagctgaatatatacttctcgagccataggatggataatatgattttatatttcatttagctgaacagactcttttatttctgaaaatatctccctttaaaaaccttcactgaaagagaatatggaaccgtaatctattaaatatacttagcatagatacttatttagaaattttaaatattgaattctcttctatatttgaaaaattattctttcctaaattataaaaaagaaacttagagaatataaaaaattagatgtatgaactaaaatttatacaatccttctcatataaatatagaattaaggattgtattaattttaggattaagggttgtagaaactcatatatttacttttatatatttcttaagtttcagttttaaaaaaaaaaaattatttaggaaagaataatttccaaatataaaagaaatctttatatataatattaagtatttgaaatttcaaactatatgtttaatatttgtatatttcttttgtgaattatttttgtatatgtgttgttttttttgttttgttttgttattttttatttatttcatatattttaatttattgaatattattatttgtttgtatatatatatgcgctgttagtattataccaaactgttgtcataaatcaacggtagagagtctcttatatgtgcattagctcagcagtttgattccctgttgatgcagtcttccatcattgttttctaataaaacgacgtcattttgatttaacatataattataacgaaaagttcattccgtttacgaaaacttaacaacatgtccgaaatgaccaagtcaacgaaactaagttattttattaaaaactcaaactaaactttatgattgaattctcagatttttgaaaattgtttaaatgtctaagttttcgttgatttcagaaggaaaaaagattgctagctatacgaagtatagtagaatgcatggtcacacatgccaactatactattgtatcctcagctacatgaagtagatgtattacatgaccacatgtctaaactatataatgtcatgtggttaacatcctaaacatacaattccggtacaccaatggtttgactccggcaaaaactaacgttgaccagcaaaaatatttagaatatattatttatttatttattaattttaaaacaaaaataataagaaaaacacattccacattttgtatataaattttaatgtattaattcttataatagttattttatcaatttcaaaattaaagtaaatgtgtaataaaaactatcaataaactttaaacagataaatttcacgggatgaggttatatagtgggacgagtttggatcgatattaataccagatggtatactatggatgaaatcctagaattaacaatcaaaatacaattatataatttgaaaaactaaacaaaaatattattattaacataacaaatataattttaaatttcaaaaaaacaaaatttataaattcattacaaggtgtatcatagtatcatacaaaaaaaataatagcatctatctatagatcatcttaaaaataaaaatttaattttttatttaataaaaatatagacttatgatcattgtatttcttgaagatgttatttctatataaataatattaattaaaagaaaaatctctaattttttaaccaaaatattaacccacgggtcaatatctacgtaatacaagttttaaatttttattccctctaaaacaaaactcaaactacaaacaaacaaatactgcattttaataataaattaatatacaataaatatccaaaaataaaacatgaattacccaacctttaaatgtgtcaaaaatatattatcatatacaaataataattcttataacaaaatatctataacttttcaataaatatattttcggtatactacggatcaaaatttgattttttactattagaggtatgttttagcataataatataatttaacataatacattggtgggagtatgaaaaagaaaaccattttcgagcacaagcaaactatatgacgccagcgatttatggcttcactgtgaccctttcaaatgatttctagagaggttaggattttcaattgattgttggttgctgattaagacactttgattgatgaaaatgacgtttatacttcgatcgattgtttaattgtagtggattgggccaaaaaaccataaatatatgttgaccatcgtatgaagaagctattttagatattattttaaagaaggaagaataataaaatatagtaaaaaattgaattcaagggacaaattaaaatatatttatcatggaaaatcagcagacaagaaaaagtcaaattgtagtagagtttataaagtgagaatattatttatttacaagtaatttgcaaacgcttaacgtaaaatttgccatcagaatccatagtcttattctgaggaaacatatcaaacatataccttatatatgacaaaaaaaactttccaagtcacaagtttttacaatttaccttatatttctagaaaatacaaattaattttataaaataaaaaattattatacaatataagcttcatatatattacaaatttgtcggtagcgaaaaatgtttaaattacgcattatctttaacttgataaaattaattataatatatattttttgaggtagagagtataattgcaaagatctgcgatttggaagttctttttacacaaaccccttgttatcacatccaagttggatggagtttgaattttttgaaaatgacaagaaaattttgttcacgaatttaatcttaaaataaaagcgctcaaattgaacattacttggaatggaaaacacaagatacaaacttttagtaaacaatacaaattaaagctttgaggactctataactttagtctttagaggtagaggccacttttacgtccatgaaagaggaacttagacagataggctgagcgaagtgtgtcaaaccaaagctgaaaatgcaacaccacaaatgagagagccgtggcagaagccacgtaaactaagaggattaagctccatttaggttcttgatcacggatcaagatcaatgtcgctgtgaaggcaagaaccattgaaataattgaaacaaacaatgctaaaagtcccaacattagcttcgttggtaaagtcgtctggaaactagcttctgcataacgagatgtcaggattgacaaaaatatcataatagatgtcacagatgataggagggcaaccgaatctgatatgataaacacttcaaaccagaactcctttctaaaagtagggaagcctagtgtttttatgtcgccactcgtatcgtttccaccaggtagagtaaaggcagctgcaaagaccacagttgctatcagtgttgatacaagaatgcatgcagtcgcagtttctttcatccatttctctccttctttgcgtaagttgtcatgctctttcgtaaatagatcatgcgccacctcctcttttttgttctttgttttgatgtatacacgaggaactatctctttaacagcctggaaagtcattagaagttttgtaaagatatatacaagatgttaaattatacccattgtggaatgtgtttagcataccttgtaccaaagaatctctctttgcatctgaagtgctgctcctgatacaacttgtaacctatttggaggtggtaaacgtgccacaagatgcaacaagttgtcgttggattctttctctttatacatagctatcaaatctttgatggccccgagttcatagattctattaaagattttttcatgacgatttatagcagcaatgtggaacaagctttggttcttatgatccaccgtccatatcagatctggataagaacgaatgagaataagtaaaagctcaagatttccagattgtgcagcatcaaagagtagcattggagatgatcccacaaattgcgaaatttcctccactggcaattttataacaaaactccatagctcctctaccaccatatgagctaaagtccgcattttggcttcacgaaatacccctttaaaaactaaatggaaagagttcttgtcaggtgtgatgttcaaacaaaggtttagactataggttatataattctcaaactttggtcacttctgagcacttgttcctactacttatatatatatattttgatatgaaaagaatgagttaactaagaggtgtacttgtgagaaactcgttaccaaacgacctgttcaccccaaggttaatttgatattatacctgtgagtttttggtctaaattcaccaagtatgagaaagactctattcggtatagagggttcgaagttcaaatgaaaagcaaggaagagataagagtttctgggtcgcttagagggttcactttatgcgccaagtttgagaaacaaaaggagatctcttcagctctctctcatgacatcactttgtcgagttcgtacaagcaacaagagcagacaacaagaatggtttcttcaatcaagccgcctaagagattgcagcaattcaggcccgtaattgcagctggagcacctgacttgtgtaaggttcaagcacgagcgtgtcgggtagctctagatccttctctttgtctctttaaaggagttggttgtgttgtgttgctttgtaaggtgtgagagaagtttgtaacagagagagaaagttgtagaaccctaaaggctcaagataagagcaagttcttagtggatttccgagaatatctcggcgagacgtagggattcaagtttgaatcctgaactcgttaattcctgtgtgttcttactttcaagttccgctttttacaaacgagtgaacaacaaagtgagttgagaggtctgagattagacaaagtacaactcgagaacgttctaatcctcacagtttggtatcagagcttccaggttactacctaggagcgagaagatctgctcaagatgtcttcgggcagagcagaggtggagaagttcgacggagatggggattacatcctgtggaaagaaaagttactggctcatatggagatgttgggacttttggagggtctcggggaagaagaggaagcagtggttgaagattctaccactgagattagtgatggaggaaaccaagacccagaaactgcaacttctaaactggaagacaagatcctcaaagaaaaaagaggaaaagccagatctaccatcatcttgagcctgggaaacaatgttctgagaaaggtcatcaaacaaaagacagcagcaggtatgataaaggtcctggatcagttatttatggcaaaatctcttccaaatcgcatttacttgaagcagaggctgtatggctacaagatgagtgagaatatgacgatggaggagaatgttaatgatttcttcaagttaatatcggacttggaaaacgtaaaggttgtagtcccagatgaagatcaagccatagtcttgctcatgtctttaccaagacagtttgatcaactgaaggagacactgaagtactgcaagactacacttcatctcgaagaaatcacaagtgccataaggtctaagatcttggagttgggagctagtggtaagcttctcaagaataactcagatgggttgtttgttcaagacagaggcagatcagaaaccagggggaaaggaccgaacaagaacaagagcagatctaagtcaaagggagcaggaaaaacgtgttggatctgtggcaaggagggtcatttcaagaagcaatgctatgtatggaaggagaggaacaagcaaggttccacatctgaaagaggagaggcttctactgtaactgctcgagtcactgatgcagctgcactagtagtttcaagagctttacttggctttgctgaagtcaccccagatacatggattctagacacagggtgttccttccatatgacctgtagaaaggattggatcatagacttcaaggagactgcaagcgggaaagtaaggatgggcaatgatacttattctgaagtgaaaggaattggggatgtcagaatcaagaatgaagatggatctactatcttgctcactgatgtcaggtacataccagaaatgtcaaagaacctcatctcacttggaactcttgaagataaaggctgctggttcgaatcgaagaaaggtattttgactatttttaagaatgatcttactgtactaactggaaagaaagagagtactttgtattttctccagggaacgacacttgcaggtgaagccaatgtcatagacaaagaaaaggatgaaacaagtttatggcacagcaggcttggtcacattggtgcaaaagggctgcaggttttggtcagtaaaggtcatctggataagaacattatgattagctttggagctgcaaagcatgtcacaaaagataaactcgactatgtgcattctgatctatggggatcaacgaatgtaccattctccattggtaagtgtcagtatttcatcactttcattgatgattttactaggagaacttggatctatttcattagaaccaaagatgaagctttcagcaagtttgtagaatggaaaacacagattgaaaaccaacaggacaagaagctcaagattctcataacagataatgggctggagttctgtaaccaggagtttgattcattctgcagaaaagaaggagttataaggcacaggacatgtgcatacacaccacagcagaatggtgttgctgaaaggatgaacaggaccatcatgaacaaggtcagatgcatgttaagtgaatcagggttggggaaacagttctgggcagaagcagcgtctactgccgtgttcctcatcaacaaaagcccaagctcctcaatagagtttgatattcctgaagagaagtggactggtcatccaccagattacaagatactcaagaagtttggatcagttgcttatattcattcagatcaaggaaagctgaatcctagagcaaagaaggggatttttctcggatatccagatggtgtaaagagattcaaagtgtggctgctagaagacaggaaatgtgtagtctctcgagacattgtttttcaagaaaatcagatgtacaaggaactgcagaagaatgatatgtctgaggaagacaaacagctcactgaagtagaaaggactctcatagagctaaagaatttgtctgcagatgatgaaaatcagagtgaaggaggagataattcaaaccaagaacaagcgtcaacaacaagatctgcaagtaaagacaaacaagtagaggaaactgattctgatgatgattgtctagagaactatctactggccagggatagaattcgaagacagatcagagctccacagagattcgttgaggaagatgacagccttgttgggtttgcattaacaatgacagaagatggagaagtttatgaaccagaaacctatgaagaagccatgagaagtccagaatgtgagaaatggaagcaagctaccatagaagaaatggactccatgaaaaagaatgacacatgggatgtcattgataagcctgaaggaaagagagttataggctgtaagtggatattcaagagaaaagcaggaattcccggagtagaaccaccaagatacaaagctaggcttgtcgccaaaggattctcacaaagagaaggcatagactatcaggagattttctcacctgtagtaaagcacgtgtcaatcaggtatcttttatccattgtggttcaatttgacatggaattagaacagcttgatgttaagactgcgtttttacatgggaatctggatgagtatatattgatgagtcagcctgaaggatatgaagatgaggacagcacagaaaaagtctgtttgctaaagaaatctctgtatgggctgaagcagtctccaagacagtggaatcagagatttgactcattcatgatcaactcaggttatcaaagaagcaagtataatccatgtgtctacacacagcaacttaatgatggatcgtacatctatctactgttgtatgtagatgatatgctcattgcatcacagaacaaagaccaaatccagaagttaaaagagtcactcaacagagaatttgagatgaaggatttagggcctgcaagaaagatactaggaatggaaatcacaagaaacagagaacaaggcattttggacctgtctcagagtgagtatgtggctggagtgttgagagcttttgggatggatcaaagtaaggtctctcagacgccacttggtgcacacttcaagttaagagccgcaaatgagaaaactcttgcaagagatgctgagtatatgaagttggttccctaccctaatgcaattggaagtatcatgtactctatgataggatcaaggccagacttggcatatcctgtgggggttgtaagcaggtttatgagtaaaccctcaaaagaacactggcaagctgttaagtgggtcatgaggtacatgaagggaacacaagatacctgtctaaggttcaagaaagatgacaaatttgaaatcagaggctactgcgattcagattatgcaactgatttagacaggaggagatcgattacaggatttgtattcacagctggtgggaatacaataagctggaagtcgggtttacagagagtggtggctctgtcaacaacagaagctgaatatatggcccttgcagaggcagttaaagaagccatttggctaagagggttagctgcagagatggggtttgaacaagatgcagtagaagttatgtgtgattcacagagtgccattgctttgtccaagaactcagtccaccatgagaggacaaagcatatagacgtgaggtatcacttcataagggagaagatagcagacggagagattcaggttgttaagatttcaacaacatggaatcctgcagacatcttcacaaaaacagttccagtgagtaagcttcaagaagcgctgaagctactcagggtctcaagtaactagggagactacagatccgagattggaagtcaagtaacactaagaagatgagttcagtgaactttataccaaggaggagttttgtgagtttttggtctaaattcaccaagtatgagaaagactctattcggtatagagggttcgaagttcaaatgaaaagcaaggaagagataagagtttctgggtcgcttagagggttcactttatgcgccaagtttgagaaacaaaaggagatctcttcagctctctctcatgacatcactttgtcgagttcgtacaagcaacaagagcagacaacaagaatggtttcttcaatcaagccgcctaagagattgcagcaattcaggcccgtaattgcagctggagcacctgacttgtgtaaggttcaagcacgagcgtgtcgggtagctctagatccttctctttgtctctttaaaggagttggttgtgttgtgttgctttgtaaggtgtgagagaagtttgtaacagagagagaaagttgtagaaccctaaaggctcaagataagagcaagttcttagtggatttccgagaatatctcggcgagacgtagggattcaagtttgaatcctgaactcgttaattcctgtgtgttcttactttcaagttccgctttttacaaacgagtgaacaacaaagtgagttgagaggtctgagattagacaaagtacaactcgagaacgttctaatcctcacaatacctaatgttatacttaaaaaaaacattaagtgcttttgtccacttactagaatttgcaaacttctgaaagaagtttagatgttttctacggccaactgcagaaggcttgcgagccatcaagtgcaaggctgtctctttgtttatatttgtccaaagggctagtacttttttccttccctcgttctctaacatctccagagctacatctgtgaatagacctcactaagaacatgcaactcggaagaaatgaaaaaaaaaaaaaaacaagaagaagagaaaggtatttaagagctgattatatatttaccatagatatcagctgatatcacagcatgaaagagatttacaaactcttcatcattgaattctctaaagcgtgtattcttgtaaaggtatttaaccatttctccatgaccgaataaggctgccatgtggattggagtcgtttttccacctccacgaatcatcggaagatctttattcttctcgatcagcattttagcaatctcaacgactcccgatgcagcagcaaaacataaggctgtgttgccgtccacgtttcgcaaggccaagtcatttgactccaagcttccaagtagatttcttacaaacccctcgtgctttgcagcaacagcgatgtgaagaacagtctccgatttactggtgattttttgatagataatatatttttgttcaatgattataccattggctgccttccaatctcctttcagagcagcttgatagagttggacacctttggctcgtaatttatctgtaaacaagaaaaaaaccaatgcgagaagacaatagatcaaaagaaaaaattgaatcaatcaagagaggttgtacatgaagtgttgcataccatcacatgaaaagtttctttgaacattgtgtagtggactgtgatgtttattaggacatgacctacatgtctctccaacttccactattatatctcccttgggaggctctttggatttgttcagattgttcatcttcgttgaaacgtgactttctaaagttatatagacaatacattaagttctagtttgtagtgaaaaggttatgaaaacactaggagtctaaccataccttcaatatgtttctctttgggcaacacaatgaacagtttacacagcggatctcgtggaagccgatcaatggtcggtggtgcaatcgacatttatggttatatggaactcggatgaaaaaggtaattgagcacgcaagatgatgaaagctcttcaattagtttcttatcacaaactgattaaaacaaattatgatggattgactttcccttgtgcttgtaaaaacaaaaaatatgacaagtagggaagtcgtttacttcgctttgttatccaactcttaagtctaaagtatagatgcgtgagcctgaaatttccttgttatatgcattttataacttaaattacgtgtgatttgaataaataagttacattaaaaatatagcacattgatttgagaaattaagtagccaacatatagtgtttgtaaataactacaatatagtgcatggatacatgaggaagcgtggcaaaatagaaataaaaaagaaagattttttttgtgacaaaaaaataaaagaaaggtttttaatttttttttttttatactcatgcacattttcttgcaacatatatgtatgtttaggaaaataattcgaaattccaaatctatttaaagaaatatatagtttttgcttctacatccgacataattcaaatttctgaaattagaaacagaatttttatataatcgtgcttagtgtttttgaaaagaaaaatcgtgaatagtgtttgtctacaataaacacgtaaatgaaatgatattgaataaaatgatttagtataaaacgaagatgagcgaagttatattaaatatagattatatttacaatatcaccttcgttttcttactgtcacacaaaaaagatcacattctttttctttttcattaatttaattttttttttgattatttatgtagtcctttaaatttctgttaaaacagaaaaagcataaatatttgaggttagtttcttgttactcaatttaaaaatacaagtgtccattaaacagaaaccctagttattatttttatatataaaaagcaattgttattatttatatatcccaatactacataaatctaacaagatcaattaagagtcttaagatcctagcaaattattccaacagaaactatttttttttttcaaatgtccaatttttttatggtggtggtgctggtgggtctagttggaaaatatgaatgaagatggtggatccacttcgaataggagcaaaattgtattaaacatagattatacacacaatattactgttgtttttaatcgttgatgtaattattaaaaatttgttggtcaaatatgcaaattcccattaagttaataaacaaacaaatttgaagttattttcttgttactcaaattgtatcaattcgatttataaatattgatggtcatttgaacgaaaccataccgaatttttttgtaaaccatttgttatctatatatacatttttggaggggatttttgaagataatgttgaagatttgagccataattcaacaattaatttaactgggtgggttttaccctgttcggtttaactctgttcggatcctggataacatgtttaattctgttctgatcttggataacattaacttttggaaaagttacctaacaactaataattaaaaacgaaaattaatgatttaattaccaaatttaatataaacaatatctctaaactaaccatatttgttatttaccttaactaatttcctaaaatatttcttacctaatttaaatataaatgtataattcttctttcacttttatttgattttatactttatttattttgaatttctataaaatatatatagttaataaaatattatattttttttttgcatatgatgtaattcaatttttttaaaacggacatatattattcaacctatgaagaaataatatgtgtacaatgtcccacatcgcttagaaaaattggacaatggttcagacccatattataaaaggaccaaaatgattctgattacgaatgagcaggaatcttgatttatcaggcgtccaaaattaaaatagttatccgatttactcgggttttttattttaaagaattgaaactttaaaatgtttcaagaaattataaatattataactttatcaaaagttaaatattataattttaaaaactttttataaagtttatctttaaaaaatgctttaaatatttataattttaaaacttataaaagttttaaaaattataaattgaattttacaagaaatttaaacattataaatttctataaaatatattaatacgagacgatatattataggaaaaatcttaaatataatcaaggtcgatattgtattttttttaagtttcaaattttataatattgaaatttataagaaaataagaaaattatgtttaatttcacgggactgggttatatggtaggacgggtttgggtggataataattacggttgtacaatgtcccacatcgcttaaaaaaattggacaatggttcagagccatactataaaaaggaccaaaatgatttcgattacgaatgagcatgaaacttgatttatgaggtgtccaaaattaaaatggtttgtttactagggttatttattttaaaaaattgaaacttttaaaagtttcaaaaaattataaattaaattttacaagaaatttaaacaatataaaagatattactatgggacgatatactgcgagagaaatcttagatataatactcaaaattcaatgatgaagtttgggtcaatattaatcttttttaaagtttctaattttataaatatttgaatttataataaaatgaccaatttgtgtttaatttcacgggacatggttatatggtgtgacgggtttgagtggattataacatggaatggtatgctacggaaaaaaacctataattaacaatcataatataattatataatcttaaacactaaacaaaattaacaatattaaaaaaaacacacttaaaactttaatttttttaaaacacatttcgattcttttataagatttctctcgcagtactaccacgggtgaaatcctagaattgacgggtttgaatcgatattaatatgggatggtgtactacaggtgatattttagaattgactgatttaggttgataataatttgcgatagaattaagagtaaaattctaaaatgataaataaaatataattatacaataaaatactaccacgggtaaaatcctagaattgacgggcttgattcgatattaatatgggatggtgtactacgggtgaaattttagaattaactggtttgggttgataataatttacgatagaactagaagtaaaatcctagaatgacaatcaagttattattatacaattaaatactaccacgggtgaaatcctagaattgacgggtttgattcgatattaatatgggatggtgtactacgggtgaaattcgagaaacaacaatcaaaatacaattatacaatattaagcatttaacaaaataaacaaatacaacttaaaactttaaaatttgagttataaaatttcgtctcgcggtgaattatacatttaaatcaaacaatagcataaatttgttaaatcattttcaattattttttatttaatgaaaatataggcccgcggtataccgcggattaaaatctagttgtttatatatccttatactaaataaaccaaaaaaatcagataaaagtcttacaacatctgcattaactatttttggtgggtgtctaaataaattaattataataaactttttaacgttatttaattatgaatatctttaaaatgtgcaaaagtgtctaaagacacttataaataaatttgtttatatcgacaaaaaaaaaaaaaaaatttgtttataaaaattctgaagacactcacctaacatattagtctaccaaaaagccgttttttttctttactaaatataaaatttattgatcaacaaaaataactatttacaaaagaaacaaaaagtggagaaagaagaatagaagtagatgctcatgggcaggttccaatttgtgtgaacgatgtgtatcagtcacagcgaggagatatggtttcttattgctttctcaataatgtgcgtaaggtgaagaagccaactatgttgatggtgtcgtgtgtcgcctaaaagcccaaccttataaggaaaagtagcggacaaaatctcttgaatgcatgcttttcagtatttcgctattataggctaattaatgaccgaaactttggtctttcatatgtgtcttattattattgaaaaataataaaatatgcattgaagagattttggatacaaaggagagatacttagaaattggattattattattattacttttagattaatatgtgaattcttattaaataaaaagggttgtagaagctacaatattcttaacacaaaagattgttcatttccaaaaaggataaaaacaagaaaaaaatctactaaaaggaaatatgagcatagatgaatatagtcatactttagccaaactcacataaggttttgaatcctgtgtgttttctctttgcaggaattgcatcatgaattttctgtctagaaccttgaataaggcatgagtatgtggaatgttgttgtggtaccgattgttctctccacccaaatcgcataaatgcatgggtgaggtagagtcttagatggctagccaaactgagaatgcgttagtgtggaaagtaaaaaatgattacagcccagtcttcttgttgttttagaccaaataccttcactaacttaatattgaagaacaatatgatctctagttacaaggagcaagccaattatgatctagtttcaaggaattggctaattatacttaaaacccctaaagtctaataggaaaatattagatcatgagggaagctaaacccttaaaactgtgagcgttagtccaaccaccatggccagtcttgagggaagctacttgaaatatttgtttgtggctcccattttgtttaacttttttattactacgaaactaaacttgaattaatattgccataactttttcataagaggataggaaaatctaatatgaactctatcaaattatatgtttcaagtaagaatacttaaaatgtttagctgagctccattatttttgaaaacagctaaaatattttttagattctattaattaaaattaatacataaatgatatgatacaattgagaaaatgaaaaacgcccccgaatataatacgtatgtggcttcataatcgtatagttgtaggatcgacccagcacaccacagccgtcactagtatttaatagattacaagcagaaaaagaaatttaggtctatttaattagtgaaaataaaaaaataaaaattaaataaggcaaataaagtttagatgtacaacttgaatctttaaacctttgacgtatctaagatgcaaacaaccaacttttctaccgaaagttataagataatgaggccaacattttatttatagtaattgaggtcgcaagcatgggattggcccgcttgtgctcatgaacggctatgcacctaatcacctacaaaatatcaaaacaggaaaatctatgtaaagtgatcatggagatcataaacttcctagatgcttactatgacattcagaaacccacttgaaatgctaggaaatgtattagtagacatcaagaaaatcagaattctatatttaatagtcatgtatggacacatactctattgtgaaaaccaaagatttattagtgaaagttagcatccaaataatcctgatttgcttaactttcttaaaaatccttaacagtcttcaaaatctactttacccaataggcatccaactaatctgaattatagtagatttatcttatagtcagtgtcgtgagtcgtgaccagagttatagaagcttaatgcagtcttaaaaattgtactcttttcaaaaaactattttcgtatttataaagttatcatcttggctatttgtgatggaccgaagggatacgattattgggttttcatattttggtgtttcggtcttttcctttttagtattggttttgagagttttctttttaattatgtttaagtcggtttgtatgaggatctatataagatcctcttataatcaataagaaatcaaacctccaacaattaacctaattctctaagagagacttggattaaaaggaaggttttgcttcaatatctatcttgttctacttcaaatcacggctccaattactagatctaagtcaaaggctttagctcataacacaatgctatttgatctcagcattcttatttctctaatttctaaaagaccaaaataacgcaaacggcacgcagtttagctctcaatacccgagacaacacttctcgtagtccgtacttaaacccgccacgtagttcactttattcaacttaaaaaagcatgacgttttggtacatctatcttcttcttcccccttcctctctcagcttctctcccaccactaaggaggaacgttccaaagatccctttctcagagaattcccagaaaaatcttcaacaattgaaaccctaatggagaatcattcggatccttgaatcctttggtttgtctctcacctccatttctgaaatttcattgctttgtgattcttctgcagattcgttttgaagagaagaaagaaatgtcatcgaacacttcacgaagctgttctactagatctagacaaaactctcgagtttcttcacaagttctcgtcgacgcaaagctacacggaaacttcgaagaatctgagcgtttatttgactattcagcttcaataaacttgaacatgccaagttcttcctgtgagattccttcttcagctgtctcaacgtacttacagaagattcagagagggatgttgattcaaccctttggttgtttaatcgttgttgatgagaaaaaccttaaagtcattgcctttagtgaaaacactcaagagatgttgggtttgattccacatacagtaccaagtatggagcagcgtgaagctttgactataggaactgatgtgaaatcattgtttctgtctccaggttgttctgctttggagaaagctgttgactttggtgagattagtattttgaatcctatcacgcttcattgtaggtcttcaagtaagcctttttatgcgattctgcatcggattgaggaaggtcttgttatagatttggagcctgtgagtcctgatgaggtgcctgtgactgctgccggggctttaagatcgtataagcttgcggcgaaatcgatttcgaggttgcaggcattgcctagtgggaatatgttgttgttgtgtgatgctttggttaaggaagttagtgaattaactggttatgatagggtgatggtgtataagttccatgaggatgggcatggggaagtgattgctgaatgctgccgggaagatatggaaccttatcttgggttgcattactccgctactgatataccgcaagcttcgagatttctgtttatgagaaacaaggttaggatgatttgtgattgttcagcggttccggttaaagtcgttcaagataagagtctctcacagccaataagtctttctggatctactttgagagctcctcatggttgtcacgcacagtatatgagtaatatgggatcagtggcgtctcttgtcatgtctgtaactatcaatggtagtgatagtgatgagatgaacagagatttacagactggcagacacttatggggcttggtggtttgtcatcacgcaagtcctagatttgttccgtttccattacgatatgcttgtgaattcttgactcaagtatttggcgtgcagatcaacaaagaagcggaatcagctgttctgttgaaagagaagcgtattttgcaaactcagagtgtgctatgtgacatgcttttccgcaatgcaccaataggtatagtcactcaatcaccaaatataatggatcttgttaaatgtgatggagcagcattatattacagagacaacctctggtctctaggagttactcccacagagacacaaattagagatctaattgactgggttctcaaaagtcatggaggaaacactggctttaccactgaaagtctaatggagtctggctatccggatgcttctgttcttggggagtcaatatgtggaatggctgccgtatatatttccgaaaaagatttccttttctggttccggtctagcactgcaaaacagatcaagtggggtggtgcaagacacgatcctaatgacagagatggtaagagaatgcatcctagatcctcattcaaggcttttatggaaatagtcaggtggaaaagtgtgccctgggatgacatggaaatggatgcaattaattctctgcagctaataataaaaggctcattgcaagaggagcattcaaagactgttgtggatgtcccacttgtggataatagggttcagaaggtagatgaattgtgtgttatcgtgaatgaaatggtgcggttgattgatacagcagctgttcccatctttgcggttgatgcctctggtgttataaatggttggaattctaaagcggctgaggtaacaggattggcagttgaacaagcaataggcaaacctgtatcagatctcgttgaggacgattctgtagaaaccgtgaagaacatgttagccttggctctcgaaggtaatgcaaacatgttcggctctagtatggaagcaaatatcttttctgtggtttctggctccaatttatttttgttttcatcttttttactgttttcgcagattttcatctgtgccttgtgttataatacataataggtagtgaagaacgtggtgctgagatcaggatcagagcatttggtcctaaaaggaaaagcagtccggttgagttagttgtcaacacttgttgtagcagagatatgacgaataatgttcttggtgtatgcttcattggacaagatgttacaggccagaaaacgcttactgaaaactatagccgcgtgaaaggagattatgcccgaatcatgtggagcccttccacactcattccaccaatttttataaccaatgaaaatggggtatgctcagagtggaacaacgcaatgcagaagctctctgggataaagagagaagaagttgtcaataaaattcttctcggggaggtttttaccacagatgattatggttgctgccttaaagaccatgacactttaacgaagctgagaataggtttcaatgctgtgatttctggccaaaagaacatagagaagcttttatttggcttttaccatcgtgatggtagcttcatcgaggcattgctttctgcaaacaaaaggactgatattgagggaaaggttaccggggttttatgctttttgcaagtacctagtccagaactccaatatgctctacaggttcagcaaatatcagagcatgcaattgcctgtgccctcaacaaattggcatatctccgccatgaagtgaaggaccccgaaaaggcaatatccttccttcaagatttgctccattcatctggattaagtgaagaccaaaagcggctcctgaggacaagcgttttatgcagggagcagttagccaaagtcataagcgactcagacatagagggaatcgaagaagggtactgaaacctggattattctattcttctcattcgcttagttactaattctaaatcttctgttctaatcctgtgccttttttaatcgctttaaacagctatgtggaactggattgcagcgaattcggcctgcaggaatccctggaagcagttgtaaaacaagtgatggagctgagcatagaacgtaaagtacaaatcagctgcgattatcctcaagaagtttcatcaatgagattgtatggagacaacttaaggcttcagcaaatcctttcagagacactattaagcagcatacgcttcacgcctgcattgagaggattgtgtgtctcattcaaggtaattgcacggatagaagctataggaaaaagaatgaaaagagtcgaacttgagttcaggataatacacccggcaccaggactgcctgaggatctggtaagagagatgtttcagcctttgagaaagggaacatcaagggaaggtttgggattacacattacccagaagctggtgaaactcatggagagaggaacattgagatacctcagagagtctgaaatgtcagcctttgtgatcctcacagaatttcccttgatttgaagctgaagacctgtctacaagatttacattttattgaataagtgtggtgtttttgaaagtcttcatttttttttctcacatatataaatgtatgtttagttaccgtaacttaattacatatatatatataggaaagttaaatttgatgaaagcccctggccaagtgtaaatgactagcaatatcttgtgtttttgttacttttatagtttcgtttctcttagtttcccatcattttgcattaatggttaggtttttatgtgcatatctgcattgcatttcttactcctagattcatggaattgattttggagtttcatggcatttttagcacaaatggggtaaaaaagatagtaaagcaaagaggaactaaataagtgaaaggtgaaggagaagaagacgcatcaggtttctacatagatgtatgcaccttgatgtgagttgccttaaagactgctgatacatcagctatctacatcgacgtatgcaccatgttacgggctgattttccccatgaccccaatttgaaaaccggatccgatccatctgttatgggttaacccagtttagtttttcttttttctataaatactctaaacctaattagagagaagggggaagctacgtaagcctaattttattaatttcactttctaatcgggaaaaaatccgaaaagaccctcatttatattttatttgtccgtttaatgtctgcattataaaattttcccgaataatacctgagtttattgttattttctttaaaaatcttcgtttatttaaattttagcacaataagacatcccagttaacggtcgtcaactttttaacggatgctctaactatggttaaaacttaacccatgttatttactagtatatatacaatctattttcttatctatacaaatcttcaagcttagtctagtggttaaacgtggcttgactcttttgtgtcatctgggttcgaatctttgaatctcatctatgtagctttggtcgttttttatttattttgtagctttggtcgattttttttttttttggaacttcatcttcttcgtcaaatctgggttcataatttttttggacttcatcttcttcttcaaatttgggatcgaatccgccccaatcaaaataaccacacaataacaataaccaatcaaattcataaaccaagatcagtctgtaactaacgaacccactctcaaatctttctaaaccaagatgactaaatccgacgaaaagatccgtctttttctttcttcaatcaatttcaacatgaacccagatttttaaagcaatctaaccagatcttataatatttttgcaaattagatccaaaacagtttccgaaagagaagaaggagaagaggaagatccgaaatactcttacaaaaatcaattagcagctagaaatattgattcgagatccgatatctaagtttttgggattagggtttgatgaccgtatgcgaagaagaagacaaaagagaaggagagaaaaaaacgacgaaaaaaactccgggaggcttcaaaccctcgttgatataaattctccatcgacgttaaaccaccagactaagttaatttatatgtaacgttaagaaattagatcgtatatatcttcgtaaatactatgggttaagttttaatcatagttaaagcatccgttaaaaggttaactgccgttaattcggatgtcttattttgctaaaatttaaataaacagaaatttttaaaggaaataaaaattaactcaggtattgttcggaaaaattttataatgcaggtattaaacgggcaaataaaaaataaacgaggactttttcggtttttttcccctttctaatcaagtctgaattcttgtgatttttgttttatgtaagttttttcctcatattacatctcttatctctcttctactctttttctaacatgagtcttcaaggattaatgacaacttcttggatttttatggctattagtgagtagtcttttttgggcctttggatttagtagattatggtgattgttacgttgattgttttaagatgtttagggtttaatattaatatacggatctttactctctatgtattcgatgaaattcccgaaagaacttagcgtgtgcttagcatttttagccaatggaaaattgatgattatggtgctaggtggttagttaggcttagaaattaagaatattgcctttcaacagttaaaaaagtcttgtgattgctaatggaaattgatgttaattgcttgattagtgtatatttagcttaaattagtgatcctagccctaaggattagcaaatgattgattgtattagcatcatagattatcatttgatcatccaatttaataaccttaacacaaaggcttgttcatttagcattttcgtctttgaccttttgttgagttttcgttaacttttggttgatttttataaattgcattttaatcatttactttgctattgctttatgtgtatgggtgattgattagcttagacacttgtttaggttggtcaattgcctttggtttgtctattacatttgcattttagttcatttttagtttcatttcacttagtttaaaacacatatttgcttagattaagaaattttgtatattcctagtgtcttaaatctctagttctttgtggattcaacccttaaatgctataaatgataaccattagaataaggattgtggtttgtgcgcgtagaggaaatatcaattgatagaaaacctcctaatgaggctttacgcactgtttcattagattattggatagacaagaagagttccagctggccttcctttctttaacacttgataagtgtcatcaagttgatgatgtcctccattaggtcgttctgtcactataaagcctatcgtcgaaaaagtctttcaaagtccttaatcatcagcaatactccttttaaaacaaggttatctccttctttaataagagtgaaaccgcattagaaagacttgctaaaaaattaggatgagcatgcgatgcagctttgaaaatgtaacaatcctccccgtggaacccgcccacgtggccactctccgccacgtggcgtccagttggcgctgcagcgcatcaaccctaacctctcttatgtggcccctctagcccacatgtaggttattggtgcgcttcgcgttcctcgaacccaagacctcaccttttaacaactttcccacatgacaagatgtcaccaattaacgcgctgcagcgctaactagacgccacgtggcggagagtgtccatgtggacgagttgttacaggtatattaccaacaaagcaatctcttaaagtaaccatcggtcctatatgcgataacagtccaccagcaggtttattctcgaaaactctgaaaaaccatctcatcaatattgcaaccccccccccccataaagcatgtacaaaagatacattgtacatttacttcacctcaattataaattcttcaccccccacccccaccataaagcatgtacaaaagatacattgtacatttacttcacctcaattataaattcttcaattgattaaactgtagtgatatgtaagccaagaagttttaagtttttttcatccaaaatgttttctttagttttcttcaaacttagtttcacacaataaactcccctagatatttatgcgcacatgggaaggaaattaaaacagcaacatcttcttgaataagagatgacacacctaaaatctcgtatgccgatacttgaatatactgataatcgacatcactcatctttcgcagggatataaacctatttacacttccatcccaaaagatctagtttgtgaatacatttctcaacaaaccttcttagcaaagacgttgtgtgtaccacaaactacgttttttcgtatgtcttctccctattcacttcttctcatttccaccatcttcaaaaccttctaacagtttctccttacatccctcaatcactttttttttgcctttcacggactgtctcagatcttcttagcctcatatattattgcatcaaaacacttttcatacacacagtaattacataattttttcttatgtagttacatatttagcaagcaattgtgttttataaattatatattttcatatgttgattgctaaaatccgagcaaatagactatcctcctctcgaaatgcaacttaactagtccctatacttagaccaaattcgcgatcaataattaatatacggtgggccggcccaacaagatataatgtctaaagcaaaaataaatttttgtcctattaaaagaaatttgaaaatttttgcaaaaaaatggatgcttgaagactcagaactcttaattctttgtgaagaaaacaaggacttaatcaatctactacgaccattttttgtaagtatatacccctaatttagcttatattaatttgatgcctaaaacccttgcttcacgagctttagctccgggtcgggcctacctatacaattgctaagaaattttaggtacaagtccattaaaacacaagcatcctaatcatgggttaggtagctagggtatacttgctcacaaaagagtggtttaagaatttcatcaagcacttgttaggcattgagaattagcttatgatctagattaagagtgatcaactctcaactagcatcgagctctatgtagattttagtcctaataattatgaatcaaacattaaatatcctaaccatcacccataaatgaaaccactcatttatggtcattaggtcatgatcatacaacaacacaagagtaaagacacaatgaaaagattttatgtatagaatgcaaaaactggagtgattttttgattccaccaaggagtgatatctcttctaattcttttttcaaattttgataagtttgtttatctttctctatattattgttttgttgatgtattgctttagccgatatggagagtgttcgatattgctttcatctgtattcaatcacttataattacggaataaagtaatttatttttcataaaaaatgtttcgtttaaattttcaaaattttggacaagagaataatatatgaaccatgtaaacattattttatgcactttagatgttcacacgtacttgagtcattttttttagttaacctcttttatatactttttttagtttttgttaaaagattttccacacgtacgggtcccctcgtcaaattgagaagatggtccccaatctcctagtttcactcttttacgtaaacaaacaacattccttccgagttaatgtcacttcccatgcaaagcaatttgttaactaaaaaatttgttaatcaagaaatttgtgtagtaattaaagctactaattcatggtttcaaggtgctttgtacccaaaacttcaaacaagaggctgcttagttactaccgttgcaactggccgacaagtggcaccttcttttttgcatgactattatacatctttttttttttcctttcgtataaagttattttattataattttgtagtaatattatttggttcacttgtagagttataattgtgattttgtatttggactatttagtataacgaaactcctaatcctattttattgattctttttatgtctacttgatcaagtcatcaagaacactttatactgttagagaggtcagaggtgctgtatctctttggctttttacatattatgtttgtttacatttcaaacctaaacttgatttttcaaaaaaaagtaattcttatttaataaatatttttgtatcgaagttttaatgtcctgtattaattatctgcagtttttttcctgtaaacatagacaagttttaccttataatgtagatgaaaatattacaatacaaactttcaattcaaagtttattggttataagtatattgacacatatctcttttatattgtcacagtgtggatccaatttctgatgggatattattatctctaatacgctttttctagataatggttctttacctattaatcttggtatttcagataaggatcagcaaactaaattggatcgggccgattgtgaatcagactctaatactatattagatataatcctccaactcaacatcaattgtttatgagtagatgaactcatatctcttatatattgtcatgatctttgctcaacttctcatgtagaatattgttatccctaatacatatagtaaacttttttttgactttctgattaattaccaaactttcgttgacttcattattttggttatgccattgatttgatggaacaaacaactgattatcgactagtccattataaacatcgtggtggtggttgatgaagggatggtggtgaaggatgaagggattttggtggtttagggaattggggaaactctagttttttttatatgggaattttagtttaatatatataactgtgtatgtttttaaataatcaatagaacgtcttaactcaatcgataatatatcaattgatttatctaggagtgtcaaaattgatcaaaattcatgggtcaactcaacccatgaaccctaatgagttaaaatttttgactcaaatgagttgatgggtcaaatgagttattggatcaattggtttgatgagtaaaatgagttgagttgtaatggttaatggtttcaatggtttacccaattaacccatcaagttttgtaaaattgaattaaaccaactaaaatctttaaaccaataccaatttaagtttaaccaacacatctaaaccaatttaataaaattaatatttttccaaatttcttaaatatacagagataaaattgagaagacgtaaactcgtaatttttccaccaaaaaacataaacccgtgattttcccgccaaaaacgtaaacccgtgattttcccgccaaaaacgtaaacccgtgattttcctgccaaaaacgtaaacccgtgattttccagccaaaaacgtaaacccgttattttttcgccaaaaacgtaaacccgtgatttttccgccaaaaacgtaaacccgtgattttccagccaaaaacgtaaacccgtaattttcccgccaaaaacgtaaacccgtgattttccagccaaaaacgtaaacccgtaattttcccgccaaaaacgtaaacccgtgattttcccgcaaaaacggaaaaccgtgatttcccctcagaaacgtacacccgtaattttcccgccaaaaaaatgtaaacccgtgattttcccgccaaaaacgtaaatctataactttccgccaaaaatgtaaacccataaaaagtaaaatccgtgaatatcttaagtttgatgataatgaattaataattagtaataataataattatttattattgttttataataataattaattaaattattacttaaataggttaactcatttaacaactcaacccatcaaattaaatgagttatgggttgggttgggttgggttacccattttaacactcctagatttatcttaacgtaataaatttcaattttataatggatcattaaaaaaaataatcaaaatgatgtcgttttatagtttagtagagattgataaggaatatttaatttcgttagtttgtttctttaattgacttaaccacatgatcaaaattacaaacttaacaaaagtttggtatttaaataaaaagtaaaaaaaaacttactatatatatatatatatttatataaaagaagaataagttaaggatttaaatcaactaaatggaaaaaaaagatttaaaagaaaaattttccgaataaatttgtttaaattgcctaaaaattggtctcggcatttctcggtgcgtgaaatttataaatttgttgttaatagtccgaaaataagcatgttcagtcttaggggacacacacatcctctcactctcaaatactctttctttttctttgtttccttctcgttacacccaaaataatgtgcaacaacaatatacacccttctatgaaagtgtggcgtaagcaacaagtggcattacatgtatgaaatatttggactaactcaaacattcattaaattcagcccaaaatattacgtcaagtaatattcactccattgtaaattatttttagttttaaatttttgcacataaattaaaaaaacaataaaaaaattattttacttttgctcaaacactttaaaactaaattttttttccaaaacatatacattaaaaatttaaaacaactattataaataaatattaaagcgacaactaaatcgtaatagagaaagttcgtatataaattgaattttcacaaaaaaaaaaaaataaaaaaaaaataaccaataaatattgttgaaaaaaaaataacaaaatatctatttcaaatagaagtaattaaaattggagcttcaagcataaaagtgtttttaaaatctacaatcgtagatctagcaagtcaacttgggttatctttggattgtagtgaatgaaagtgtcgccaggtggtaagcagggaggcttgcacatggctcaccgacactcttaagccttggtgggcgagcaagtacaactaaaaggtttagttaagggtcttggccttttggcttctccgattccaaaagaatagattttgtggttagattatttattttattttattttgtcgtttttttgtttttccattctcatttcttttcactagagtaattcttttcaaaattcgaaatttacagaatatacgagattaaatgaaagaaaaatacaataatatgttaaaaatcataaatgttacatgaactattttgaaatattttgactaatatagaatatatattaaatattataaaacaaatctcaaaatattatatagcgtcacataagatacaaaagaaattatcttttcaaaattgttttgggtatttcaactctactatataatctaaacaaatctagactaatctcggtatccagaattttatttttatataggtatttccaaattttgcatatggggaccagttggggagctgttactcctcaaatctagatgcagaaaacaaagaaaaaatataatagtttatgctaaatcttcttcctaatcacctatttataagcccttttccgttttgattatttgaagtacatttacgtattaaacttttttggagttcttctccctctttctaattcccatttttgtttttcctagagtcgaatctaattgtcttgctcaacatttaagtaaacgatcgtaagctataactcttttgtctccttttccagtttttgttttttttacatcaacccattttttctagggtttttgttgttgaaaagtttttcgatcacacatcatctcttctcattttttgtttttggatctgaggatataaaatggttgaaatcttatttcttctatcttttttggtggaactacaaagtaattgctttcatatgaatcttgagagcataaaaatgaacgaaggggtcatgagttttattttattgcgttttaagagaccagtgtcatggttgtcttttcttgccccaccacttcttcacatcataggacttgggttctcgcaaatcatcctaacctcagctgcattgttcttctcatctttcttcttccctctctcaatccaaaaaccaaactccaaggttcaagatcttagtcaacaagactacttaggagagactgaactatcatctacgaccactaatgatattgtcaaaaataatgacgaagatgacgggacaatccctgatgaggaaagtctcatagagctctccttaccaagcggccattacattggccaccactatagtactatgattggtaaacaagatcaaaagatcatgtacaacaacatcccagatttcaggcttatccaattatcagccgagtatgaagacgataatctcatcgaaatcgacatttccatcggatcgatcaagtgttcaaggttccagatcaaagcctgatacatctttctatttcttacatcactatgaagcgtttaaaattaatatcgaatgtaaagtaatatttgaggttatttttgcacgtggtaagtgctctatgttgtttgttttttgttttagatctctccattcatggggtttttctattgttatatattattagctacattactcttccaagttttaattagaattcctttatcttgcttacacactctaattttgaacattttacgtagttaattttgacataagtcacgtggactagtatttctttctttttgcatgagatttgaaattatttgggaccatgtactatgagtctgtgactgtttaaaccagactatgaagtgaagtctaagacgtttatatatatgtttggcctgaccgtgactataggttaacaaaaaaggcatttgcctcaaatcccagaaatatattaacattttagggtctctaaattcagaaattatgatgtatcgtgacctccaaaattcgctaataacccatgttcgacatttttaaaaaaaattaggcagttaaaaagagaaactgagaagaattgacaaacaaaaatggaaatcaaaatacgaaaaaggaaaacgagatgaaatctcaaaccatacaaaataaaaaaaattctaaatagaaaagaattaaagagttttgtgagtttaaaaaaatacattgtttggattttacaaaggatgaatattaaaatacaatagatgtgctcttcatcggttttaaatatcttggatcttttttgccgattgttgcaccgtatgtatttttcattccactagcggtgtaaccattttttaccattaatgttttagttttttgaatattttatattgtttaaattagagatgttaatgatgggttaaaactcactgggtacccaaaacccacataaaattttaaacccatatatttactttttctggaaaaaaaacacaggtttaaaatgggctgggtacccaaataaataaaatccatatgggtttacctcattgggttatgggtacccacgagtttttttttaaatcctttttcaagtgaatcaacattttcttgtcaaaaaagatttcgcatttttttctcctaaaccacgatttaacagtttaccaccaaaaaaaaaattcaacattttcccgccaaagaagacattcaacattttcccgccaaaaacgacaatcaacattttcccgccaaaacgcaattcaacattttcgtaccaaaaacgacattcaacattttccgccaaaacgcaattcatcattttcccgccaaaaacgcgattcaacattttccgccaaaaatgatttcacattttcccgccaaaaacgcaatttaacattttctcgccaaaaacgacattcaacgtttttccgccaaaaagatttcatattttttggtcaaaaacacaatttaacattttcccgccaaaaatgatattcaacatttttccgccaaaaacgcaatttaacattttcccgccaaaaacgacattcaacatttccggccaagaaaaggatttgacatttttcccgccaaaaacgcaatttaacatttttccgtcaaaaaacgcaatttaacattttcccgccaaaaacgcaatttaacatttttcccatcaaatatatatgtaatacagaaaataaatataatttaaaatatatttataagcaaaatatagatacaacatacatataatagtatattaacaattaaacataaattctaagaaaatgataaaaatcaagttgggtacccacgggtagtctcggaacaatcatgttttttcaggctttacccactaaatcaaaaacccatctaggttttttaaagttgggtttttggtgggcgggtttattttaagttcaggtcggggtgggcttttttacccaccacaacatctctagtttaaattacggaattttatttattaataaaatattgaaaacctcattttttctcgctttaagtcccgataaacctgggcacgacaatgtgtttggaaagaaagaaatttctagatcatatttttttttttgtgctcaattgtgtaaagattgtgagtttcactttctagtttcagtttcaccttaccaatggtggaatgtacaacgtgcttttttgcacaaatatgttcatatcgatttgatagatatcatcttctcaacatgttttccttggcctatatctttttcttatcttttgttttttcatttgagtttttttttccttaactcatgagaaaaaattatttttgaatgttattaggaatgaaaattttcttagcataaaagtaaaaacaatcaagcaacaacatgttaattcatcaaatttggcccatgttctttcttccttaatttatttgtgtatttttatgtagatttggttgagaacaaaacaaaagattacaatgcctcgcttaccatacagaattagagaagagcaaacccaatcaacataaatatagtatttttcaacctctagctttgtatagtgtggatgcatatgcgatgagtcatgagtgagatgtccattgatatgtaataacaaattttggagattttccacacaaaaaaatcgacgtgggacattaactttatcttttccagttagtcttttttttttccaacatcgaaagcaaaaatatttcaaaagtttaaagtgaagttataaataacactgctactcttacttacatcacaatcaagatatgaggttgcatatttgaaagcccgtaatttaatttattaagtggattatatttttagaggttcacaacagattaaaattttatttgggtgttaacacagcctatattacttaatggtcgatactacgtgcaacttcggttatttgtagttgattgggtagggtatttcattttttggtttttagattttttaaaaacgtttgctgaatttaactgaaatcagaaatcggttccggtctgtttggctctcgggaaattcggtttatgggtctgataaccaaatataacaaaaaaaaaatcgataactacataacaattaaccaaaattagaaatcggtttggattggtttggttcccggctaattcggtttatggatctaaaaagaaaaaaaataaccaaacaaaattcagttctcctagcccaatttgttgaattgacttaactaaaagaaatcatttgatctcataggattatggtacgaaacccacgttttctaccattttcctacgaaaatatgtcgtagaggatgtccaataggaaattgtaattggtaaaaattttgtaggaaattttctaggaaataaattcgtaggaaaattcgtaaaaatttcataggaaataaattggaatattttcaccagtttcttatcaaatatttggcaagaaaattgtttcttgagatctactaccaaatatattctaggatattaaaacaataataaaattaatttccttttgataatcagattaattgcaaaattaaattaggaatattcttaacaacaaaaatattcattgattattactccaacaaataatatataaactaaattattacttttattaaatattttcatttaattaaataatagaaatacagtactactgttactccaacaagttaatctcattctcattaatttaataaaagatacaattgagggttaaataatttgtatttgtttctcattccaaaacttcttgctggctagtttctagttgaattttttgttttaaatatataaaataattgaattttaggtttagagatttaaatttctaagtaaatggtatttttaaaagattgaattgtatatttagattgttaaaacacatgaaaatgaaaaaaaaaatattatatatttatctactttagtaagatgaattatatgtaaacctaattaaaatcaagaaatttccaattatattctcatgaattacttttatcaattatatataaacctaactaaaatcaagaaaatcctaattataactgtttatcacttgttttataataacctacgattttcctaccaataacctacaaaccatcaatcgtaagaaattaattgataggaaatattccttcaaaattcctaccaaaatcatttttttttgtcaaacaacttgatttcattcattgcataactgaaacaagtttacaagtagccaaggagcaaaggttaaaaaggcttaaaacaaagtagcaacaacaagaagcaaaggttaaaacaaatgctacacaaagatagcaaagataaaccgacaaaggatccatgaaacttgagggccaatgctacggagccgactggtaccagtgagagcacgggttgtcaaaacgtcatccacaaacagagcggtggacgaagtgatggtcacggtccataatagatgaggtgacattgaaaagattctcaaagtcgagattctcgctgtcccaggtagattaagcaggaaatggtcgtcgacaaggagaggggttgagtgggttctgtcacccggtgggtttagaggtatagagttgagaagcatttggtaagcactgctccatagagccggtctcataatgccatagcttctcaaatccttgctttcatgaatatcaatcttaaaaatgttagacaagtatggctcggattcaatatttaagggatttggggagagaggattaaagaagtttcggtaaccgcctctccgtagggaggagatcataatgccgttattctctaatctaatagcatatctaaaacctagatacaccaagtccattagcctaaagctttgatgagaagatgaagcacttgaggaattacaattggccagggttctagagataaaattacacaccaaaaccattgaaatcgacaaatggcttaagcggagtccataaccaattaaggcgctaagtcgggatatcaattctaatgggctaattagagatttaagagtaacagacctgggccaaactagtggagaaaatgggctaccaaatccaaggatgggctgaagataaacaaataggcccaaaagaggcccacccaaaaggagaaaccctaggaaacctctaggaagaggagcgctgccgtacaccgccgccaacatcgtcggagaagccaatccaatagaaaacaaagtcggaggagaagttttgataatcatgcttgggagagaaaccacttagcttactgatatagtctcgtttgtttattcctaccaaacatatgactatgttttcgtaggaaattggaaaagttggtcccaatggcggacccatgtggtgaaaagaggggtcatttgacaccctttagttttaaatcgggaaaattcccgaaaaaaacccaacttatttaaaatctgccagaaaactacctaaacccgttttaaatagtttgagatttttaggaaattttccggtttaaatcttaaatagttttcatcttgtttcggtgactgatttggtatgaagctacaattttgacccccacccccacccccccacacaaatgcaggatcgattcccgttgttgccattttttctcatatattttattgggccgtagcccatatattttgttgtcaccgtttcttttgtcagattcttctaatattacattcaactttccaaaactataaatataccaatttttctatatcttatttgacccagataaaaaaattccttagtccgcgtcctagtaatttcctaccaaattccttcaatatagttttcatagggaattaaaaggatattttccgacccaattcttatcatttcttttcccataaatttctttctaatctcctacaaattttccttcaactatatattttgtagaaatttcgtataactttctcacgataagtttcgtatgaaaattttctactaatttcctacaaaaactgttttcataacaaatcgtagagatatggtaggaaatatttcatatctttcatctacaaaatctgttttcgtaagaaaatcgtagagatatggtaggaaatatttcatatctttcataccaaatttttcgtaggaaaataggtagtatttcaccatgttttcttgtagtatataaagtttttgtgatgggggtgatggatatcgtttgaacaatttttttcttttggtatgccatcacttgtggaacccttatttctagatattttgaaaattcaaaagcatgattctggtattgatttacatatctagatctcaaattatgtagaaaatcaaaagtaattacggaaaggcttgtcgatttggcgataaaggcggaaattagggtttttgtttttgtttttgtttttactttggttagccgctcagtaaatatgaacagaacaagaccgaacaaataacctattgcatatacaattgttgccaatcggttttgatctcattactcaaaccgattcaaacaccaaagatcttggtttggtttagaaacttcggtttggttaggttttgtcaatagaaagtcacttagtcaatgcattgaaaaagattttccttttttaagaatttttttttcattagcttgccaaaagaatgaagtgttttagtcaaaatctatcaaactcctatttaattatttaggtaagttgacaatgaatccattaattatcaattgaacttcctgtatatgagttttctccataactagtaataatttgatagatttgacttgactacttcattttattatcttgccaaaagaatgaagtatgtattagtcaaatctattatattattactagttatctagaaaaaagcataaacaagaaatcaaactgatatttattggattcattgctaacttacctaaataagtaaaattacaacttgaataatgtttcaaggcttgactataaaacccacacaaccattttttaccatagcacatcaaccacatttattggaccttaattcttttgtgatatcagaatattcaagattcttgaggtaatcatattgttaatatacagaaaatatgcatatataaattttttggatgattttattctcatatatgttttttggttactaggtaagcgagaaaaaaaaagaagaagaatgaattccacatgttgctctgcatgcaaggtcatgaaatgtgattgtgctcctaattgtatatttgcaccacatttcccattgaccaatctcgaaactttcgaacgccttcacagaatatttggagcgggtaatgtcttcaagatcctagctaatctggatcctatccaacgtgaaactgctgtaaacgctttgtgttacgaggccgaggctcttgaacgtgaccccatatttggttgtgttggcatctttaaccactacaaaaatcagcttcaaaatttagatgaacaaatcaattctgcaaagaatgagcttgcagccatcattggacttgataacgttccgcaatattcaagtattcctatgccagctgattttttgactaataagttttctttacatccttatattgaaaagatggagggactagatgaggttcaaaagaaggaacttatgcaactaccacctgttgatgcgcaagttatagtgaatgaaatgtttaggaagagaggaaatataaagatatgtggtggtcatggggatgcatgcgcatcaacatctggagggaccagtgcaactcagaagacccttccatttcctcaaaaccataaccaaccatagttctaattaaatgtcttttgtgtttattttatttttgcatctcaattcccataataatttggtgtcatttcctttgttttatatcatttcgtcagaacttcatgtaatatttcggttgttttatcaatttgaacttcaaataatgtttcgttttattttgattagtctataaccatattacatttgaagatcatttaaaacatatagattatttgatcaatcagatgagagattagcttcagttttcgaaagataaaacttgagaatgaaagttgagtaaaacaattgactggaacaagaactttactacttcaagccagacactaaactagatatatatataaaagcacaaggagactggttcataatcttaactatgaatcagatttgatggtttgagctaagagtttgtatccctaagtcccatcaaagtttgagttatgaagttgataaaatgaaaacgatcaaaacataaaattcaccatagcccacaaccaaaacaaataaatgatcttaaacagaaccatcaatcaatattgactgccagaagatcaatttttaaaggacatacttcggttcccggatgccggaaaagcttgacgccgttttccttgaccaaactctgactgctcctgtgtagaccccttcttctgacctgctgcagcttctctctttccttgtcttcccttgtgtccttccccaaatttcacctctttccttgcagcttcataatcaaaaggctctatgtttaaaaactcggtctgcttttgggccttcttgctcttattcatggatttaaagcacttctgaaagtttgtggacaactccgagagagacattggttcatcttcagcgtcaacttttttctcatcaccattttctagtagtataatatcgcccatctcggagctagacactttggactctgaaactctaccagaagtaccaacgatctctgaggcttcttctgaatcatctttcaactctttcacaccatcttccttggaaacagaggctggcatagtactggacatctcttcaggcttcccataaactttcggagatgtttcagaagttgactttgagtcaggaactttctctgtaaacgaatggaatgacaggtttacagatgatcttatctgttcgagcttcacatcttccttcacctgaaaacatttttatcaatcattctgcaaccaaaaccaactatagagttttcacatatataaactcaccttctcatcagttcgagatttcttcttggaggctgcatttcccagcaaagctcctaaaccactgcttggtttcttagagatccgaacagccgcagaaacctaataaataacagatatgtctttgagagcccggcatggatactaaagagcaccaaccaaaagaaacaactaggtgtcaccttagcagaaccaaacaagccggatcctaaacctctcccttcattagtatttgctgcacccataattaggtccctggtactctcaagctgcgaagaattttccttcagacttggagaagccacatctcctgtgtgcaggtctttcttctcacttataggttcaatattcttatccattacctacaatataagaaggccacattttaaacagacatggagaatacaggaaaacagttgaaaccaataagtatcacatgcactctgaattcgagccataaggtgaggtttcagaaatatgaaatttggattcataattagtctttgacagtaaattattccaactctaggctcttgttttctttgcaggttgagttttagagggtttttaataccctaatcggctttcaactagcttatacacctcaaccgaaagcttacaataataattatacaaaaagggaatagaaactaaatcaatagagatatctcacatttccaggagacacatcttttaaagatagagcagcagactcaaatgctgcataatgttgcattgattgcctgatgacactgaccaccgaatcaacattacgctcgatataaggatgctttgacttcaacatccgacgcaattttccaacactatcaggcatctccttggctattaggatagcaacattagattacgttaggaacttaggaattgccaaaacaaatccactctctgccagatggtaaaattgaactctcagctctatatacctatttcaaggagaactttgtttggcaatacataaccagtgctctcatcctccgcacgtgcaatgaaatccctccattcacaaagcccctaagagaaagtaaattttaagttagctttaaatagtataggaaaaagcagtgtaagtatgcatcattcttcacatcacacgaaaacatcataccgcaacaatggcaagttgagctgcattaaagcccgctgcttgaagcctaacaaaatgccagaatgagaaatataatactggtttatgtaacttagctcaagagaagccagctattaaaacaacaatttgattaacagatttaatcaacaaacgcatacaccttgtctgctgaaacaaaataaaataagtatgtagaccctctcaagaaaaagcaacaaacccatatacgtgaagatatgaattctcggtcaataactctttctcatatagttgtgtgcacacatcgtaactccgcttgtagacctgtaagaaacagtaagacaaaaataatagaaagaacatattattcatgggctatatatccactggatgtaacaatatctagacaagtagagtcagttgagctgaattaccaattttagacacatgaattccaaattatgtggtaggaaattctattttgactatgcttacaaaagtcaattcagacagagaactattttatgcatgacggatgccattgaaagttattcttaaaaagtattagagtgttgcaaacctagaaaatcacctaggtgaggcagctagtatataataagaacactgaaaacccagtacctcccaaaatcgctcttaaaaaacataagaatgttgcaaatgtggagaatcacttaagttaggcagctaataaaataagaatactgaaaacttagcctaacctaagtgattggccacatatcattttccactaacaatgttatgccatcaagttttttaaggctacacaaattcctatttgctagtgtgggaaagtaacagaaagatagtaagaaccaagcagacactagcaaagacaattatacatctatcatgcaaataccaacatgcagaggaatattatacttttcagcatagtttaatgatgactacctcaagtagaggagagtcagtatgcgcgtcatcctttgccattctctgcagttctagtttgattaaatcatatatgtataagaggtagtgggtatcttctcttgcatatctgcagggaaatccaaaaatgtgagctcaagtcaacttaggccagaacagtagtgaaaagacaaaggacagagaagattgaccttgtcatttcctctggaaggggtcttattctccagtctgcattttggtacctacagcaataaacaaatcagaatttggaagtccagtgatagacgagagtgatacaaaatccagataggactagtactaactctttatttgcagtcactccacaaaaatgctgcaaaagaaactccaggctatttctctccaaatttagaaccctggaggcctgaaaaaatcaaattgtttctacttaggggaaaaaagctaaataattaaaatttctttcatgtatcatgtatgcttcttagtcgccacagtatgagatccaaagctattcaactaaaccaattgacttgtgtcttacaacacataccacaagttactaaaattcaggagggggttgaaattatctcctaaaaggacaagaaaaatccagagttgtgcaaatcgttgccagttatccctttgatggtataattagctaaaaccattctcaaaatagcttagttcagtgtactttgatcggaagaaaacttctaattttctctttccaggcataaaggaaaagagaagaagaaagcgggatattaaattcaaaagccaatatgttgccatcattcttcttccataaagcaaaaggtgtatgttatggatactggatctcctatgttttacaggaaatgtcatagaaaaaaatagaagatcatcgctgaaacaaaatcaaacctgtcctgtgtcaaagagattgcagacatatatgccgaagtcccgttgaagccagataatatctcgatctgctccatgcattacctaattacataaacagatttcagagcacagaaaatatattttagaccttttgtaatggaattgaagtatcccaggaaaaacctttttctttttagggtctttgaatatctcccttagataaggcccaatgtgaatacgaagcttaaatgtatcaactatataatcctctgttctggtggaaatttgcatcaagcatgtcaatccttgaaaagatctatactgattatgctccagatcaacctaaaaagagcaaaaacaaaaaacttaagagaaaggggagaaataagcattggcaactcaaacttgaatatatttttttggcttatctaatcaaggagagaagtcttatattctccaaaccaaattgctgaagtaactatcacattggtagttcagtattattctaaagaaactctgtaaaagtgtataaccaagtagcaagccattatgtaataatgataggatcatcaaattccttactacttctaccaagagacattatgatcaaacaattcactgcagactgcacattggactactaaagacaatcagaaaagaaatttaccgcaaactcttcaacactacgcagtttggcaactaattctttcagatctttcacttcctggacgaacttgaatggagtctgttccagtggaaggggcttcacaggttccatctcgtttacatctttgtcaacgaagtcaagcactgaaaatttctcctgcatagtataataaacgtataaaaagagagaaaaatgccaagaaaaggcca

SEQ ID NO: 770 - DNA, 55790 bp, Arabidopsis thaliana
aatactgacagccaaaacataaccctaagaaagttaaaaacagatcttttcccaagccaccttttcatcaatacaatacggtaagcttacagacactagagtcttaatgtggctgttaagaacacagataatgctaaccaaaatacaacactattggcagtacagggcaggttcttaagaataacttcactacattcaaatagaaattctcattctacactatactggtagcatcctcactaaaccaagccaattttcaaataaagtctaactctatccaaagttcaaaccatattattccacaacaactaaacagataactctaaaaaacacaaaacactaaccaaaggatgcatagcccgcagatcatcctcgctcctctccaaccaaacatgctcaaacggtagattcgcattgttcaccaatatgttatactcctcttgaggcttctttatagttggtacatgaaaaggaactttagccttaccagatgaattcttatccctctcagccatcttaacatcaatcacagaaccaccaccattaaccgctgccgagccagtaaccacattaccaacaggcttcttcttcttcccataaaccatctgaaacccatcatctccatcatcagcaacaacagacctaccaatttccttctctttcttcctaatcctctgaaactcatcaacagaaacatcaaatctctcaatcaattcatcattcacgttacataaccaatcctccgcatatacgtcatcaacatcgccaggaaacttcatcgatttcccccaaacttgctcggaatcaccgatcgttgcaagagttgattgcgaggttccagttatctcatcgattgggcgtttgaactcatcgaaattgtagtaaaagtgaaaatctctactcgttggaattaggcgagaagacgatgagagtctcgagagagtcgaagagaaagaagaaccatcgattaatttctccagagactttaccttccaagagactggtgattcgtcgacgtccatgttaccgtcgctcattatctccgctggagaaaagatcaaatcagagaattgtgattttagggtatctctgggcttggctagggttttaggaacattattcaatgagaaactactgtggagctgttttagtatatacacttaagggcaagaacgtaatatccggtatttaattaattctaggatatatcgaaatatataaatatttattttaaagatttttaaggatatttcctactcgtttgggataaattagctactccaaaaccaaaaattagcaaatcagatctttgttcattgcatatatgaaatctcaatatttatgcaatgacaaattccaaatggttgggggattcaaaaaactcaactagttagacgaattcaaacaattcaactaattagacgaaattcatactcacactatataaaaggttttgaaaatggatatatatctaaactctttgttctctcgacaaaaaaacaaaacaaaaactaaaatctttgttcgaaaaaacgttatgtgttagtcgggggcttggtatgggcataaagtttaatcaggaactctcaatctaaatgtatgcataataaaaataaaaattgttttatatttccaatctaaaaataatctgggtatgcaaatttaggcgaaaagtaatcggatgttatcttttgaagaaattagtcattaatcgaggtggatagaataagcctagcgtgcaattaagtggtgagtaatcggagctaggcggaaattttagaacaagatctaaaactaatgaatatgttggtaataactagatttcttagttaggaatgtacttaccaattttagtgcacgacggagtccacttgcccttccgcttgcgtcatcaaacaacagatctagtcaattttgtttttgatctcgtcaactaaaggtgtcagacgggccggcccacgcccatctagcccgccccgcagtgggctttcttttttcgggccgcgacgggttggtccgtttaggaccgcggacaaaattatcagtgtccaagtccggtccgcaaagcccaacggatatacgggtcggcccgcaggcatttctctgctacgcatcaaggatttttgagctgtggcattgtctgtacaaggcaatatctcgtccagagccgtattgcttgatggtctctcaacccattcgttcattgccacacatgtgtctgcagtacaaatcgaagaaactgcaggagaagaaatgataacaagatcactaaggtcaatacattagttgatagttgagaaacatgtagtcaaagatgaaaacattaccgagaccaagaaaagtcaccacaagcatgacgattgaaactacgataagcgccactctcctgcgagtacagaaatgactattatacatttgtttttcaaaatccaaagattctgtaacagatagactgttaggaggagtttgttacacagaatcaaggaaatgtcttatgtgattggagttactagtcgatttctcagtgatagtagctacagaagaatccagtttcgctccgatctgatcgatttcagtttgtacatttgcaggtaaaagaacctgaagaactgcagcctacttggctgaagcaagataatctgagatagctctaaaacaaaaggatcataaaaacagaaccaaactaaaacaaaagtcaggactgaaacataattgtaacaagttaaactcaaatgtgaaacagaaaatgaacttaagtcaagagaaagacctgcaacttcttcaacgcaaacatgataactgaaacatgaacttaaactcaaatccaaacatgaatatcaaacttaaaataaaatctgcaactcaacattcatctgcatcatccacaagcgactggaaagaaggtagagtctcatcttcagcatcaaatttttcatactcctctacaagtatcacacaaactaacaatgttaatttatagactaagattgtgtgactataaaacttatgaaaaacaacttacttaccattttcataagattcaaaaccttttaaccaattgcgactgcatattaatgcttgaacatttctcggtaaaagacgacttctatacttgcttagaactcgagttccgatgctaaacgatgattcagacgcaactgttgtaataggaatgcttagaatgtcacaagccatggaagccaattttccaaaccgtggaccgttatctttccaataattgagaatatctaaactcttaaacccttttacgttcattgccggttcatccaagtacatatccaacgtcgactttccattggcaacaacatttgctttgcgaaaagcaaagaaatcctataacaaagataagaaatcaaaataacataacataaaaactaatgacttgctgtttttcataaaaaaaactgcatattaactaacaaaaaactgcaattttactaataacaatcttaaacaaaacaaaacataagaaacttacatcgtaattgctaaaattcccttttgcagtttcatcatcatgtgtaacatcttcacgagactcagttgtaggtgataccgcactggacttgttctcataaacttcaaaaagtttacgtagttgagcacgcaaatgtttaattcttttctcacgagtactaatatctagttttgcaaaacaataatctgcaagtgtaagcttcaacctcggatcaaataccgtagcgattgcaaagatatcacttacttctgcccaatacttatcaaacctctctttcattaggacaatcatgtttctgataacttcatcttggctggactcattcactgttaaccagttttggatattccaaacttgcataaaatacaaattcgaagttggatatgtcaaacctgatataagattggttatttgatcaaacggctctaaaaaatcactcatttgctgtagtcgatgccattcagcatctgtaggatgaaatttgtagttttttggcatcaatgactttgagattaccaaatgcagctcgatacttcagagccctatcaagcatcttgaatgtctaccgtaatggaaaaaactttcttctcaattccccagtccttcaatttcccaagtatctccatcgctaagttcattcctgtttgcggtggagggaatgcacaaaaaactaggatcttgttattgagcttccaatttctgtcaatgtaatgtgctgtaagacacatataaccttcatgagtgagcgcagaccacaaatctgtagttaaactaatccttccaggaagttgagctaactctctcttcagcttatccgtctcaatctcataaaacttataaacatctgcagcagctgtgtttcgactaaaaaacttgacatccgcatttaaatacttccacgtttctctaactctctcatactccacataagaaaatggaagatcatgttggataattgtcttagctaccaattcccggaaaacagattgatctatctttctagcttgcaattttgcttctgcattcaccatcatctgactaatatcaccatttctaggcacgagcttacatatttgcaaatgacgtcgatatgtattcgtaccatttttgtgtgcattgtacgcataatctgatttgcaatgcttgcacatagctctttcttcactttttcccaaatgattaacctttttaatcactatgaaatcgttccagacttttgagtattgccttctcttctttggtttcgatgactttccattgtcctcatcatcatcaacatcatcagctccattgtccccatcgtcatcttcttcatcatcatcatcttcgtcttcatcactaatctcaaacactttttttggttttttagatgcttcagcttcagacttttttcttctctctgttttagaggcagaagcttcatcacccttgcctcttttttgggtttttgatgcttctagttcacacacttttttcttctatgtcataggtgttcctgtttcatctctcagttttcttttcagctttttagatcctcctgcttcatcattagcttgttgttgttcatatctagcttgttccaactcaatgactctccaagatttcacatctaatgatctcaaatactcagcatcaacagaatccaacggatcctatcattaacaaaatacaaaaactagtcaagactagcaaattgtttatgtgtagtcacaaataacataccattacaagtgttagatgctctgtttgatctgaaatctgaatctaaaaagcttcaatgatcgtaaaaaaaaaaacttgaagagatagagaatgacttttcagtttccttgttaagcaattgagcgtgaactgctacttctaggttttgaactgcacaagaaactttaatagagagaaaaggtttgaaagcctctatgagaagtgaagggttttaaaagagttggtttttctttcgtgggctacccgcatacccgcaatccgcaacgggcttgtctgctagaatccgcagtccgtaatgggcctgcccgcgaggcccgctaatttgtggacaaaaaaatcaacgtctaagcccgctccgccatgggctacttggacaaagcccgcgggctagcggctcgcttgacaactctatcgtcaacgactcttccgctttctctcacgatctctctctcttaagggaggcgcacaaaattaacgaaagaaaccctaggatccttatttatacatcttcataatttttgcttagcatttcggtttactgggtttagtgggctttgtgggactttcaaaaatttaggatttttcataagtttaaggttttttttcccaaaacaaattgattgggtttgatgggctgggacaggaatattacatgcttttgagaagttgctactcaattgactttaactttatttgttattagatttggacccgtcagatttatgcgggttttatatttttaaaatagaataaaatttacttaggagactaccacaaaatccacatctatttagaaatgtatctactttaccacaatcaataatgttccataaatccaagtttaattagaataacttgtttatacgtgtcggaatctagtgaattgattgacataggtgtcagaaacaatttaattactaactttgaaaaatctagcttatacaattagattatatactttaataaatattacatgtgattcatttcttttcaaaattagtattttactatattattttccttgtttatatatcttcttagaaaataattatagtccattttcttttaaaatttgtaatttattgtataattttcaagattgatatatttttatatgctttttcagaagtaattacaatgctttaactttaattatttgtaatatcttatacaatttcctttttatttacataatttttcttttcacatttgtcaaaatcttagaattcatagacttgatacgtgtcataatagataaattcaccattcacgttacaaaagccaatcttttgcatccagttcatcaacatcaacatgaaacttcatcgattttccccaaacctactcggaatcaccaatcgtcaactaattgcaagcttccagctatctcatcgataagaatgttacaggtaaaactgtaattttaatttcctaaaacctgctcggaatcaccaatcgtcaaatactttcttttaacttttgtatactattttaattttactttttctctataaaattattttatacggttgagtcttttcttagtaacggatgcgttatacggttgagttttttcttagtaacgcaatgtaacatatttttttatttttaatttatttatagttgtgttttttattgtaacctttcattaatattttcttttaatgttaataattaataattgtgtatttttacaaagttgtatctagtcatttaaaattttatcttttcatccacttttatcttttcttcgaatgcgttcttaaaatatttttatttcatttttaatttaaataaaaaaattatatggttgtattttttcattgttacctttcattaaatttatcaattacaaatttgttaaaaataagtttttagcaacatcgcggaagttcataagctagttaagttataaaacataatgtcaactttcagacgccaatagatgacgacttcttgtcatatttgtgacaattttgaggttgtaagtctatatcataaattcataatgagtaaaagatgaaacgttataatggtaacaaaatatgataatattgagaatattttagttagtatatatgacggatagttgtgattttttttgtcatctcctatggcgatttaagtctatagtttttttcataatgagtgacgaaattgagatgttatgatagtaatagaatgattgttttgagaaaaatctttaatggtcactgtaacggttaagtaacatttttattagtcattaacggtcatgatttgagactatggtaataagtaataaaattgatatatgttattgtgatgaaatattacgtctcaacaaaattattttcatgtagtatatgggtatgcaattaacatatcatacttaaatcaagtattcattatactctaacccaaatctaatgttattggttagtggattttaatagagttattgtttagtggattttaatagagttaaactctaacccaaatctaatgttattcattcattgattttaaatccattatttaaatcaactgttactagttcttatacttacaatatcttcattaaaagactttaaaattaagtgttattggttttcatatttctaatgtttatattactagagtcttaattctaatgttattggttctcatattcacaatgattagttcaagtttcatgttatacatgtttgatagattttcacaaatacttttatttgaaaagatttgaatgaatctcaaactgatttcatgtgtaaattatagcaatcaaaatattgccttgtatcttgagattttcacaatctacagtctcatgagaatattacatattgccttgttcttttgccaaaaactttatttttccttccacatctagtttcacgttacatctcggactttcttctctccttcttctttcctcttccctttcacggtaaagtctatctcttttcatcattatagtagttatggctcgttaatttgcttgagaacaaagtcacttttatcacttttgatcatactattatatatatttttattgtaggttttataatggaacgaaatctttgtgaagaagatgattcagatgtagatattatgttattgatggtggttggatccgttgatgcttatgaaagtcaaatcccacgtccgatgcgacgacaaatcacaaaaaagggacacgcttatatacaaaaggctttgaaagatgatcctattcattttcgtcaactatatcgtatgaatcctgaggtttttgcggaattatgtcatcttctccaaatgaaaacaggtttgaaaggtacaccacatgtatgtgtcgaggagatggttgctacctttttgatgacagtgggccaaaattcaagatattgtcacacaatggacactttcaagagatcaaaattttcaacaagtattaatttccacaaggttctcagagctttaaacatgcttgcaccaacattgatggccaaggttacaaatacagtgccctcaaaaataagcaaaagcacaagattttatccttacttcaaggtacatatcttttttgtgtgaataatatttcttgaagtcttatataaacagtttttaatttatgttaggactgtgttggagctattgatggcacacacataaatgcaatggtacaagctcctgaaaaggctagttatcgtaatcgaaaaggagtcatttcacaaaacgtattagctgcttgtaacttagatcttgagttcatatatgttctaagtggatgggaaggttcggctcacgattcaaaagttctacaagatgctttaacaagaagaactattagattgcaagttccagaaggtaatagattacaagttccagaaggtgatttatcatatgataatttatttctaatagtgtgcttccatgtttcaggaaaatattatttagcagattgtgggtttccaaaccgacgtaatttcttagctccactacgaagtactcgttatcatctacaaaattttcgtggtgaaggaagtgacccaacaaatcagaatgaattgtttaaccttcgccatgcatctttaaaaaacgttatcgagagaatttttggtatatttaaatctaggttcttgatagttcttgcatgtgttgccttacataactttcttcgacagaaatgtcggtcagatgaattttcaagtgacgaagaagatgaaacagatgttgacaatgcaaatcaaaattctgaagaaaatggtggtgaagaaaatgttgaaacccaagagcaagaaagagagcatgcaagacattggcgagcgaccatagctgcagatatgtggagagatgctactaatattggtagccaaagatagtaattcactttttataaagttcatgtatttgtctttctttggtgttgatggagacacttttcccgtgtttgagctgaaagatttatttttgaaccctttacactttcttttattattattatgaacgagttattgtcgtgaaatgatatatgacatgcttccgggctaatctcatcgacataattagaaactgagaagttggccatgggaaaatgatacaagacatacaaatacagaaatgacaatgatgtcaacatgacacttaaccataacgtttaaattatgttctactcatatcggtggtggaataattataccttgacctaagaagtatgggtttatgtgtattcttttgtaaacgtttaatactattagttatgaacgagttattctagctctatcatctatgttacagctaagcttttggagttatactataaaacattgttcattattcaaatcatatcaattaaaataaaaagtacagaatcatatcaattagaatattaccttgatcatcataatattctagttgctactaaagaatagaaccatattacttagaatatatattaccatgatcatcataataatatcacaatctttttgttatattaacgtatatctttacgatcgcactatctctataaatgtcacgtacatctctcttctcattctctaagcatacaagctcattcgactgcaaagaaaaaagttcacttgttcttacttttttcttttgttcttatttacagaatcatatgctggaagtgtgatattgattaacttttgaatagttaacttttgtttcccgtctcactatttccttgttttttgcattgacgtatggttattttttaataaaatattgcaactttttcatgttttaacgtatatttgtttttgcaatttgtcataggtatcactatgggaaattcacaacaaaaaaaaagaaaaaagggggattataatccgtggtctccagaggagactaagctgttggtgcaacttcttgtggaagggatcaacaataattggcgtgattctaatggcacaatcagtaaattaactgtggaaacgaagtttatgccggagatcaacaaagagttttgtcgttcaaaaaactacaatcactacttaagcagaatgaagtatttaaaaatacaataccaaagttgtcttgatcttcagcgtttcagttctggttttggttgggatcctttaacaaaaagatttacggcttctgatgaagtttggagcgactatctaaaagtaagtatctcattttcttttttaagtgaacatggtcgtacttacatattattaatatgtccctttgtttttgtaggcacatccgaacaataaacaacttcgttatgatacatttgaatttttttacgagttgcaaatcatatttggggaaggtgttgctactggaaaaaatgcaattggattatgtgatagtacggatgcacttacgtacaaagctggagagaatccaagaaaagaatatgtggatgattttgacaacgtgtatgagtatgatactacaactcatcatgagtcatcggagcattacacaccatttatgtctcatggaacttcagaaagtcctacagagaagcttcccccacgtaaaagaacaagatctgagagaagtacttcacaaaaagaagaaagtcctatgatggttgttagcagtaaaattttggatataatacaacaaagagaagagaggcaacaaaaagaagtggcacagaaaaagaataacgtttgggatgctataaaagaaatttctgacttggatgaatgtattcgttacaaggcacttaccaaaatttatcatttgggaatacaagacgttttcgtgagcatgtcggtggaagagaggctaggatgaattcaaaccattatggaataatttgagcttaatttttattttctttgtttttaaagtttttaatttggattcaccaaaattattatgaataaattctttatcttattttttattctcaaacttcaaaactctagaaaacttgaaacaaaaaaataaaaaattggtcaaagttttgttagatttcgtttagattataaaatcatttgttatagagttcaattctattagaaaaccaaatgacatcatatatcactgaaaatagacttccacgacagaatgaatagtgattcagtttaaatgaactcagatgttttgaaatctgataaacttcaactctaatggagttgacttcaacttcactaaccaataataccaccttagtttagtggaggatctttgagacacatgcggttgctaaaaataactacaaaaactttgaatcttttgaatacgaattttatttaaaatttaaatgaaaattaattatagatttttgggttgttcaaaatgtgtttgtagtttctaagagaacgttgaatcatattattcatcactttatttcatgacaatatgggtatgcaatgtatgaattgtttatttttaccagcgtctatcttctataagacaagagtttcaacgtgagatatgctaacaacgttaaaactaaagataatacaaaattaaataattttaaaaagattattatttattggtacgacaagagcacaaactcactaagatatgaacacttataattgtgacatattatgaacacctatattttatctttatcatcactctattattctacatatctttgggtatgcaatgaacaaatttcacacatttactttaatggtgtattggatcatgcatgtggaaactaaaaatagtctgacaactcttgaatcacccgaatatatattaattttgtttgatttcaaataaaaagtgaatgataaatttttgggttgttcatattttccagctaattagtgaaggaaagtggtaaatatatatatatgattgtataagacaatgtatatatggttgtataagacaatgttaaatatattgttttcaacacatccatttcctggcacatgcctttctacttccacaagttttcaaaaaaatcaagtatgttcctatacgatgagatggaaccagtatcggcgcaccttccattgaggcggttgttcgaacattttttgttttttttttgtctatttgtggttaatcagtattcggagactctcaaatttcacagttaaactctttacaaatttctctaggtgtgccattttctttagtgtacaaaaaaaacttttttgttcgaatcttcatcacagatatgtctttttggagctctttcatcctatccaaagattctcggaaccgaaaaaatgcacaaagagaccatgcaaatgaaagatactctactttcctattatgtatgagtttgggacaactaactaaatcaaacgacacgtaagcccaacaaaacaattggtagaagttgtagatttaattaatgaccacgggcaattaagatttattgaaaccatgtagattataaattataataatagtcgaatcaaggccgtgaaaaaaaaaagtcgaatcaaggcctttgtaaaaaagcccatgggcttttttaaagaaaactaaatgtagaaacgtcctgaagcgaccttagaaaccctaaacactcttacgatcgtttctggttattacgttttcgagccgctgtttcttcttctctggttcgcgtaaatcagtatggatcagaatctggatccagcttttgggataattttcctctgggatatcgagaactgtcgtctcgagtttaaaatggtaccaaaaatgatgaacaacattcgtaggtctctgagaagggctgacaacaggtatcatatagtcaaaaaggttttggtcggaaaccagaaccttaggttcatcaaagataatctggtctatctacatgtagaaggattcgagttctatgacataccgcttagggaacacacctgccctgaaccctgcggttttgtggttcaacattcaccgttcaaaaggttatcttaccaaaactactttaacaaaaagaaattttacaaatccctctacattaaaagttcttaaatcaaaaactgtccagtaagtagtattgttcaaaacggtgtgttttaaagttatttgttaacaaaaaaaaattccgatatcaatccataaatttgtgtaaatgattataaacgactaaatttgggctcaaaacattattttgatgaagagcactaatggataaaaataacatttcttaaatatttgtttaaaggactagtacaataacatttttaactattttaaaaatatatttatagttggtctgagtaggaaataaccgaaatcttagttttatggaaaaatattataacgttctatgtaattaaaatagtgtttaagcatcagtgtttaaactctgtaaaactgtgtaaatgattatatgttttcttcttattttgacatttaacattaaaatatttcatgttgagtcgaactggatcttcttaaaatcacaatatacagaaaattagtttaactatctttatttaactttttttttggtcaactatttaattagtattactactgtagtatcatagttgctccaaaaaaaagaaaaagtacaatagttttctattttattcaatatttgtctaagccacaaagaaagtaactctagactgacaagcgtgaaaggaggttaattagcttagtctcgtactcacacatcatttcaaaagtagagagcaacatcacatgacaacaacaagtgatcccttgtttctgaatacaaagaacagagaccacaagtcgtttggagcggctctccccagccaacaaatcttgatttggtaggcaatcggtccaggtttgctatccacatgttaaaagtatgtttaggcgtggccgctttacattaaaccaaaccgaatctgacgagtctaccaaatcagctcttggtcttagaacagaccacgttcttgatgatgagaagcctttgcaacttatatgttctccaccacccaaccataagaggccatacctcgagaatccttttgcaacttatttttctttccaacatttaaagcacatttattttcaacagattacagttagacacaagcattgttccattgccgtttcatggctataaatagcttattcctcattgtttcaacagaattcaaataatttctacaaattgagattaaaaaatgttcgacgactctacctcaatgcttgcgtttatcctaggtttgcttctcctatcattaacaatgaagcgtaaagagacgaagaaaaccatgttaatgactagccacacgagaaacctctctcttcctccggggccaaaatcttggcctttagttggaaacctaccagaaatactagggaggaacaaaccggtgttccggtggatacattcattgatggaagaactcaacaccgatattgcatgtatccgtcttgcgaatactcacgtgatccccgtgacatccccgagaattgcaagggagattctgaagaagcaagactccgttttcgccattagaccgctaacaatggggacggagtattgcagccgcgggtacttgaccattgcggtgcagtcacaaggagagcagtggaaaaagatgaggagagtggtggcatctcacgtgacaagcaagaagagcttcaaattgatgcttgaaaagagaaccgaagaggcagataacttagtccggtacatcaataaccgctgtgtcaaaaaccgtggtaatggtaatggtcttgcggttattgatttaagatttgtggtacgacaatacagcgggaatgtagctcggaagatgatgtttggtatacggcattttggtaaaggaagtgaagatgaatcgggaccagggtccgaagagattgaacatgtcgaatctttgtttacggttttaacccatctttacgcctttgcattgtcggattatgtcccgtggttaaggttcttggacttggaaggccatgagaaggttgtggctgacgcaatgagaaatgtaagtaagtataacgatccttttgtcgatgaaagactcatgcaatggcgaaatgggaagatgaaagagcctcaagattttctcgacatgtttataatggcgaaagacaccaacggaaagcctactctatcggaagaagagatcaaagcacaagtgacggtatgcatattatggacttcgcttagtattttttttaatctaccacaatatagtaggtagagtattttttttataacaagaaactttcgtcgtttcatggccaatagtgatccgactctgataatacatgtgtcatgtcgacaaaagtaaatcagttgtccatgaatgtagtacttaggatgggtaaaactgtaacaacacctctgcaacctcaaagatcatggtaaattgtagtggagtttctttaggaaataaagctctaaatattttcaattttgaattccatgcattagagatgtattttcacaagcaaaatgtttaaatttcttttacaaaaaaacgaaaaacaaaattatccgatgatctctaaattttttttgatggttgattatgttggattatgaaggaactaatgttggctacagtagataatccgtctaatgcggcggagtgggctatggcggagatgattaacgagccgagcatcatgcaaaaagctgtggaggagatcgatagggtagttggaagacaccgttttgttcttgagtctgacctccctagtctaacctacgtgaaagcgtgtgtgaagagacatttcggttacatccggtggcgccattcaacctccctcacatgtccactgctgatgctgtggtggatggttacttcatccccaagggaagccacatgcttattagtcgtatggggatcgggagaaaccctaatgtgtgggacaagccgcttaaatttaaccctgagagacatttaggcaataactcatgtgtggaactaaaagagcctaatctcaatataatatcgttcagtgcatgaagacgagggtgtatgggtgcggacattgggcagccatgacgtacatgttgctggctcggttgattcaagggttcacatggtcaccagtgcctggtgaaagtaaaattgatatttcagaaagcaagagtgatctttttatggcaaaacccttacatgcggttgcaacacctcgtttggatccacatgtgtatccaacctgatttaaacggtatttgttttgtttttgtttttttcctgataagacatgtaatggtattatgttaaatagtttatctagaaacagctatcatgaataatataattgaatttttcatttactttatatttaaacataagattgaaaatgtattaacgtctatttgcaagtttaattgatttgaaagagcaaatggaaaattcaagcaaaaatcatgtcttgttggattaaagttttggtttgtaaataattaggagatttattgggttgtacataatcatgatcatttatttgttcttagttagataattaggctaattcatatcctattaagtgtatctcttatgtacattcggcaatagaaatttcaagcacaataatgtgttgttggatttaaaatcttgtgttatttgtttaatgtctcataaatagtagttaatatttgatgatttgtttttaatgatttataattagaaatcaattactattttaaaatacacttatagaattcaaaatcaattaaaatctaaaccaataaatcatgtttaccaattagtcttcgtcggtatagatgataggtttctaccaacttatttgttttctattaatccgacctcctcctgagaagccaatgcttatgaaatcaagacacgtttgattagattgattcaaaatttcaaatctcttaagttattgggaacccctatgatcatttggatttttttgagaggttgtgtagtacgtttaaaaatggaggtgtgcccgaagatagtttcaagctcattttgtttcctctttctcttagagaaaaagcaagcctgggagaaaactatgtaggagaaaccaaaccaacaatggtttatgctcaaatgagcttattaacatagaaatctaagattgaaattagatagcttaaaagctttattgaaatgtgaagtaaaggaaagggaaagactttagtttgtcaccaagatcacaaatgattctagatttgatatttcattagatgaagggagagttgtttccaactctcaaggttgtttacattgattttataaacacaaatttaaatgaatctctactagctaaaaccctagttatatgggctaatggacttctcatatgactctatcttgggcttcctttgggtcctctaatatgtcgataaactataccatctcatttggtcagttcttgggatgcgtgtaagaaaatcatccatctcaagttctactccaagcaaaaaacgcaaaagtgagaagtgaataatggggtttaagcaaggaatggggacggcttaatgattatactcaagattgccctcatggattcaaaaaggaagttatttccttagtatttatattgtggagttaataaggagctaaaactgtttttggacatgactagcaaatgacattttgcaaatattaccatggactaaggagagttacttgttgaaaatttggctcaaagtgatctaagctacaatgatatatgtgacaggatcacctttggagataccaagtgacgactacacatggaaaaaattgcaaaatcaattagattaggtggagaagttcatgatgatgcacaaagaggagttaacgatgttaccacggattttttaaagtatatatccaagatgaagatatcactagtccaacaaaaaaactattcaattaataaattttttattttttgtggtccaacttcattttattaaagaatctaaatggcattacacaaaagattcaatacaaaccaaaaacactgataaaagcttatatcaatagaattcatagacacgtgtcttaatagaggataaacatgggcacgtgacaagtttggagaaaagttgttttttcatgaacttatcaccggcgaactacttctggtcaccgggatatttctttaccttccagttcttcatcatcacccttcttgataataataaaagaaatatatatatatatatatatatatatatatatatattataaaataacagaatacgagaatgcatggtcacatatgtcaactatactattgtatcctcagctacatgaagtagatgtattgcatgaccacatgtctaaactatataacgtcatgtggtgttccatagacatacaatctggtacaccaatggtttgactccagcgaagacaaacaatagcaggaatggaccagaaaaaatattaaaaaatattatttatttatttaataataaaaaacaaattctatttttttatattcattttaatgtattgattcttataatagttagttttcattttcaaaattaaactaaatgtgtaataaaatctactaataaattttaaagagataaagatttaaattaaaaccggaattttttattaagatcatttaagtaaggaaattgcttatttttacattttaaattaaacaaatactaaatttcttatttggtttatttatatacaaaaaaaattcttcaattttttcaaccacaaaaagtatattttacaataaaaatcattagaatcaaacccaatataataagattttctgcttttagtttaaattttaatatcttaaaatgtgagaattatttttattatttagttttgaaattgaaaacctaactattataagaattaatgcattaagtgtttttgattatagaacaccatataaaattattttatttttaattttttatattaaaataaatataagtgttttaaaatatttgttttgatcaataccagtcaatgcttgtcttccccggagtaaatttattggtgtaccagaattttatgtctatgatgttaactacatgaaatcgtatagctcaaaaatgtgaccatgcaatacatctattttgtgtagctaaggataaaataatatacttggatgtgtgatcatgcattctctgatacttagtgtagttagaaatattttttccttagatttatttgttcaattgtgactataccaattagaagatattttctattatatatattgaaaaaggacctcgtttaatcgtatcgtcgatatgttttcaattaattatctaatttttaattaaaaatgtactaaacacactaaacaagcaaaataataataaaacaattaaaaatatgaaaatatgaatgagtctatggtgcagttttgagaaataagttttgataatacttttcttttagaaattatataaaaaatattactgtaagaaattattatgatccctataaacaatttttttgcctccaccactagcacctctatgagtctcttactaatataactattagtgtttttaatgtaattaaattttttaattaaatttgaaactataaaaaaatataaccaatcataagaggaaaaatgtaatttggaattttggagtttgctatttaagagagtcttcctactctccctcctcactttttctaatttttcatactcttattgatgagtctctaattaagaaagccatcaatgaaatacactttaactgtcatagtataatttataaactaaaattagtgaaactcttctataaaaatactatttggtttctatatattttgaaaaagtgggtgattggttcggctgtatctgtagatttattgcaatagaaactttgttttaggtgtgatgattatagttgtaggttttatttgtgtagaaattaagtagtatatttttactaatattaaattattatatcattaaattggttctagaaatacaatttggggtttataatgtatttttaaacaaaacatataattggtacaaaatagttatgtgttatataatattattctcaaatatcaattttataaattatgatatacataacatatatatgatgtatttaagaaacaatgtaagttatatatatatatatatatatatatatatatatttcataaagtagttattttataaattacttatatccacaaaaataattttttaataatatatatggatgaaaactataataatttcttttttaaaaaacaaaagaaaaaaatcaaagtggacagaggaacaaaaatggtacatcccacctaaataccataaaattgtactttaaaaatttctactaaaattattatattggctgtgagaaaaaaaaagaaatctacaataggggttgtagcttttttgttggctttatacatcttctaatgccctaccaattataccccaaacatttttttttgaaatgttaaatacattgctcaacaaaaaatattatatacaatataaaaatgaaatttgcaagattatccataacaagggacatgaaaaatatcattgatctgagtttcgatacaattccggatataggtgtccaaagcttatggatccaaattcagatatttaaatattttatatgatattttctgttagtcttttctatttattgaaataatagttaatattattttaaaattttcatctattttttgcagatatggatagtcgcatatattggtggatccagatcttgatatttgttttatggatctaacggatccagatccagatagttagtttacggatccagcggattcggatagttgtttcacggatcatgcggatctagaggatcatgcggttctagatctgggtatcccaaaattttacagaaactaatttcatgttcatctttctatctacaaccgaagaaacaaaaacaacatgaaaaattgaaggagttcgatgatatgagattattaccttttttgagtaaagcatggaatatctcatctcgagattactaaggactttcttcgaacattgtcgtcatgtcctttggttgttttgaaaagtttaggaaaaaataggaggcagagcaaatagattatgttatagaattcagagaaatgcatatttatataagaggagcaatattttgtgaattctagggttttcagaagatttatttcttaaatgtaataagtttttagtaaagatatttgtttgataaaacttggaaaaaaaataataatgacgaccaactatatcgttaaacaatatcttactgaaaaaattgagataatcgcctatgagatgtttaaagtaaaatatttcaaataaagttctataggaatattgtaaaaatatgttactatataaatttctaaactaaaataaactctctctaactttgacacatcaacctttttatgtgatgagaagctgacacatcattaaaacaataaccaatcaaaacattacaaatactacacatcagattaatatctgccacatcagattaaatagatttattcagcttgttggaaatgaaaaaattaaaaatcttgaaagaggcattccggttacatcatgtggcgccattcaacctccctcacatgtccactactgatgttgtggtggatggttacttcatccccaagggaagccacaagcttattagtcgtatggggatcgggagaaaccctaaagtgtgggacaaaccgcttaagtttgatcctgagagacatttaagcaataacacatgtgtagaactaaaagagcctgatctcaatataataacgttcggtgcagaaagacgagggtgtatgggtgcggacattgggtcagccatgacgtacatgttggtggctcggttgattcaagggttcacgtggtcaccagtacccagtgaaagtaaaattgatatttcagtaagcaagagtgatctttttatggcaaaacccttaaatgcggttgtaacacctcgtttggatccaaatgtgtatccagcctgatttaaagggtaacaattacaagaaaaatgcattattattaaaacaaaaagagaaagaaaaatgcaatattaactgcatgtattggtatttttttttttttccggacaatacaggtaatggtagtatgttaaatagtttatctagaaacagctattacaaataatataattttcaattatattcttcatttacttaacataagattgaaaatgtattaacgtctattcgcaattttaattgatttgaaagagcagaaatcaaatatttaccggtagtctggtaggttagctttgagtcttggcaatggaaaattcaagtaaaaatcatgtcttgttggatttaaaaatttggtttgtaaataattaggaggtttattgggttgtacataatcatgatcatttttttgctctttagttagataattaggctaattcatatcctatctatatatacatttttggtagactttttggccaaaaatctctatactatttactaataatatacaaacccttacaaattctatctcaaccaaatattcaataactaaaaacttacaaatcattaatttgcattaaatacttgaattaactctttcatcaatttttatctttaactaaatctttctaactatattcaattaagactaaattcctaaaatctctctatctacattaaatataaatatataattttctatcactatatttgtttttatatctaatttattttgactttatatttaaaatacatataggtaataaaatattagattttgtctacatatgatgtaattccgattttttaaaaccgacatataatactcaatcgatgaaaaaataagtgtacaaggtcccacattgcttagaaattaaataaatcgtttagagttatactataaaaaggaccaaaatgattctgaatacgaatgagcatgaacattggtttatcatacatccaaaattaaaaatgttattcggcttactccctttctttattttaaataacttaaactttaaaagtttcataaaatcaccttaaatttgtttataaattttttaaaatataaataattttaaaattttatgaagttttaaattttataaatatttgaattttataagaagtttaaacattataaatattaaaaaatattaatatgggatgatatactacatgtgaaatcgtagatgtaacaatcaatatacaattatgaagtttggatctatattactttttttttgaagtttccaatattataaatattcggacttcataagaaaatgacaaaatgatgtttaatttcacgggacgaggttatatggtggtacgggtttgaatcgatattaatacgggatgatatattatggatgaaatcctagaattaacaatcaaaatacaattatataattttaaacactaaaaaaaacaaatattaacaaagcaaatactataagttaaaatttcaaaaaaaattagttataaaaattgtgtcgagatgtatcatagtatcatatataaaacataggcttatgatttacctctgaaatattttatttatatatatatatatataatattaattataataaaaacctctaattttctaacaaaaatatcaacatgctgtgtaccacgggtcaatctataaataatacaagtttaaaatttttattatctcaaaaaaaaattaaaccacaaacaaaaaaatattgaattttaataataaattaatatacaacaaatatcagaacattgaattactcaaggtttatatagaaaaaagttatttgttaagaaaatattatttatatgtaaataataattcctttctttataactttttaataaacatatccacctgcggtgtaccgcctgcaggtcaatatctagttatgtacattcgacaataaaaaattcaagcaaaataatgtgttgttggatttaaaatcttatgttatttgtttcatgtctcataaatagtagttaatatttgatgattcttttttaatgatatataattagaaatcaattactattttaaaatacacgtatataattcaaaatcaattaaaatctaaactaataaatcatgtgtattaattagtcttcgtcaatatagatggtgggttttgtacgagtccatgttgtacatttcagtggttttattttcaaccaactgatttgttttctcttaatcctgagaagccaatgtttatgaaatcaagacaagtttgattagattgagttatcgggactagtaatagagaacccctatgatcatttggatttcttggagaggttgtatagtacgtttaaaattggttgtccggagatagtttcaagctcattttgtttcctctttctcttagagaaaaagcaagccaatggttgaaaactataccatctcatttggtcagttcttgggatgcgtgtaagaaaatcatccttctcaagttctactccaagcaaaaaacgaccaaagtgaaaagtgacataatagggtttaagcaaggaatcaatgaaagtttccatgaagcatggggacggcttaatgattatactcaagattgccctcctggattcaaaaggaagttatttccttagtatttatattgtggagttaataaggagctaaaattatcattggacatgactagcaaatgacgttttgcaaatattaccatggactaaggagagttacttgttgaaaatttggctcaaagtgatctaagctacaatgaaatatgtgacaggatcgcctttggagataccaagtgacgactacacatggaaaaaattgcaaaatcaattagataggtggagaagttcatgatgatgcaagaaagaggagttaacaatgttacaatggattttttaaagtatatatccaagatgaagatatcactagcccaacaaaaaactattcaattaataaattctttatttttttgtggtcaaacttcattttattaaagaacctaaagggcattacataaaaggtacaaggcccatttaaagattcaatacaaaccaaaaacactgataaaaagcttatatcaatagaactcatagacacgtgtcttaataaaggataaacatgggcacgtgacaagtctggagaaaagttgtttcttcatgaacttgtcgtcggcgaactacttctggtcacatggatatttctttaccttccagttcttcatcatcacccttcttaataataataatatatatatatatatattatgaaataataaaatacgataatgcatggtcacacaagctaactatattattgtatcctcagctacataaagtagatgtactgcccacatatctaaactatacaatgtcatgtgatgttccatagacatacaatctggtacaccaatggtttgactccggcgaagacaaacactaacaggaaatgacgagaaaaaatattaaaaaatattatttatttatttatttatttttaaaacaaaaataatcaaaaaacaaattctaaattatgtatatatatatatatatatatatatatatacattttaatgtattgattcttataatagttagttttcattttcaaaattaaactaaatgtgtaataaaaactactaataaattttaaagagataaatttaaattaaaaccggatatttttattaagatcatttaagtaaggaatttgcctatttttacattttaaattaaacaaatactaactttcttgtttggtttatttatatacaaaaaaaaaattctttaattttttcaaccacaaaaattatgttctacaagaaaaatcattagaatcaaacccaatacaataaaaattttctgcttttagtttaaattttaatatcttaaaatgtttagaattatttttattatttagttttgaaattgaaaacctaactattagaagaattaatgcattaagtgtttttgattatacaacaccatagaaaattattttatattttatttttatattaaaataaatattagtgtttttttaaatattttttttgatcaataccagtcaatgcttgtcttcaccggactaaatttatcggtgtaccataattttatgtatatgatgttaaccacatgaaatcgtatagctcaaatatgtgaccatgcaaaacatctacttcgtgtagctaaggataaaataatatacttgggatgtatgatcatacattctctgatacttagtgtagttagaaatattttttccttagatttatttgttcaattgtgactataacaattagaagatattttctattatatatattgaaaaacgaccacgtttaatcgtatcgtcgatatgttttcaattaattatctaatttttaattaaaaatgtactaaacacagtgacaagcaaaataataataaaacagttaaaaatatgaaaatatgaatgagtctatggtgcagttttgagaaaaaagttttgataatacttttcttttagaaattatataaaaaacattaatgtaagaaattattatgattcctatagacaatttttttgcctccaccactagcacctctatgagtctcttactaatataactattagtgtttttaatgtaattaaatgttttaattaaattcgaaactataaaaaaatttaaccaatcataagaggaaaaatgtaatttagaatttttagagtttgttatttaagagagtcttcctactctccctccttactttttataattttccatactcttattgatgagtctctaattaagaagaccatcaataaaatacactttaactgtcatagtataatttataaactaaaattagtgaaactcttctataaaaatactatttggtttctttatattttgaaaaagtgggtgattggttcgtctatatcggtagatttattgcaatagaaacgttgttctaggtgtgatgattggttgtagaaataaaatttgggtttataatgtattttaaaacaaaacatataattggtaaataatagttatgtgttatataatattattctcaaatatcaattttataaattatgatatacataacatatatatatgatgtatttaagaaacaatgtaaattatatatatatatatatatatataacccaataaaaagagttatatatatatatatatatatatttcataaagtagttattttaaagattacttatatccacaaaaataattttttcataatatatatggatgaaaactataatattttttttttttaaataaaaaaaaaaaaaagtggaaagaggaaaaaaaattgtacatcccacctaaataccataaaatcgtactctaaaaaattgtacttaaaattattattttggctgtgagaaaaaataagaaagctacaataggggttgtagcttttttgttggctttatacatcttctaatgccctaccaattatacccaaaacattttttttttaaatgttaaatacattgctcaacaaaaaatattatatacaatagaaaaatgaaatttgcaagattatccataacatgggacatgaaaaatatcatggatctgagtttcgatacaattccggaaataggtgttcaaagcttatggatccaaattcagatatttaaatattttatatgatattttctgttagtctttttatttattgaaataatagttaatattattttaaaattttcatctattttttgcagatatgggtagttgcatatattggtggatccagatcttgatatttgttttatggatctaacggatccagatccagataggtggtttacggatccagcagatccggatagctgtttcacggatcatgcggttctagatctgggtatcccaaaatttcacagaaactaatttcatgttcatctttctatctacaaccggagaaacaaaaacaacatgagaaattgaaggagttcgatgatatgagattattacctttttgagtaaagcacggaatatctcgtctcgagattactaaggactttctttgaaccttgtcgtcatgtgctttggttgttttgaaaagtaagggaaaaaataggaggcggagcaaatagattatgttatagaattcagagagatgcatatttatataagaggagcaatattttgtgaattctagggttttcagaagatttatttcctaaatgtaatacgtttttagtaaagatatttgtttgataaaacttggaaaaataataataatgacgaccaactatattgttaacaatatcttactgaaaaaattgagataatcgcctataagatgtttaaagtaaaatatttcaaataaagttccatagaaatattgtaaaaatatgttactatataaatttctaaaataaatatcagttcaattaaactaaaataaactttctctaactttgacacatcaacctttttatgtgatgagaagctgacacatccttaaaacaagaaaccaatcaaaacattacaaatactacacatcaaattaatatctgccacatcagattaaatggatgatttcagcttgttggaaatgaaaacaaaataaaaagcttgaaaaacttgtcaattcctctttgatctttccgtctttactttctaattctcgtgtatctattttgaatagttgtaatacttgtatcagtttttaaatttaattttaggttaggttttgtaattaagttcgttaaagaaaaattaggaattagcagaggggaagatatgataaccttattacctggatctttgtttcgttataggcttagctttcttacaagtaatgaagctgtttggacaagtgttttgtcatatagatatagaaatctattgaaatgggttccaagattagaattagtaaaataaaatactactaaatttaaaatatgagaaaatacaaaataataaatcctaaaagtctttgttttaaaccaatcacacttatattaaaacaaaattaatttacaaaacatatcatgcagcgtaacacgagtttttacttaattaatagtaatattaaattaaaacctgaaatattcaaattctaatttatatgagttaacatgtaacaaatatatttaaaaatgctttagaagatgcgataaaaaactttgaagattttttcacaagttagtgaaaaaaaaaaaaaaagatcaagttacaatagaaaacatataaaaagttgcagattcatttactatgttcccaatttcatttttgatgaatatgaagaagaagaaaaatattgtgttgtcaaggcccaaatgaagccaataattgagtggatggatagataatagcgtgaacaaacctaaatcgattgcgtgaatcaaaagcatcagccgcttgctttagatctatacattccttcgtctcgtgattgttgtgaaaactcgagttttaatcctctcccttctaagatctttgagagcaaggcattggtttggctcaagatacagtttcaagatggtgtcagcattgatgtgaaacgtggtgtttctcttcccaagcttaagaccctccaccttgattatttcaagatagaaccgagtaagtttaacaagcttctttctggctgccatgcgcttgaagagttagtgctgatcaatttgatgtgggctgattcctcgggatataaagtttgccctgtcacagtgtctatcccaaccctcaagagactaaagttttgtcgttctgaagatttctatgagggtaaatttcatgagtatgaagactatgatgaggagaacattaaaaagggagtgtcattgtcgtttgataatccgaatttggtgtaccttgaatattctgatgttattgtggacaagtataaacaagtgagatttgactcgcttgtagaagctaatctaggacttcgaaagaatcaggctgaaccagacaagattaatgtaacaaagcttctcatgggactacacaatgttaagatcctctacttgtctaatgacattcttgaggttagtaccatctttttattgactaattttgtttctgataattaagtgcttcagtttaatactcataattcacaattgagtgatgttataattgatttggtttgtgcgtcaggtacttgcttgctgccgagaaagaataccggtattcgacaatctactcgagttaactattaagactacaccatatgtaggatggaaatcattgcaacctctactcaagagttatccaagtctagaaacattggtcttcgaagtactttacacagcctttagatcaactgttgaaacgtttttaagcatacaatttgattatgaaactgactctgttatgtttcagggattgcatcacaagtatacaaagaaatgtggggacaaggacggatgtttgtgcaaatatgagaatgatttgggggcaaagaagaagaatgttcgtacttgcttaacatcaagtcctgtgaaagttctaaagatattgaagtttggtgaaacttttgaggatgaggatgaggatggtcttgatgttgatcatgatgactatgatgatgaagatgatgtgtcttgtgatgaagatgtgatgaaagtattcaagaaactgcagaagcttcctcgagtagcttcagccaagtgtgaggtccaaataaaatcaaagaaccttagcttgtcatctacttcgactaaacgaggtactcttctttagaagattcttcttgtggtatctcagccatggataatgtctcaggctaaactcaatccaagattctcttgtttctgccttttgttctttcctttactgacttggtttaatgttttttttttccttttgattgagaatgttggtatcttttgtttgtctctcttctcttccttctaagaaaattagcactcgtttgttgcctttcttgtaccaatcgcattttgctatgaacatcagaagtaattgactggacttgctttgctcaccagaattcttcctcagccgatcagaatcgaagcactcttcagagagactatcaaacatgacagggactccaaatctacatacttcaagtgaatcaactgcaacaacttgaaatcaaacgaccaaagtgaaccatcgcttagtttaatccaatatgggtaagcgtggatttaccaacaattggacgaagaatcaagtacacaactaacaaacacccgtcaaacccccatgattaaatacttcaacaacatctaagtgttgatttgaagataaaccgacaagaagtcggagatagatccgaacgaagtcggaaagctaaaacatagaacaaaatctaaaaaatcctattagcaaaggataagaacaagatttagagttttctctctctaaaagatttgagaaagtgaagagagagaaaactctttttattttattttaataaattctagaaagttaacaaatggatgttattaaaatggaacaaatgtcaaaaaaattgcaaacttttaaatacacagaaaagcatgaactttcgaaatgtcattaaaatcctaaagtttggtttgattttataaaaaaatagttaagtttcgttaactgggtcattttaagcatatcaataaatttccgttaacaaaaatatgatagagttaactttccataacgtttaggaaataaataaatcttatacatacatataaagtatcactaaagataataaccaacacaacgttgggtatcggaaagcttattttgggaaaatcaacttttcatacccaaccaaagtaccaatgttcaattaatacataacagtttactccctgctaaattaggttggctatcttccagcgttagtggctccgtgagcaccatcggctggctactttctagcatatgtcagcttctctagtgactatggccggatcttttctagcggttcgtttaaatcaggttattagtaccgtttttatgtttttccttttcaataatcaccgtgatcttcgtaccagtttcaatttcataaagcctatgtgtttcaattttaatctcgttttttgggttttaatcatcgtttgtttaaacccaatttaaaattctcaatcctttgatttggaatctcaatccagcttatctagaaagaatttaatatcaagagagatcatgatttctcttttttcaaagatcgttgttgttctggaggaatatagatcaaactacaaacttaaaagttttaatttctattttcttcttaagattcaatcattggttagtttcttggagaacatcaatcaaggagatgatattagggagcaaagcggcggattcacaagagtgatcctacctgcaactctcaagagagaggcagtgcacatagtcgtcacgacagccaacaaatatccggccaccgatcatcactggtgaagagaaaatgtctgcctgcaactccatcctcgtgatttctcctacttttgagtcatgtgaatctctgctgagaatggagggtctcacacgaaggacatgaactcttcccgagcttgagcatacagtcaccaacctggaaaatacatggaaacagaaggaggaggtaccttcataaatccatgataattaaatacattcatatgtgcttttcccttgcagttaatacctgtctgatgcaagcagttcatgcgattcaaaatgcagattctcatcaatgtatgcagatgctgtgatcgggtccccaatattgtcttcccacacaagacacccagattcctgaaataaattccaaaacaaaagtcttgactcatggtactgaagttttgagacgagtaccacaaaaacaactgatcctcatgaacgtccctatcaatgtccttgcagtaataaaactcaacctaatatatctttattccactgattttgctacagattcaagtatatctttagtgcatccacaagctgttaattccaaaagggtatattccttctaatataaactcggaaatcaatatgccaatgaacgcggaagaatcttattaaactggtgtgtttcagaaaggactccctagaagatgcataggaagatgtatgaatttagaatatgcagtgacatgataaagtctattgcacatcagatttcagtcctaaaataacaaaagcccctagcacaaaaaaaaaagtcgacagcaataaataaactatacaagacccatgtccaagggatataagaaagtaccggttctagggaataaacacatccatttctacagcacacaagcacctgtagaaaaatagacgtgtagtcagcctcagtgagatatctctacacaaaaaggatatactgcagatgtactcaggaatcaagggcacctgagaaggaagcacatgtgacatgcaaggtccagcaaatattggtccaccagtcctatactgcattaatgtaaccgctgacttagtttgagcactgtgagatggccaaaacaaaatgacaggaacaaaagatgtggaacgcaatgtggactttatgatatcatttgaatgaactgggatcaattcatacacataccctccaaataatagttccagacggactcattgcgatcacttggccatcaactaagcagcaaataactgtgacagaaaatagagagtaacaatgatactaaaatcaaggaaatggaaagaaaatagtagaggaagaaaataccgttttgagttgatggggtaatgcatagggaaccaaaaatcggtgcctctaattcaaatagccataaggtgtggaatggggaatcctgcatttgcaaaatcaacccgaataaagaaggctccgtcattactttataagaagtcaacaacaaatcttcctctggagccaagaaaaactgtaatgctgatcagttaagttaaacagctctatagggtaaggcatacaggacccaattttggtagtaaccattatttctaaggactattctgcttcatttgtgtagagcacacaaattcattttcgacaactgacctattcttatcatgacgacttactggaatgcaaaaagtgaggcaacaaacggtatacaaaaggtatacaagcaacaacacatagggtgttaagagtatggataaaaggcccatacctttattgatacagctatcacgcgaccactggtagaggccacgtaaagtgaactatgaccctgggtgaagcatcaaagataaatcaggtgatgtgaagagaactgcaataaccaacaaaatctttgaccacagatgacattgttaagctgtggacaagcaactatgcctaaccacttggatagagtagttaaagtctgcacctcatcaattgcaggcgaagcaaatatgctcccaccacattgcagcttataaacacagcattgactcctatagtcaagggcataaagagtgtggtcatgtgatccgcacctgcgtgaatgaggcaaaattaagcttaatgattggtggactttacaagaactttatgcaaaatctaatctacagaatgaaaaagaaacacatggagctaaaaaagtatcctccttattttactatagtcactgctcctaaatacctcttcaaacttctttgtcagttgctatgaattataacttggcgaaaaacccttcatagacccagttcgaattggttgtcataataatttttcaagacctaatgtgtattatctatgaaaacaaatagactatcatcagttcaatgtaaagaaaaccatataatcaagcattggtacctatgaaaatatggatgtaaggtccactcagacaaaagcaacattggaaaggaatttaacatgtggcacaaaaattatgactatgatcacagaaccactcctcttcaactcagtacaatgacttggctagatatgataacagagaaagtcatcgttatcttaccatatcagttgcgaagatgtatccaccacaggctggcactttatcttcatccgaaaaagaaaacaaattgtctcaagtcagctagccatctgagaacaatttctaggaatgagaaaatatatgacacagaaatttaagtggcattgaggtagacaaacaaagtacaaagctatgattgattaattttccttcagatcatacctcaccacatgcttgaaatttccaacataagcttcccgttgagaaatctaagaaatataattttcctttgtagcatccaataacgacctagcattggagatgtccccaaaactgttcaagtagactagaaagaatatagtgatctacacaagttgatgagaaaactaacctgactaaaatcaccaactaccatggctgaaccttcgatccttccctctagaatggtctcccaatacatagaaccactaattaacacaagaaagtgtatcatttgttagaaatccagcctaatatgtaagaaatttaaacctaacatttaaatcctctcatttcattttagatccaaatccaacctaacataaaacctgatacgctaaatagtgatttaatttagccagaatgatgatgcaccactttgactatgatatattacacctctcaacatatgatacatcagattataaagatgcataccttttggcgtcaatgcacgaaaatttacgtgagtgagacccaatgaatagataagttttcgaatccttcaacacaactaggggggaggcatctacacatgactccatatgaactttccatatctcttgcatagagaccatttggttccttggaatctccaacgaccagtattctcggtttgcctcttcattactacatgactctggagaatgtaccttattgcaacgactaaatgcacattgtatttgagaaaatcctgaatcccataatttattttctttcattcttttgggagaaaacttttcgtaatcaattttcaatcgctttggggaattattcttctcacactgcaattttgaaggtgttgggcctgatgtaacaccagaatgaagtggaacagttctactaaccaacccattaccattctgactctctatcttgtggtctagtttctgagtggtgttgtgttgcatatcttctcttaacttcccttctttctctgacagatagatcaaaagcctagatggacttcgaaattggtaaatcaatctcatatcaataccaagactatgagaaagatgcgctgcggctaaagagtctcccccaatcgcaaagaaatcatcatcgtctgaaacttctttgaccagtaatgcatcacagacagcctataccaaaatttaaggaaatcatataactcctcttctatagtcaattagattctgcagattaaaactatacaaacaatgttctcaacatttttcataagcataatcactcaaccaaatactgatattctaatttctaagttaatctgtttccaaagaattttatattcgtctcccaccaagtatagcatttgcttttattttctgtgagagaaaaatacccttaaacacccctaaaccggcacctttattatcagattactttgcacaactttagtttcccgttcgaactataactccaacccagaatggcaaccgtccaaaagttacccaaaaaaggttatcaaagatttcatttcctaatatatggtctagggagaaagaaacaattagataccaaagagggctcgtaaggagaaaaacaaaacgtgtgtaagcacagcatggaaattgtctgacctttttaatattttgcagtaaactattagttccattgctctgcatcatatcttgagcaccggttgtaggacatttcaaccttgctagtgcttcataatcaacttttccacttgaagtaagtggcagtttctccaccaaaacaaaatggttaggaatcatcaccggaggaagttttccacccatccaatttctgatagaaaatatgataccatcactggagttgctttccttgttcagtactacaaaggccttgagtgaagcaagctccgtctcatctctgctaagtagaacaacagcttcagcaatatctggatttagttctagagttgtttcaatctcttcaagggccatgcgttttccattgagtttaacagttcgatcccttctcccaataaaaatcaaatcaccactagaaagttgtcttccataatcaccagttctataataaagctggcttccacaatcatttgttaaatgattacagagtgagttattatgtagcttcacgtagccttcagactctatcgaggaatgcatgtacccttgtgaaagacagagaccactaacacaaatttctccttcgtaaggtttatcttcgtcccccaaaagtacaactttgcaattggaaattgacttgccaataggaacactaccaatctcttcggtcttcaagagtcttggcaactcactgcagtcaaaataagtgcagtcccctgatacctaaacaaaacaaaaggctaatcgatacactttcaatttcaacaaagtgctgcataagttaagagaatatagagaggatatattacaactctgaccagctacagcaagttagactatgcctaagtatcaaataagtgaaattaagaagtcttcaaggtatcaacatcttccaaaccaaaagcaggttgtagttatcaacatgttttcaacccataaaaccaagccagtagcaaccagctgacaccgctatgaacttttcaattacaccagcttaagaagattttctaagactaaattacaattatcatatttttcgcacctctgtactcccatatagattcagaaaacatgtttcaggaagtaggctgtgaagtgaatcccacaggctcacgggaaagggttcgccacttaaaactaccagcttcaggcaactttgaagcttattgttgtgtccacgatgttgtaaagtaggaagaatagctctgatcatcgatgggacagctaggagtctactgatagaatactcctatcaagatggataaacagaacaaagataagttatgagatgctattcttcatatgctgttcttgaaaatagatcataagtagattgaaggtaaataaagaaactagaaaactattcattatattttttgataaaaaaaaacaaagatggcacccaatggatttatcataacaaagataagatatgatacaatagcactttatacattgtttattgctataagttacgtattgatcccaatatgcagcctagtgaagatgctgaaaccaatttccagattttgaaatagatatttaggaacagagaaacgagaaacggctaaagagcatctaaaaaaatattggcaaccaccaaaacactttgataaggaaaatattacatggatcttaacagcatgacacctacagaaactggttgttttttcttttcaaactatagaaattttacctccaaaaaatcaatgatggatatcatattttcttttagtagtgtgaatggagggatgactaaggcggtggaactaagaatagcaccaagaaactcctgtatatgatcaataaaaccaactgaagtcttgaaagcaaatcgctgctctccaacaacaggatagagctcttgcatccataggaaacgatttaaaagtcctacagagaacaagggaagggaatatcagatgtcattgcttggaagacgagcaaacacaaaaacaatagatgagttcatttacattagctaagaaaaagttacctaccattagctttttactagtgtcctgcactaaaatacaccatgtcacttacaatggatagaaaataaattatagaataatcgatcaatgcgaagattcaaaatatgaaaacagctacgggacaacctacagatatgctctatatatttattccaacgagatgctcaaatatcgcaaagggtcaaagttattctgcaattccagatagttatagctaacatgtttataaaaatgacaaataacaatctaacattacatgctatatctagaatctactatctacacaaagaaaagcggtttgctttcgtcaaacatgtgaaatattatagataaacgccaaatgctataaataatctcattctcgaactaataagaccttcaaatttcaagatcatcatacctaacaatctattttcattgtagaagtagctgaaacaagtttatgaataaaacacatcctaaccttgctcagtaccacaaactcctttaggcttcccagtagatcctgaagtatacataagataacaaaattttctctgcctctctttcttgcaaggccaaacaaagcttgagcaaccagtttccacactcaatttctcatccattgaaaacaataacacagggcaaacatttctttccacaagccaatgcgattccacagaagacaagccacaagcaataacaagagaaatatttgaagaggaaataagagacaaaaccctttctcttggccatgatggatctaaaggtaaaaaagcttctccacacctcaaaacagagaacacactgataacatattcaactgatggtggcatatataaagccactacctttggcatatacacaacatctgaaccagccactgcaatgtcaaaaggttaagactttatgagcttttatactcacagaacttaagaattttataagagcttaaatgggtaaccttgagaatcatcgttactgaggatacgatggagacgagaggtgagtgaatcaatggatgaagaaagctctgcgaacgtgaaacatttgtctccgtcgtaaacaggcggtgcagctgattccgacctaatgctcctcgccgtcaagccggaagcttgaatcacggcgatttgatgagggtttttggaggctgcatcaacgaatttatgagaaatgcagcaattcttcggcttgcctcggtttctttcactcatctgcgccgctttccggtgaaagctgagtttttttttttttttttttgaattcaccggaagctttgttcttatttttttattcggtttagttcggtttaatttggttttatgaaaactctagccaaattcaaactgaaattagtttgattttgtgttgtttagtttggttggagttaattcggtttggtttatttggttttcgttcactattatttagatctagaaatcgtagttgttttactaaacgtttatatcgaaagttttatattggtgattaaagaaaattagcacagtgaaaatgtaaaaaacgtttggagatatgtacaataagggaacaaaaatgaaagatgacaagtttgtttatataactggttgaatcatggttaagaattagagatttaagatataaaaaaactaagtaaaatttatttctattaaaaagaaaatcaaacatgggttgactttagagttatcataatgtttatttaattcaattatttatagattaaaacagtttgggttaaaccaaaccaaattaaactattctgtttgctttggatcagtttgaatttggttgttttggataaggttaaattaaataattcaatatccttcagataaacaaaattatagtgacctttaaatccataaaaaaattatattgagtcaaaaatttcaataaatatacacaattcaaaaaaaatataatagtggaaatgtagaaattgaatttattaccaaaggtgaataattttgccactttggtattaatataaagtgttcttttttgtcatccgatattaattaaatctcaaaaaaatcatttctgaggaatgttgtttacatatgtgatgtgatgcggttgaacacgaatttttcgtgtcaaattatctattttaacatttgcactagaaaaaattaaagataaagaaaaacttgtaaattcattcttgtcactatgcaattcctctaaatacactgagaatgtcggctattcggttgaggaagacaccatcttgagcagtctgtgaaaaatgttatatcttggttatcagtgttaattatacacttcattgcccaaagaagggctttcacttatgtatgtaggagttgttacttttttaaatattttgttattttcaatgtgcaagtgttttttatttaaatcattttctttgtattatgtaattgggactatgaaaaaggaaatatttgcatcttaagacactttatttaagatttcaatcatttataacacttttcgaaactgacacactttttcatcttctcccaacctttttcttatttaaaattaccgtctcgccctcgagtgaagttcagtcgtcccaacaaaaccaaccctaaccggtcctagtcaccttactcattttcccttatccaccatctcctgaacataaccttcttgatccaattgccgcgtcccgtgtaaaattcatattctctcccctcttatcggttatttctctcaaatccaccgtggtccccctccatttctgtccaaaaatgaacgaaattactgaagatccaaacatagttcccccaccccctacattaataggtaaagatttttaacctagattcgttttggaactattcgccgtcgttttcatcttctttaaactgaaaaagtttctaaattgtacaggaagggctgcgtttcttgatccagatttttgggataacgatttgccaccgcgtttgtacggaaccgaccgttacccagacgctagacttaatgtatattcaaagtttgactttatatgtttaattaagaaacatatggaagggacgaacgagttcaaacgaatacttgattctccctttggtcctctgttttcttttcccgttcaacggtgttctctgtcctgcaaactcatccatgccctagtttgtcggcagttagttacaaaaaaaagcatgaaatgtggacagtttttggtggtcacccattgcgtttctctcttgctgagttcgcttctgtaactggtctcccctgtggggatttctctgaagattacgatcctgattacgagccaaagatcccaaaggaggctgatgattattggctccaaaagattgggaagacaaggctctccagtttatgtgatatttctctctgcttgcccaagagttctggtgacattcaactccggattgctctcctccttataatcgacggtgtcctaattgcatccctacaaaacgctcgtcctacatacaagtatgttcaaatgttggaggacgttgactcttttcttaaatttccctggggccgggagtcatttcacaaaaccatcaaatccctaattcctccgaggacggttgggtctaatcttgaaactgaccttgcagcattccgtggtcacctacaacgaaggtcttttcggttgcgtggcttccctcttgccttacaactcttagcctataggaatattccggctctggcactcgctcttacagacccattggacgatacagttatattagactgggataacgcctggattcctcgtcaatcccgtctcctggctgatgttcatgcagttgaacaagctccagatgtatgattctactttcattgttttcaccattttgtagcttccaactttcgtcaagaatttcgattgtattgcaggtaactgtggagtcttttatcgaaatgggggatgacaggttgtatgagtgggatgatgaagtcagggacaagaaggtgtcttatatgttagagaagataaaaacaggttatgtttttggaaagtgtgaatggcctggtggcgtcatgtctttagacctcattgacattgttaaggttaaaaaagctgtacctcccccttcgaagattctttccaacaagaagaagaaaaaaaggcctttgttgaattgtcctaaaggctccgtcaaacgtagaaggtccacccagctcaatcctgaattacctccatctcctcctcaagatttggctgctcgtgttgattctcttgaaaatgaaattgggttgcttaaagctcaactaaagaaagtcagtgcccggaatacacttgttgagtcaagttttctacatgctagacgcagagcacaaccctctatgttcctcttcaagaaaatcgtccgtaaccctgcttcagaaacagcctcaagattcctgcatgctagacgtagagcagaacctactttctttcgaaagccctttagaaagggtagggtcagacaagattggactcattttgaacggccgttaggtggtcttgaccgtaactctgatccccaggtacttaactggacttatttttatttatttttacatcctcatgtccattatgttataggctcctttcataatatttttggtctgattgtcttgatgatgttcaggtatgcttattgatctcatcactttcttacatgttgtatgtgctttactaattatagattgtcttcatctatgtttctttcaacgaatgcaattgtaaagaaaaaaaatctactatagttttaaaagttgataaatgagatatgtttctctttataatataagagcaaaatcatcaaaacatataattttatttttatttatttattggtactaatttgttttgatatataatatttgtttagtggttttttcttaaattaagatttgatgggcgtcaaattttatttttgaatggggtcaatatatcaatgactaaataaaataagctaaattttagaaattcatgggtgtcaattgaccccatggtaaagtgctacccccgccactactgataatgaaatagaaagatttggtgtctgttattgttgttgtttttaaactcataacaaaaccttcatgcttgtagcttctctaatttgggtacagatacttgattcaacgctcaaagtggttttaaggcctaagcaggaaatgatattcgatgaaccggagctgccataaatctttgagaattttggatacattgcttatttgattgagtctttttatttaatttatggtatggacggttaggacatgtaaattagtaaatatatgcaaagattagtaacttttaagacgtgtcttgtattgatgatgtgtcgtcattgttttgtttttggtgtaaaagaatccaggactctaacataagtaactacattcttcaaatattaaaaatgaagtaatcgtcaaattgagtaagattcaaaatgatacaaataactaaaaatgaagtaatctttaaaaacaatacattttatcatcataaaatatttatcaaatccatatcccatgaatttgtatgattatcaatcaaattgttcaccataagaaatgggttattattatagccattgttgaaagctggtttcgggtatcaaaatgggttattattatagccattgttgaaagctgatctcgggtatcgaaatggactattaatactattatagccattactaacaaagttttatagaattcatcatacatgacaaaataaataaaatggccacttaagtaatttttgatagaatttatacacgacgaaataaacaggaagttttaagaaaaaggttaacaacggcataaagttgccaaatcttagaaaatattgccattttacttagtaaaaaaagtgtaaaatcaaatactaaacgaaaaaaataatatctacatatacatttttgtaaccattttaacaaataaatcctggatttggacttatttacaactcaatgccattaacattaaatcttttctctaaaataattaattttactataaattcttgatttaaattgtcaaccacattatcaatcaaatttaatccaaacaaacttcaaatcaatcccttaaaattagcataaacatatttgttaacaatattttaaaataaagttttttgttaaaacaaatattgttcttactaaacgttttttgtttaaataaataaatcatgtatttgaacttatttacaatgtcatgacactgacattaattatttaggaatgaaaatatttaattaaagatttaaatcttctaaatccttacttttagagttattatgtcattacctaaaaggctcaaaatataaaaaaaattaaatattattatttatatatttaaactttataaaacgttattaacatttaaacttataaattttttaatatatcataattttttaacatcattatataatatatagagtttaaaaaaatcttaatctttccgtcatattttgtgactcgaaattttaaaaatgaacatatattaaccaattggcgaaaaatgtgtgagtgtccacattaactaaaatatttagagcatgattcataaacatatcataaataagattaacattaataaaataatggtttttttacgagacgggtttggcgggatgggtttggcaggacgttacttaataacaattataaactatataataaaaatattttatacatagatacaatttacaaaattttacatatactaactttaaaatataaattgttcccgcggtgtaccgcgggttaaaatctagttaaaacattaaaaaaccattgaatgatgagataaaattttagttcattattgtgttttgtatacctccatcggttgcccacccattttcccctcttaactcaactgtttgcgtcttatgaaatattatttaaccattcaattcaatgatgagataaaatataatcgtagtttccatccttctttaccaacattctatttaaccatctgtatttgattcgttacagtcgtaaataatctcatctaagttacaacatcaatgaatgaatgagatgtaatagccaaagcttttagtactccaacatgttcacgtatttaagatgagattagttgtcaaagataacatactatataggtccttacttattaatcactccatgttgatcacgtttgtttgacttaattactgttttaatattccagatctactttttttgtttgacttacaaattaaagattactactagattttaacccgcgatataccgcaggactatttatttttttaaagtaatatatattaaaatttgtaaattttattttttataaaatatttatattttacaatttataattgttattaagtaacggtataccacgaatccatgagataattgttaaaaagctgaagttttaacccttattaaaataacatattaataatattttaaaatttttataaatattgattcaaatacatccaccatataacccaattccaaaataaaacccgttctgaactttctttacccgtcctgtgatttttttttaaagtagtaatttttaaaatgtaagaattatttattatatataaaatttttgcaaattgtatcattctctaatacatttatattttatagtttaattttatatatagtaacattatatatattacataacatttttggttttatataaccttttctaaattaggatgatttgatatgtttaatattagtggtcttaaaaataataatttaaagatttaacccgtattgaaacggtagattaattatattttacttttttattaatgttgattcaaaaaacccgtccctccaaatccgtcttgctaaaaagtcatttattttattaatattaattttatttatgatatgactctgaattataatctaaaatttttagctaataacataggagtgcaccatatttatttaataggggaatgtaccatatgaaccgaatgcacttttatccaaatccaccaaaaaagtcttgcaaaaatactatagagataagaaactatagtcggttttgataggtataagattagcaaatatattagttagcttaaattagttaaagaatacaaattgaaaaggtatattacactttattcgaatatagtataaaaacttatataacacagagatttgataaatttttaattattgaatactttatttttgtgctaatttttatgtgattaagatttaattgattttgtatataaaatattaaattgacttatttatttataatttggtaacatatagatatttgaatattcagtatattttgcttcagtttaagaaatctttgatgacgcgtctttagatctaataagccctataatctagatattaacctgcagtatactgcaggtaggcttatattttagttaaactaaaattttttattataaagatgatttaaaaatatatgattttattttatttgattttaaatctatagtaaactgtgagttgtatatgttttgttgatattatctatattgtttagtgttttagattatatatttctagtttgattgttaatttaagagtttcacctgtagtataccatcttgtattaatatcgattaaacccgtcaattataggattttccagcttgtattaaaaattgaatcacatataatatgttattaattattgtagtatataagttataaattttcaatataatatgtacgaaattgaatataaatatttcaaattatgacccgttactcagtagaaagttttcttaaatctatttttcacccgttataatattttttcatgtattgaacagtttatttttgtttttaaaaattcaaattatggtatatgcgaaaaaactctaattatttttttataatgatgatattatttttccgcaaaaatagaatcatataaagatgagaagtgaactataataattaataaaaaattaatatgataatttagatatcaaatataatttgttgattttaattggttacttttttggaaattaataatgtatttcgtttttctaattaaattaaattaattaaaatttagatatcaaatcttatatgttgattttgattggttattatttttagaaattaataataatttcggtttttaataaaattaaattaattaaattagtatttgactttttaatccttaaagagataaattaatttactctttaaaattttatttctaatggcatacctatgtaattacttacaaaaattaaggttacatttaaaatgtacttcccaaataatatagtaggattctttctttttttttactatttaatattggcaaatcaattcttttagggggtgtattcaatcaaacatttaagtgatttgtgttaaaataacaaatcctatattattcaatcatggatttttaaaagtctcataaaatctaatgttattgaacttgtgatttaaaatctactttaaaatcccatgttattgaaaacattttaaggattagatgattagtgactttaagagacttaagtgaatgttagtggatttccttagttaaaaatacagaattttaaatctcatggttttaggtagaatttgagaggattttacaataaatcataacaacttccttaaatgcactcaaattcttcaaaatcatataaaaactcaaaataactcaaatcactcaaaataaaagattgaatacaccccctaagttcttcatcaacactattaacagattgtgaatttctcattaaacctcaaatgtgacattacattcatatatatagtagataagctaaaggagacttattctactttatagcttaatacacccccctcaagctggatcttgtgaaccttgctgctgaggaagatacagacttgaaactgatagccgactaagaatcgaatgaaacggaccaggatgtaacgccttagtcaagatatcagccagctgattttctgtagtcacatgatgaactgtcagaaaaccttttttcacttgatcccttgtattgtggcaatctatttccacatgttttgtcctctcgtgaaagacaggattattcgcaatgtgcatggcaaatttgttatccgcaaatagcttggccttgaagtcaactttaatgtgcaactcttgaagcatttgactcagccatagtagctcctttgtagcaacagccatactcctatattccgcctttgtgctattgctgctagctacatcctgctttctagacttccaagttataagagaagaacctataaatactgcaacaccacttactgaccttctactatccttgcaagtaccctagtctgcatcaacaaaaccatttaaacacaattctgtgtctgccgaataaaatagaccttgccctgggttattcttgagatacttcagtatatgatgagcagcattgagatggacatcagttgggcaggacaaaaactggctcaaacaatgaaccgcaaaggtgatatccggcctagttacacacaagtaaagaagcctgccaattagttctctatatggtgttccatcagtcagaagagtacctgtttctttgttcatcggcacctttggatccataggcactgactttggtttgcagcctaataaacctgtctttgtcagcaagtcaagacaatacttcctctgacatattgaaatcccatcagagttccgagcaatctccaagcccagaaaaaactttgcaggacccatatattttatcttgaagcttgcagcaagaacactcttaatagactgaactgcctcatcatcattactcaccatcaagatatcatctacatagactaataaagctatgaaagacgtacccgtgagtctcacaaacattgtattgtctgaataagtttgctgaaatccaacatccagcaaaacctgtgataaacacttgtaccactgccgtgaagcctgcttcaaaccatagatggacttgtgaagtttacaaactggattaggtgggaagactccagatgatgatgtataaccttctggaagactcatgtatatttcttcttctaaatcactatgcaaaaaagcattagtaacatccatttgtggtgtactctagcccttcttagctaccaatcctagaatcagtttcacactagctaacttagccacaggagaaaaagtatcaaagtaatcaacaccctcctgctgtgtgaagccttttgccactaatctagccttataacgttctatggagccatctgcattatacttaatagtaaaaacccatttgcaccccactacattcttatttggtggtaaagaaactacactccatgtcttattcaattccatagcacctagttccacattcatagccttagtccactgaacagacgctatagcttctttaaaattctttggctctgtctcaaccgatattgatagaataaaattttgatatgcaggttttatgtttgcataagaaagaaaagaagaaagaggatagggagtcgtgatgacctttagtttagtcgtgaggacttctggtgaggtagtggattgaagaagagcacaatggtagtcagataagtaacctggaaccttagtcgatcgttttggtctagcatcttgcaatgaaaccgtggttgtccctgtagttacagtctcaagaaaagaatttgtgacactaggttgtgatgatgatgatgatgcattatgagatgatgatgaagatgatggagtatcatgagatgaatgtattcctaaatctggattaactacagagtttggttccatatgcaagtgtgaatctattggtaatggtagaatagaatcactgaaaagatcattatcctgcatgtaactcttatcagttttaaaagggaaaacattttcatgaaacactacattgcgagaaactaaaactatatttgtatccaagtgtaaacccttgtatcctttaaatcctgaagagtatcctaagaaaacacacttatcagctcttggactaaacttatgcctatctttttgcaatgtagaagtataacacaaacaaccaaatgagcgaagaaacaaatactgtggcttttctgtgttaacttttcataaggactcatgttatctaacaaaacagatggtattctatttatcagaaaagcagctgtatgaatgcaatcagtccaataagctaatggaatattagactgaaaaagtaatgaccgtgctacatttaacagatgttgatgttttctttcaactacagagttctgttgaggtgtataaggacatgagaattgatgtaacataccatgttttgcaactaaatcatgaaaggctaactcaggggcattatcagttctaatagcttttatgactgcattatattgagttctaacatgactaataaaatcaggaaacttcgatgaaactgcacttttattccttaagagataaatccatgttacacgagtacagtcatctacaatagtaagaaagtatctatatccttcaacagactctactgaaaaaggaccccacacatccatatgtatcaaatcaaatggcctaacagactgattattatttgactcaaaagacaatcttttttgtttagctaaaggacagatatcacaatgagactctaacacatgactcttagacaaagaaagtgtacacgaaagaacttttaacttgttagaagatgggtgtcctaggcgttgatgccaaatctttccatcgaccgccaaggatccagagaaatgagatgaatgtgatgaagatactgcagatgatgcatcaagttgtaaaatgtaaagattgtacagaagaatccctctaccaatcatcaagccctgaatagactcctgaataaagcaaaaatccagataaaaatgagctgacaaatgattatgctttaacagactactaactgatatgagattgaacttaaaagaaggaacatgcaaaacaacatgcaatattaatgattcagacaaatgtatgcgtccacaatgcgtgatgtcaaccctagtgtcattaggcaatgagactgtaactccagacactgttacagtttcattaaaaaatcccaaatctgaacaaacatgactagtggctccactgtcaattatccaacttccatgtggaagatttgaataaagggttgaaagacattgatgttgaaatgtcaatttatcattctcatatctaagagaagttgaaggaaatgagacagtaccagaagaagatgacggatgcatagcaccgtgttcagtaatcaaagaaagtgatgaagatggttcttggtgttctgaaatctcaacatgagtattaagctgctgaagcaaagtctgaatctggtcattgttcatctgattgaagtccacattagtaacaggtgtgttctgttgagtaaccaccggtggaacacagacattaggtgtgttgaatggaccagtcatgacattagctacagcatgtagaggaggtctgggactagagaacggcgctctaggttgaggaggttgaccaaatgattgctgaaacgatggttgagcaaacgattgttgagatgatggtggccttggttgataccctggagatgttggattactcttgtatccaggaatatatccaggtggatacccatgaggtttgtaacacttctgaattacatgacctgtcatcccacagtaagtacataaaggacgagaagcacctcttggtttataactattctgtactgcacaagcattattatctgcaggaccattatatgagtactcagtataagctgcaggattctgatcaacagagaacttagcattatcagaagcttgaaacactacattatcactcttgtgaaatggtttcaaatttttctgcctttcatcttgtgttaccatgttaaacacttcttctatagaaggaatcggcttgagcataagaatgtgtcatcgtgtagcctcatacgagtcattaagccccatcaaaaacttcatcacacgacttctcgcttgtagcttttcccacaaagcagctgcattacattcacactttccacaagtgcacaatggaagctcaacaaaattcctatattcttcccacaaagttactaactccgtataatatgcactaatatccattgttccctgctgaatagcactcaacctctgctctatttcaaacactcttggagcatcatcttgtttaaaccttgacattagactattccatatcccttccgcagtgttgataaacaataaactttgtccaattttttactaacagaattcatcaaccaagttgctaccatatcattgcatcttgaccaagatccaaaatctttatgattctcagtaggtttagtaattgtaccgtcaataaatccaagcttgtttcgaacattgagagccatacgcactgatcgtcgccatgaatgaaagtctgcaccatttgttaatcgatccgatactaagacgagcccagcatgatccgagccgtgaagaaaaaatggattgtcatattgatccgtcgattgagacattgttgaagaagatgagtaaagaaacaaccaaatccagaaacgaatgaaatgaagtgatgataatggaagattcaatgtgaatcaatgaagcgatgatgaaaaagaaagatcgaaagcttgatgttgcttttcgacttcaagaaatcagcaatttgagctgagaaacgatgatgaatggagaagatgatgtgtgcaatcgatttagatggtgatgaattgaataaatcgaagataaacgaagaagattgatggaagaagatgaattttcctggaaaatttggttgttaaacttccccgagaaagtgagagagaaagtgaatgagaaaaagtttgttttgctctgataccatattaacagattgtgaatttctcattaaacctcaaatgtgacattacattcatatatataatagataagctaaaggagacttattctactttatagcttaataaacaccattttttttttgtcaaaggaaaactttcattcaactaaaacctcgtaagaggtgagttcatacaactgaaatttaaaacactacatgaaagataagggtagaggttccatgagttttccaagatgcaaagcttcaagaagatagcaaaggttggaagatctgttggagccttcaaggattcaaatttgaagactagcttcacgaaatctcggatcagcttgtgatcataataagctcgtacgattaacgccaaagagctttcgaaaaggtgttccatggaggaggttgcgggcggaggcttttcctcgctgccaaagtaaggttccaaagatggtatctccatagaggagtaagtttgctggattcgccaagggaattcacaagtccaatacacaaagaatgcagcggagctcggatggagttttctttgaggcggttttatccaaaaagtttgagaaggttgggatgcttcgcccattaggcttggggtgacatggttaggcttgctagtgggaatatagatcctcaagatacaaacacaaataggaacaggtgcaaagatcgcatcacaacaaataaggtttgagaaaaatactaatccactaagcttcacaattagagttgcatccggtgaaaaacaatcaacactatccatcaggtttcgataaatgaataagcaagtctcctctaacgaatttgttcctacagttggatggagtccacgaccatccactattgagaagcaaaattgcagagagcgactaagcttaaagacagaaaaatcagacctggaaatgggccatagatgacttattgggccgcaacaaaagatgaggcccatccagccaaaccctagggttgaagttctgaaagattggagtgatggtcggcggtgaggcgtagagggagaccaccagccagcttttgagctcgtcgtgtgccgtcgacgttctcaccggaaaatgcacatctgatggtccaagagatactcctgccatcaacgaaatccggtgagaaggaactaatggtggcgttgctagtccagatctagagcctaaagataaatcgatgaagacttgctctgatgtttgaggtaaagagccgctgaactgttgtggatcttctgattttggtttcagggacagagatggatccaaggtctgagacagatcggagccaaagaaaaccctcagggaagaagaacacatgggaaagggaatttggatgtttggagagaattgaaatcatggaagaagaatcaaacgagaccaagcttatacagaacaaagagaggctgaatagagttgatagatccagacgctggcgaacggaagctccaccggcgtcagaaggcatgaatggtgagagtgtctcgatttccgtgacgaggagcgtttttagtaaaaagctcgcctacttaataaacaccatattttctaaaatctgagagttaaaataatatagtctaccattgatttaatttttcatgaacatactaaaccttataacccgatataaacccaattctatatcaatgtttttttttactttacgtgcagttatattataaatgtaagattctaaacttttttggtctcgtttgaagtattcttttaatcttca

SEQ ID NO: 771 - DNA, 84710 bp, Arabidopsis thaliana
gatctactttttttgtttgacttacaatattaaagatactattattatctattatttttttactgtttaatattgaatattatatagaaataaaaataattgtcagctacatcgatgcttataacttataagatcgatgcgaaagggagacaattagataactaagaaagatttttaaaaacgaataaaaatgccttttcccgtgtgcatgttatcgtgagaccatagaaaagtttatgttgttaaaattaatatggcatcgtctaacacgcggaaacaagaaaataataagttaataatttattgcatcgtctaccacgaggacacaaaaatattataagttaggatgattattattatatatatttgcctcgtttgtacaagtcatattaataacttcttttctagataattaaaataaatataaatttgtgtataaaaggacaccttcactacctgattatacatcatcactccacattgccacaattgttcatcatctctccttatctctctactgcagcataagaggtaaatggttataacttatagtagctaaaactgtttactttcaaatgattttgaactttttttatcaagtgggcaatgattcaaatatactatactgactaagaaacaatatctctagattcgaataagtacacgatggccctaatggtgaacgctaaaggtggaaatggagggaaagaatgggatgatgggtttgattatgagggtgtaacaaagatacatgtccgagctggttctgaaggcattcagttcatcaagtttgactatgtcaaggttggaaaaactattgatggaccaatccatggtgtttctggccttggtatgacacaaacggtatgtgatgtgtcttaactttatatatcttaactaggaatgtggtagtgtagtggttacagcccccgcttagaggcagtgatagagcattggttccacatgtattttccaatttttctaaggttttaagatcctaattttttttttaatatttttgtaaataaagtccaaatttttgttaaaagtgcaaaataaatcctaaagttttcagaaaaaataataattgggcactaggttcaaaacaaatttgagttggccctgagtggttagcatttgaagttggttccttgtgtcctagttctatctcacttgggaggaggggtgttccaaagggagattaaggtctaagctagaaaaaaataaactatataaatcataatattattttgtattttttgttggcagtttgagattaaccatttgcaaaaggaatatctggtatctattgagggttactatgacaaatctacgggcgtgattcaatcaatccaattcaaaactaacgtgaagacttctgatatgatggggttcaacaagggtactaagttttccctaggaatcataaggaacaagatcattgggtttcatggattttctgacaagaatgtctattctcttggagcatatttcatcaaggttcttgcaaccaaatcgggaatgcaaggtggtcaaaacacagggaaaagttatgattatggtggtgactatgatggcataagaaaagtgtacgttacatatgatggcacttcaataaggcatatgagggtggactatgataaagccggtcaagtggaatgctatgagtacggggacaaaaccggaacacaatataaggttattctaataaaatatttgtttactattgatatattattttgtttaaacacgtggatcactaatatataaaaaatgtttcagattacggtgaattatccatatgaatgtatcacatccgtagaaggaagctacgcaaatacccaaccttatggatgtattgtccttaggtcgttaacattcaaaacatcaaatgggaggaccttagtaattggaacagtgactggtaccaagttcttgcttgagagcaaaggaaatgctattgttgggttccatggacgggtaggttcttgtgttgatagtatcggtgcatattacgctccgttttctccttctcctccacctacacagaaactagagggacaaggtggtgatggaggagattcttgggacgatggtgctttcctaaatgtaaagaaagtatatattggacaaggctcgaacggtattgtcgccgttaagtttgagtacgagaacgacgctagtgaggttgttgttggagatgaacatggaaagactacattgcttggatacgaagtggtgatgactactccttaatttaattgtttaaagtttcaaaactatactatatatcgataaatagcttgagttatttttctaatctagaaaataatttagttcaattaatatcttacacttctcaacgtgagatttctgacaatgatctcttgttccatagttcgagctggattatccgaatgaatacatcacatcattggagggttgccacgacaaggtcatgggagctgaaactggagttataacaatgcttaggttcaagacaaacaaacgtacctctccaccttttggacttgaagctggtgtcaacttcgtcctccagaaggaaagtcacaagatcactgggttccatggaaagtccagtactatgcttcatcagattggggttcatgtcgttcccatcactgagtgaccatccatagctacctttataaatggatgaataatcggattattataatcctctgtcaaagttaggttttgttactttcacatgattttcctttagttgttatttgtgttccattatgcatcgttaacgtattttcacttttcagataataaaaagacaattatgtatgatttaataattgtccaaactttactagactaattactgtacatatactgccattagtggtcgttatgcatatttctcctctatatttaagagatattgattaacaaaactatatatatatatatagcataaatcatgatgaacaatatataatataaatctttattatatatttgtacttatatttttatatgttttatagaaaatatttagaattttaacatatatgacatttttgttataaattacaaaatatctaaatgtatatgtgagcccatatgtttcatttgctagtgctagtgctagtgcttcacgtcatgtggtacaatgcaagggcctgcttgaagactcataataataatcttaagctcttgcatgtggcttcctattatgttcatagcattgaagtatctacacctcttttggatattttctccactgactacatatttgatggggaatataactttgtcataaagtcttcaagacttttctttactaaaaactatggggctatagacccagagagaataccaatcatgaactacaacatttcatataatgctcgggtacgtactagcaattgctttattcttattttttgttatataattacatacctatatatatatatatatagaaaatcatatttatatattatttgatatgtttaagttgtttatatgaatcaaaaggagatggaaaatcttgggcatagattcttgatgagtacagatgctaactattttgggaggcttaaatctttggcggtgaccgtggatataatgaatacgaacgaacttgagatgttcaggtaagttttagttgtgtagaatggaatcatgaaaaagttggatttatgttttaaggtacgaaaattttagtcaacaatttagttagataaatttaatgtttttccgtttatcacttctgtttaattaatacgtaccaaatctgaaacatttttctgtatgttcttgtatatttagcatgacaatgtgtataaggaagaaagtgcatcttccattggtggaacacaaaagaaaatgtgggaggagaaaaactcttttcccaatgctgaatttcgagtgaaagctgtgtcgatttttgatttatgtggtttgaataagaaacagtttgcattagcttcgcgttttataaagcatgggaccgtgatgaacaaattgatgatcgagacgttttcggttcctccagttgagaagttttatattgaagcggccgttgccaaactgatggaacttccaaagggtaacgagaaccttagtattggatacttctgatgaaatgtggttcagatctagtttctaaataatatctctagtcctatgtgacaaaacctgtagtgaaaaagacaaatttcatgtcgttttcttctctctttatataattaatttttctttttgtgacataaaatctttgggataattcttaatgttttaaatgcaacaataccagtttctctttctagtaatggcttataacaagaattaatacaatttttttatgaaaacttttatgtgatatagtctagtaaattaataccaatttaaacggttacaatattttttgtgatatcgtctttgggctaattctgaatgctttaaacttttaattaaattatgtaaacatcttaaacttaagtaaaatccaaacaaagaacaattgtatttcttttgtagagatgtacccttctgattggttaaaatcataatttatttatttatttaaatgtctatactatttgttataaaagattatcatatattatgtttttatatcgttcttttttgtcttattttcaatctttaaagtgttagtaggagcgttataatcaatattgttctcatttattatgtcaaattaaacgtttaagtttaattgtttattagttatcaaagtaactagattctgacccgcacatacgtgcgggatttcatattttaagaaatgtattaaatatatttttagtgaaagatattgtagtgtataaattataatgttcatagaaaagtatatagtgttatttatgatacaatagttaaaaattttattaatttatagtatttatatttcatttgtattttgcatagtaaatcgaatgttagatttgtttcgatttggaataatatagagatatttggaaaatttgtgtattcttgttagtttgatgtatatacaaattaatcgtttttgtttgaaatttgatcaattagatgatataatgtgaaatttactctgcggtacaccgttgatcgattttttggtaactaaaaattcgaatttaagttatagttgttttgtaaatattgtttcttttgtttagtatttaagattttataattgtgttaaaattgttaattataagatttcactcgtagattatcgtcctgtatgaatattaacccaaactctttccaccagataacttcattccgtaaaattaaatattatttttgttatttttaaatattcttattataatatattaaaaaatcgagggattgacttgtgctagatcttggattaatatatttaaaaataatttatgatttataaatgtattatattgtagtatataaaaccgtttttagtgtatacctttcaataattgtataaagtatattttaaaagtcaaaatttgtataaattgatattgcaacctcatgaaatcgtagtgatttacccgtatggtaccacatgctaatttttattttatttttttataaactgattaatttgttgatttttgttaaaaataaaaaaataagttaagttatatttgtttgtttattgtttcagattgtataactatatttggattgttaattccatgattttatctgtggtataatattgaccaacacccggctagttttttgtaatctagtgttgaccctgaaagaaaatccataagaatatgcataaatggatagtaaaattaggagataaacatcattagaacatgaagtaatttacttatgaatctctatctattttttaaaagaatcaatgttctagattgattgtgaggcaatgtgaatgtatgcataacatttataagagatagattgtacgcaaaattatattttaatttggattcaatcttagctttaccaaaaaaaactaatcggaattatatattttaaatttaggatgacgaaaatattttttttaaaagctaaaatttatatgatctcaacgattttggtattttagcattatcgcaaatatggtagttattattggtcgaatacaataaatgatctgtcaaaacaattatagtactgtttgttccaaaaaagtcattcaaatttcaaaggaaaaaaaaaaaaagaatattggtgtgaatcgatattttctcattttgattatttgcattaaaatttttaaacattggtatttaaactttgttttactgtttaagaaaagaagaaataatcgaatctagaagaatgaatattccaaaagcatgtaactattataatacgtttaaaaatatattttcttttatataattcaaatttagcttagtgatatatttttaagtaatgaaaattacctgtttaaaaaaaatactttaaaattttatatcatttaaattctaattaaaatgttaaatattttaatctatactgaaactattttctagataattacaaatctaaaatccaaaaattctcttttgaatatgctacatcataatttaaaattattttttatttgtactaatcagaaacaattaacatagttttgttaaggaaattgtataaaatctaaagtaaacgataatttgttattaaattagactgaagtttccaaattatctaataacatattaccaaaataaataagtttacatatatacaattcgaattaaaataaactaatatgttatggaaacgcttttaaatgatttccgaaaatattgggtatttattaatttattgatttaattcgtttaaaaaaataaaaacaaaatccaagatatttatttagttgtagtagttgttaatttactaaattactcatgcaaaaattcatttagttagttttaaactacccttacaatgttgtagttcacacaatgcttcccaattaataatatagataaaccaacccaagataaataatcgtactaacatcatactatcatatattatgagagctcttactttttttttttttatgaaatttttataaaattaagatttagaggtatagtaatgcttacaacaatcagtattttttaattaaaaaaactcgacttgaatataatacaaaccaacaaaatgaaattttttttggtttttactatataggctgagtgcaagatataaatataaatttttatcaataatatttaaactttgaatagtaaaatagtggtgtacatattcttcttgatatttaatttaataaatatgttttaaacaaaatttcaagttttatgttattatagattttaattctccatacatctattgatgatatttgaattctaaatactaacctacacaatgtttctatttaatttaacagttctaaagaaaaataaaattttccacattcaattttacaataagatgtaactatctatttcatcataataaactcgattttaattatacacacttcatcttaagtgataacaattttatattaaaataatatttatatttatatcagatcaaatctatatcttacttaatattaaaataattaacaattaccaaacataactaactaaaaaaaaaaaatacacaaaaatatttgaaaaaaacattttttaaaatacaaatttcaaataccatttttgttagttattatccatacaaaatgatttagaaacaaactaatacatgctaaagttaattgaccaaaacaaatttgttaattttcattgtggttaagaaaaataaaatataatttttttagatttagacataatatatgtaaatttgtttattttgtgagtttttctatttttttaagagacaaaatttttttttaactcttatccaacacatgtcaacatcttatcgataaacttgacatatggcacaatcatatgagttactaaatttaaaaaccatactttatataataagatttgtttcttttttttcgttcttttatttctttaagagtaaaaagggtcaacttttttccaacgcatgtcaacatctgattgatagagttgacataagtcacaatactattatttatatgttatataataaggttcatggtgtctaattggcttagcccaataatactatgatggagacctcaaatcaaaacacatccagctttgaccaaacacaactttgtgttctccgctgaaaaagactacgactcgtatctctcacccaactttcatgtgtcaacaacatctttgattcttttttgaatcatcgccgatgtccctccatttttgggtttgtctcaatgtcgatcaactttttaaggtaagcttcaagcttcttttctcaatttaatttcaaattgagttatagatgtttactccaattgtttcattggcatcaaattttactccggtttggttattatgtttacatcaatttccatttccgattatcatttggaatttgattgaatcaattttttggtacaacacctccgtgaggctcttcacgcttagataatccaatgcatttaatttttttatcatttgttttggttgtgcccaaattagagaaaaaccaatcttaatattattgcttcatttgtttgtttctgtgtcacttaaattttagtaactgtaattttgttttcgttttggtcggttcatatgccactatcgagttaaattttgttttatgaacttctcatttcttttaggagctattagtgagggtgtttgtaacatcctagttttaagaatatggttatgcatgcagaaatatttaaaagaatttatttgatcacctttgtcaacaaagtacaagtatattttcggtcaaatatccaaaaaaaactccacaattaaatgtgcttctgctggagcaatttcagaataggtgatcatcgtggaagtgattgtcagaaccatgtgagtgaggatgaaacatagagaaagatcacgtagtgatttgtaggttcattaaacaagtctttaaagcctgctggtagtggaccggtcgtcggatacggatgagcccacagaccaagagaatgtggtgtccactaaggatgatggtcggggtgttacaatcccaatggaaatgttcgcatcagacgttgttaagacaagtattgtctaaacgatggaaaagtgtagaaatcccttagtccagtggttaaccaagagttcattaatacttctatactgtgtatgggattcgagtttcaaagaacgcaatttcttgcatattaatggtgcaaagcttatcagagatcagaatatcgcatgcagaccagttcgtagtggtcttaagtgtggtagagcatgtccatcgtaagaatgccttacatgcagaaccgaattatgaattagaggatgccacatcaagaccttaaggttattgttatgaatctttaagcaagtctttttgttgtacaacatgacatttagcaccagaaccttgagagaatgacaaaatgaaatagctgggttgaacacataaacttaaacgaatattttctcagttttgagattcttgagattatgatagtcgttgaattggcatatgtggtttttaaactatatagatataggaacaatgttgtggtctttcgatgagagaatgtgcttggggacaattggagcagtttgactcccttacggttagtatgacggtttgaaagtgaaagaactttggtatgtttctagaaagtaaataaatgaatccaagtttcgagcacactgtctttacactagtgtggcagcccaccaaataaccattgtgattgttcataaagtgttaccttcatattttgcaaaacctcttaaccaatcacgagtgcaaagtagagtttgaacatttcatttaacaatcacagtggtcatctggtgggctgtagaatttatcactatgcccaccaaagtaaagatggtgtgctcaaaacttggattcgattactttttcgtcaaaacataccaaagctctctcacttttcaaacttcaaaataacagtagtaagggaatcgatctgtaccaattgtactcaaacacactctctcatccaaaactcaccactctttctacatatatacggtttaaaaactatgcatgtcttcaacgatcgtcataatcttaagattatcaaacttgagaacttttttattgagattgatgtgttcaacacagttattggatttcactattctctcaaggtgatgatggtaaatgtcatgttttacaaggaaaaagcttgcttgaagagtcataagaataaccttaaggtattgcatgtagcttccttttttttttggtggatgcttgttagcttctttgctcaggtacaaccttgttctaaatatctccgcctagcccgattaatccccgcttaatcgctagacccaccctatccgcctcaattaattactaatctcttaaaatttatttattcaattatttttcgtttaatccgattttttcccgattaatcatcaccgaatcttgcatatcctaactctttttagattgcaagtatagaacaatttttcttcattttattcaatcatttagttttagagtttgtgatgttttacaaaagttcaaaactttaataaaaacataaattttgttttaaaaatacagtttattgtatttaatataatttggaaaacaatattagattaatatgtttgaaaaataataaataaccctaaaactaattctgaataatcctttattttcatccgattttctgattaatcgttaaatccatactgagcgcccgattaacgcctagcaattttttaaacaaggggtacaagtacaagaaattttattaattaatactatatatatgcaatattttattaagagtcctatgcataagtaaagtatatatgcaatattctatatcatagtctaggaagagttctacgcattatgtgagtttgaaattaattctattttgctgtacagtttaactaaatatttcatcataataatcctgactagttatggtttcttattaaatttgctgtctttcttcattcattataaattttatagcaaaatatatatattatttagtgggtgattggcttatatgtagtcgtaagtgtattggttgtagctgtaaatttgaaggctgttagattttggttgtaagagttgtaggtttgatggttatagctataactttttggatgttattattttaaaatgataacatgatttgtatgtactctctctatttaattttattttaagtgttgtttaaggtttttgaacataggtttcaatttacctattttacataaaaatcattaattacaaataattcaaccagtaagaaactacactacatagtttagatggtcaatagaaacaaatacaattaaatttcttattattttcttaagaaactaagtctatgagctaatactagaaattcagtagaacaactattgttctttttaagaactaaagatatgtaaaccattttagaatttttgtttattttattttttaattaatttattaataaagaaatttctatattttcatttttaaatattccttatttgtatttataattcggtatgaaattggtagaaaattatctctttttcatttgtggagttgaggaccatcaccattgttaattgttccccgtttctcgaaatctaccacccattgagattgaatgaactgtttctataattattttgtctggagacagtaatgttctcacttgttggattttgtatactcattgctaaacttatcttatttaagcaggttttcgtacttcattcgcaacatcaaggaagtctctagttgttgccatttgatgtatatgttgttttattctcactttaaattctttaatcagcaaaaaaaaagaaaaacacaattcttttaacacattttggtgataccggaaattaaaaattcaaaacttctaagataatccatgcatgaaactaattaccttatggcttgtttagctttgctcatctttttgttgagtctccacctgtttactatttgtaaccataccgtaaagaagaacgttatggaccttaaatcagtcctcctccacaaaccttaacatgcaggtctcatagtttggtaatagtctagagttacactcaagaaaacattatataaaaatgagtattgatcgaaattaaagaatctcatcaattcttgtcaatacggtgaaatattaccaaagttctttccgtttttcaactttatcaaaactcaatattaacttcaatcaaagtttttcaaaccgagaaaatggatgtgaatttaaccatcaccattttgttatttcttctccgctcattgaacctagccgtgtctttttttgtttgtcattccacggctcaataaaacgataaacgcacacatcgtactataaccagttttgtgagtgtcctcctctttcaaacaaacttttcttccacatattgggttgatgctttaaacatgattgtccatctatttaatattcttccctcgagcgtcaaaaacaataaaattctttttactttgctgtttaactaaaacatttttcttatgatcatcttcgcgcttttagttgcctatgcaatccatatcgtctaccaaatttggctaacaagctcttaccttgcttcaatcaatgtatatatctttctcggttatatatcctttgaactatcgcggtggctatttcatgatgtcttctcatcaaattattatctcaccaccatcatcttctcatatgtttaaaggctacccaacaccaccatcttctcatatttaatcatcatctctccttacttacctactaatccctcttattctatctataatttatgctctttctcaaacagctacaatccctcatgtatatccctttgtctcacaatcaccaatcactccaccccttcacacatataaggagcgggttgaatagttactagtaaaaagcagacaatactatatgaaagataatgttgtatatgtcgtccaaatcaaagaaggttatatcaagaacgagagaacaaaatatattcgttcaagaatttttcctacattcaaaaattagaaaaaaccaagaaattgatatccaatacattcgctcaagtgaatacagtaaatctatttacaaagtcgcttcctaccaaaaaccataaagcatattcgatacatcggaatgagtcatctgcaaaatttataaagatggggtcatattttttattttcatggaaaatttgtgttactatttcttttgccttgaaatgagttttatcttatgaaaagaaattatgataaatttcttaatgaaataatacttataatgtcataaataatcaagagggaatgttgggaatttgggggtcatccaaagataaagcttatccatcgtctaatttttattatgtacaaccgaagatatgagaagaaatgaagtaataaaagcttctctttctcacccattctttacttccctttctttctaagttatatataatactagattttaacccgcggtacaccgcgggaacaatttattttttaaagttagtatacataaacgtttataaattgtatctatctattttattttatagtttataattgttattaagtaacgtcttgccaaacccgtctcgtaaaaaaaccatttattttattaatattgatcttatttatgatatgtttatgaattattgtctaaatattttgtaattttgtagtaattaaatgctatcaaatgtctctgcggtttgatgattataatcgaattgttatagttatggagaaaagcaatatcaaaatgataattttgtagtaattaaatgatattaaatattttagaagttttattttagtaattaatcgtgtagttaatgtggagagatttagggaaaattgttaaatgtcaaatatctaattcgaagattttttttctaattatcaaaaacaaacattaaaatccagtggcagccattgtaaataagtcccaactacaagatttattttacaaaatggctgcaaaaatgtatatatagatatattatatagttttcaacagcttacaacgtaattttcaatgttgtgcggtaaaggttaaatgctctcataagtcataagattgctgcaagagggagaaaattagataaaaaatcttaaaattgtgaataaaaatgtccttttaccgcatgcacattactgtgagaccattataagtttagatattcgaaattaaccacgagaaaagaagaaaatactttttatgtttcataaaaaagtcattatacccattttacataaatcttttaaaatatgtaaaattatgttatacatttcgttaatgcaataaaacagttttttttctctaattaataagctgaaaattgaataaatgatttaaaaattgcattaagaaaacaaacgctttatgtaaaacaaaaataaaattttatatttctcctcgcagactaaaagtcgtattaataaattcatttttagataactaaataaatataaaactgtgtataaaagggcaccttaactacctgattatacatcatcactccacattgccacatttgattcttcagctctcattatccctctatcgcagcataataggtattattcgttatagtagttaaaacagtttacttttaacccaagtaacatatgcctactttgatactagaaatgattctgattttttttttcccaagtgagtaacgattcaaactaattaatgactagattcgaatagctactacgtacgagatggcactaatggtgaaagctgaaggtggaaatggagggaagcgatgggatgatggattcgattatgagggtgtaacaaagatatatgtacgaggaggtcttgaaggcattcagttcatcaagtttgactatgtcaaagatggtaaaactattactggaccaattcatggtgtctctggtcgtggtttgacacaaacggtacatatgtaatgtgtcattaataactttatatatctaattttacaatcgtttttctatatatatattttttttgtttttgcagtttgagattaaccatttgcaaaaggaatatctgttatctattgagggttactatgacatatctaccggtgtgattcaatcaatccaattcaaaactaaccagcaaacttctgatatgatggggttcaacgagggtactaagttttcactaagatccatgaggggtagaatcattgggtttcatggatttgctgacaagaatctctactctcttagagcatattacattaggatccccgcaaccaaatctgcaatggatggtggtcaaaacacaggaagaggttatgatcatggtggtgactatgatggtgtcagaaaagtgtatgttacttttgatggcacttcaataaggaatatgagggtcgactatgacaaagttggtcaagtggaatgctatgagtatggggtcaagatcggaacacaaaatcaggttatcctaaatattggtgttctgctgatatgttaatttgtttaaacttgtggaacatttctaatttataaatctttaatggtgttgttagtatccaaatgtactaaacgtttttatcgttatcattacagtttaccatcaattatccatatgaatgtatcacatccgtaggaggaagctacgcggatacccaaccttacagatgtattgtccttaggtcgttaacattcaaaacatcaaatgggagaacgtcagtatttggaaaagaaacgggtaccacgttcttgcttgagagccaaggcaatgctattgttgggttccatggacgggtagggtcttgtgttgatagtatcggggaatattatgctccattttctccttaccctccccctactgagaaactagagggacaaggtggagatggaggagactcttgggacgatggtgctttcctaaatgtgaagaaggtttgtataggacaaggccagtttggtattgtctccgttaagtttgagtacgagaacgacgctagtgaggtggttgtgggagatgaacatggaaaggctacattacttggatatgaagaggtgatgattactcctttacatgttttctctatttctttttttttgtcaacaacttatatattattagaactagaaaggctcctaaagctaaatcggagaaacattgtttacatacaaaataaaatgcaggagaatacgggcgtcttgtatatctctactataaaattcttgagttttttttttgttaatatcaaaaccaactaaagttacatatttttacacttctcaacgtgagagtactcctaacaaagatctcttatacactccatagttcgaactggattatccgagtgaatacataacatcggtggaggcttgccaagataaggttatgggagctgaaactggagtattaacgatgcttaggttcaagacaaacattcgcatctctccatcctttggacttaaagctggtttcaacttcgtcctagagaaggaaggtcacaagatcaatgggttccatggaaaatctagtagcatgcttcatcagattgggatccatgtcattcccatcactgagtgaccatccatgtctagcttcactatcgctctgtcaaagttggctgtgctgtatgaatctgtattattctcctctgttgttgttaatttgcatgtttgtttgttttttccattatgcatcgcgtgtaataaaataagtactaagtagtaagtacgtttctctttttttcaagaatatatgaagaatacacattaatcttatcaatattggctatattcctttttgtttttttatgtcaaaataaattcatcagttagaaatgagctgttttctattagagaaacctagtccggagtagagaaacttagagcatgctcaacaataaattcttataaaaacctctaaacaataacaaaaatgattattttattataatattattatataattaaattttaattttataaaaaatgtaaactaatgtatgaaagacatgtggctttggtggtttatttgagtgttaaaaacctttcttcaagctcttatctaagagattttttccattctctttcttctttttcatgttttttttttgtattatttttcttaagagctcattcgagctcaggttgagaaaattaaaactgcatgctatattaatttttaggactggaaatttcttcgtgcgctttgatactgttagcattccacagtctagtcctttaacaaacttccctttatacttaatttaatgtttcgtaggaatccataattctgctttgtattcaaagttccattttaattcttaactcaaatatacaattaattgaattataaccacgttcaacttaattgtttatcatgctcatgagttagatgtaaccaacttggagtacaattgtcaaagaggcatatctacctacaagacaaccaattctatttgttttcatgaatgttattttctcttatttaattaccaaagattgaagaattagtagcaattctagatttttggcccaagcatatgtggtctagtggtaggaaaagctttggtgaaaggtgaaatttccaaaacaaattttaatcttctctaaaaaaaaaacacattttttttggaagtctgtcagttgggttttgactcaattgatttacatagtagtcagaaatgtaagcggcctgactacacctagtcggaaaatgttctaaactcgggacagataatgtggtaaccttttgggaagaaactcaccttaaaacattttgatgtgtttctaccaatatcagggctgaccaaatcagccgataaaatttatcaaaaaaaacaaaaatgggacttcaaacatttggtataagattgtataaatgaacatgggttcaaacctccattaaatgttacaacgacaaatcataagagattaagagtgtatgtgccacattgcaatgacaaatattaaaattatcaggatccggccgcgttgtatatatgttgttgacaaaaagtataaaagtagacaaatattgctgttgcattgcatgtatatttaacaaataaacaaaattcataaaaaaaaatatatactcattatacgcaataacatgtacgaataatctatacgcaatggcattgccattaacaacttattgttaacaagggatccatgatacttatttatccccaaaaatgacaagagccctagtgtcttctaatctctctgcttctcttctttcctctatgttgtgcttgaatatctattttctgaatcaattacttaacacgtgggagagaagtttcaatcttcaaagatgatatgtcaaaatgttcctaatcttttttgccaacttcatccctgaaagctttcctataaaagggaactctgcatttcatgatgcacttgagatctttcaagttgcctttgaggatctcaacaacctaattaagacaaaagatatcaaaataaaggcgtggtttgtttacttgttaaacaagaaagttagttatgtacctgactcatttcaggcctctctatcgatgattgttggattgataacgcagcagccaaaagcacaagttttatctgcctccattcgtactcacccgccagagatggatcgattagctctctaattttgttcttcttcatcaatggtttagcctaggaacacaaaaacaaaaggaaccatgaacaaaatgtgggaatggttttctttgctctagaacataaaagcttaaactcaatatagctaaactcacccatagaacaagactttgcttggagtaatcgagagctcgtcgtccggtaacaagttccagtaaaagtacacccaaggcgaatacatcggtcttttcatctactatcccatgtgttaagtactctggagcaagatacctgaaataaaagatgcaaactatatctagctctgagactcccttggtaaaaaccaatatgcaatgaagaatacacttaaagcgtagactcacccgaatgtgccctcaaatttggaaacaatgtggtgtgtccaattttcaggtaaccacttcgcaagcccaaagtcacatatctataacccccaaacattttcattacaaggaatacattaaaagtgtatgttttctccttaagagcatcatttatcatacctgaggagaaaaatcatgtgtgagaagaatgtttgcggctttgatatctctatgtataattctcctatgacatcctctatgaagatacactagaccctccgcaactcctaatgctatcttgtacctaatgctccatttcatcttctccttggagcctataatataatcaagtaatcaacaattgataaatattttaaccattaagatgtaatcatgtaagagagaaagaaggtaaaagagacatactatagagcatagaagctaagctgccatgaggtgataactcaagaacaagatgcattcctccttcaactccatagcctaaaagcttagctatgttgggatggttaacatgtgccattatacccatctccgaaagaaagtctacaatgatctcttcactatttccccgcatcaaccgttttatcgctaccatttgtccatttggtaacatccctttgtaaacttcagcataacctcctttcccaattagattttctggtcacatccaaacaaattgcaaaaatgacactaaaatcttccactttagatatgtataaactaaaaaactaaattttctgttccataaatactacttaatcttcatgacaattgcaatcataaaacatattttgacaacaacaaaaaaaaaaaacattttagactcaaatttgcttcaaaaacaatttttttttacctaaaatgattgctcatgttcacacttgtttcactctcaattttactttcagaatatgaattgcaacatataattcagatttggtacgaacctaaagagaaattgtttgtagcagacttgaggtcagagaaggtgaagattcttctaggagaatgtagaagaaagtgagaatcattggagctaaatctgagattttctctcatgctactgcatcttctaaaagaactcttaataacaccattgttgtgaaacggaatcttgacattctcaagagactttttggatttgcttctgagaagctgaaccatcttgcggaaacgagaagaggaagggttcttgaccgtctcggaggagctattgaattcttcggttctgaagaattcttcgagaactccggtcggtgaagaagaatctggaactttcattgcaatgctctgaagaagaagaagacaagacaagacaaaactggtttgaatttggacagaaacacattttagcatctaattttgaacttgaagcggcgcaattttttaatattccgcgaaaaaggtaaacttattaattctttttattgttttaattcattttgtgtgtaaaagacatggaaattttgcaagcaaagttataaaaaaaacatcaaaggagagagaagaatgtttatttgtttacaaatcaaaacaaaacagaaattgttactttttcttttttggcaacaaccttagctagtgcaccgacaaatccataaaaacctattttatagaaaccattttggtaattgagcgacacaagtgcatattatgcatgagaaattagacagcatcttgttatttaaacaaacaaatgttggacaataaatatctcagaacactcatattttggagcaagagaaaatgccaaacatcaatttattctaaacgttttttacatatatcaaaacaagtttaattcgatattaaattatatcaaatatagccaaaaaaattagccaataataaagattaatccaataaataactaagaaaatagaaaattaattcaacaaaatagtgaaacataaaaagaagatgcggaagaacatttcttaaaatagaaaatataccatgagagaagagagcccagtacatctgaaactcaatatattcagcttggtgaagtgagagagagtaaattgtggagactatcacttccggtatgataatccatcgctttcttaccaaaatatataggacagtccaatgtatgtcctctaataatgatcaagattcaaggtgatggagataaaagaaatagaaattgaaaaagaaaaatatgtttttgttgtataaaagatatgtgaataagatatatttcttagaggagacttgataattgaattttaaagagaattttctttttgttacaaggatttgaacaatttttttcattatatcttaaatttatttgaccaataacagtgatcaaaaatagcagaccaaaaagtggttgcaattttctgaccaaaacaaaaagaatggttgaaattatatttctaccaatttttttgaccatatattcaactaatttctgaccagcttatatattggttattggatatataatattaaaatatatactaaaatttaatttataaatatatgattcataataactttaataaaagtaaatgtcttaaatatagaaaaataaatttaatacgtcaaaaggatacaatacttttatacaaggaaccaagtttagaaattgttggagtaaaaagttctcaaactatttgagctgttaaagagtggaaatgctattttccaaatcaatattcatcaattggtatataaatcttggaagggtgatgatgcaactaaatgcttgtaatgttttcacaaattttaaaatggtgtatttaatcaattggatctccaaaagagtcgtcgagatatctcaacactatatattgaacatgacactatgtttttagacaatgcattgtcttatataaacgtatagactggtccagcccgccggtagctaaaacatctgctttaagccattaactataaataaaagtataaaactgtagggaggagtatttaagagttgtgcttactacaattgcaatgttcaagtcttatattttactttcttcttttttccttctgattttcatgtcctttctttttgttttgtggagtgggagagaattgtttttagttcatttaatattttttgtttaatattttcataaaacaaaatctccaaatatttgatttaatttggcgattaggtattatgatatttttaatttatctgaacaaaagtgaattatagaaattatatgagttttcgaaatgttttaatatatttacgtattttaatgacttttttaatattaatttttatagaaaatcatattattcaaataatgttttaggccataaacaattcaaggaccgatcctgtgtatatatatagataatgatggggctacaactgatacatagtagatccaccaatctccaaattacttataacgtatctaccaaactagaattattttagagtaattaaggaatttttcttccagaagaagatacattacgtaatataagactaaacaatcatttgattgtgatttttttttggtaggaagattgtgattagttgttgttacctggtacaaataataccgaagcatactttacgagcaaatcaaggcataattattacaaccaccacttattttttctttgctttcttgtttgttttcagtacgactttaaaccttttttttttttgttaaagacgactttaaactttcaataatttacagccactaagctgtcgattagttaaaaatctaaaataatttagctaatattgaaagataagattgaaatatcactcatagatttgcataatgtaaatagtaatgaattactacaatactgaaacctattttaaatgataataactgatgtggagattcaaaataaccgaagacgacatttttagttaacttaaagtacaatttacaaatgtataatttttgcataatgtatatcttatcaacgcagaaatacgatattttcaccaattttggatccttgacttttattttggacaaaaatattaattatagagagataaagtgaattctccatatattctccttaatgattaaatgaatcatacatgttccttatatacacttagagtaaactaaaggaatttttactctaattataaacatcatatacatatgttaatagccccccacaaatcactctttaggaaggaagaggtttgaaactccaagacgattaagaagtgatttgaaagggccaggatgcaatggcttggtcagtatatcggccagctgattctctgttccaatgtgatgcacttgcaagaatccaaacttcatttgatctctcgttgtgtgacaatcgatttcaacatgtttggtcctctcgtgaaaaactggattgtttgctatatgcatcgcagacttattatcgcagaaaagctttgccttcgtttcaactttaatatgcaaatccttcaacatataactgaaccataaaagatcctttgtagccactgccatactgcgatactcagcctctgtgctactactactacacacatcctgcttcttatatttccaggaaatcaaaaaagttcccagaaaaatgcaaacaccagaaacagaacgtcgagagtctaagcatgttccccaatcagcatcagcaaatccattaaggcaaagagaagtgtttgtagagtaaaacaaaccttgccctggattacctttaagatacttcaatactctctgagctgcttgcatatgcacatcagtatcacatgacaggaaacgactaagtcgatgaaccgcaaatgtgatatcaggccttgtaacacagagatataacaagcgaccaaccaattttctatatggctttgcattatccaagagagttcccatatctgcagtaagattcacctttggatccattggaacagtactcggtttgcaacccaacaagcctgcatcagtgagaagatccaagcaatatttcctttgacaaatggcaattccttctgaattcctagcaatctcaagaccaagaaaaaatctagccggtcctagatctttgattttgaaatggtcagccatatatgcttttatcaaagtgacttgattactgtcattactagcaatgagaatgtcatcaacataaacaaggatagcaatgaaagaggtaccttgtagctgcacgaacaaggtgttatcagattgagactgaataaaagcggcatccaagagagtcttcgacagacatttgtaccattggcgtgatgtttgcttcaacccatagatggacttatgtaatctgcacacatgatgagaaggaagaaatccagaagaaggtgtatatccctgtggcaaactcatgtagatctcttcatcaagctcactatgcaagaaggcattagaaacgtcaatttgagttaaactccaacccttcttggcagcacaaccaagaaccagcttaacactagctagtttagcaacatgagagaatgtatcaaaataatccacaccttcttgttgtgtaaattcttttgctaccaatcttgctttgtatctctcaatagtaccatccggattgtacttaatggtataaacccatttacaacctattacattctttcccggaggcaaagaaaccacactccaagtcttattaagctccatagccccaagttcctcatccatggctttagtccattgaacagatataatggcttgtttaaaagtcttaggttctgtttcagcagaataagataaaacaaaagactgaaatggagattttaagctagaataagagagaactgaagatataagatatggtgttgaataaactttgagatgtggaaaagaattttgtggtgaaggctcagaaatttgtgtgaaagaacagtgatagtcagataagtaactaggagccttaccttggcgttttggcctagcaacagaaagtgaaacacatgctgtctctgttgtaactgcttctggcaaaaccggtatgatactagagcttgaagtggatggttgtgatgatgttgtggatgacgatgatgcagatgatgcatgagaatgttcattatgtgcattaggtgatgatgatgtatggatttcatcattaacatgaataggtaatggtaagatagcatgactaaaaacatcagaaacaggtgagattggattatcatggaaaggaaagatgttctcatgaaatactacattcctagaaactgaaacacaatttaaatcaatatgcaagactttatatcccttataacttgatgaataacccaagaaaatacacttttcagacctaggagagaacttattcctatccttttgcaaagtagaaacataacaaagacaaccaaaagatcttaaaaaatcataagcaggttttctctttgtaagtaattcataaggtgatacatttttcaacaaaactgatggaatcctattaataagaaacacgactgttaacaagcaatcactccaatatgcaatcgggacattagactgaaacaacaatgatcttgcaacattcagtagatgttgatgtttacgttctactactgaattctgttgaggtgtgtatgcacaagaaaactgatgtaccattccatgttctttaacaatagatttaaaagcaagttcaggagcattatcagttctaatcattttaataacagctttatattgtgtaagaacatgtttaataaaatctgaaaaatgttgtgtaacttcacttttatttctcatcatataaacccatgttacacgagtacaatcatctactatagtaagaaaatatttgtatccttctaaagactcaatagaaaaaggaccccacacatctaaatgaacaagatcaaatgaaagtgaagacaaatgattatgagactcatatgacaatcttttctgttttgctaaatgacaaatagaacaatgaaatggatgcatgaaactagacttagacgaagaaagagtacccgaaatgcgatgcattttaacttgtcagcaaatggatgtccaaggcgttggtgccaaagaattccatcaactaccaaggatccagcaaattgatcatgtgtagatggtgcatcaagtcgcaaaatatagagattatgaagtaggatgcctctaccaatcgtcaatccctgaataaactcctgaataatacaagaatcaacatagtagtgagatgagcaatgatttgtttttaaaagactactcacagaaatcaaattgaatttaaaagaaggaacatgcaacacatcttgcaaaatgagtgaatgagataatggaattgtgcctgtgtgtgtgatctgaactctagtatcatttggtaaagaaacagttaccccaaaaactgtattagtttcattaaacattgctagatcagaacacacatgagtagtggcaccactatcaattatccagctaccatgaggaagatttgtgtataaggaagataaacattgatgttggaaagtaagttgatcattttcaaaacgaagagatgaagaaggaaaaggaattgtaccagcagacgattgaacagccattataccatgttctgtaactgttgatggtgccgatgttgatggagaaggagccaaaggctctgaagtttgaatacgacctgagagttgttgaatcaatgtctgaatttgatctccactcagcttgttaatatcaaggttgttaacttctgtagctggtggtggaatgtatagactaggaggattagtcatgatatttgcaactgaatgaggtttagatgcagcatttgcagaatatcctctaggctgaaaggttgatggagcaggagatctctgagattgatagttagagatggtgctcttaaaccttggaatataccctggaggataaccaataatcttgaaacatttctgtactacatgtccagattgaccacattgggtgcaaactggtctaggtggtctcggacgatattcattttgtactgcaaaagctgtattatccatctgaccttgatatgaagagacatcttgataacattgaccagaagattgattaggtcctgaagcttgaaacactacagtttttgatgaaggtgtcttaatacttctctgcctttcatcttgagttaccatattgaatgcatcctcaatagttggaatcggcttcagcatcaaaatttgtcttcttgtagactcaaatgactcattcagtcccataagaaacttagtgactcggctcctctgctgcaatctttcccacaacactgcagcattgcactcagatcttccacaagtgcaaacaggcaattccacataatttctatattcttcccataatgtcacaagttctgtataatatgaactaacatccatagcaccttgttgaataatactcaaacgctgttctatttcatagactctaggtgccatcttgtttgaacctagctaaaagatttttccaaattccctcagcagtagatataaacagcaagctttgaccaatcttcttgcatacagaattcattaaccatgttgctaccatatcattgcaacgagaccaagatccaaaatcatgatgatcaggtgaaggtttagtgatattaccatcaataaaaccaagcttgttacgtacattgagtgtcatacgaacggatcttctccaagaatgaaaatctgctccagtagtgagacgatcgaaaactagaaccaatccggcatgatcggagctgtgaagaaagaatggattctcatactgatcaatagactgtcgcgagctatccacatttgtattggatgatgtcgtcattgaaacaaatcaagaatcgagagatgatactgaaattgattagaacgacgaaccgaaaaacgattagagttgaatcgatcgtgatgtagaacgaatcgatctgaaagatgaaggagattcgagcttgagcttcaactgttagtgaaaatcgcgaatgtgattgcgattggtgattttgagacctctattgatgaatcggagctcagtaaagaaaagaaatggaagatttagggtgataacgatggtgattccatagaaattggatgaaatcgaagaagaagatgagttttggcggaagaagaaactctgagatttctgttatagtgagagaaaatgtcttttgtgctctgctaccatattaactatagagagataaagtgaattttccgtatattattcttaatgatcaaatgaatcatacatgttccttatatacacttagagtaagctataggaaactttactctaattataaacatcatatacatatgttaataaaaaaaaaacgtggactttaatttcttcgacgtcattttataggaccccgaattgagttcctaagttcaactagcaaatcgttttgttcttacttgttttttctttgtttggtcaaacttgttttctctaacaaaagtgcttacaaaaaaagctaactttagaggttgggctttatacccaatgaacataaacgaaattagcttagattgaaacacataagtgtctagaaccaagttgaaccaaagaaaggagaaggcccatcaggagcccataatttgccgatagttgcgtcgatttaataatctagaagaaaaccgtgttaatatcggagaacaacttttcccaaaaaaatttggtcgtaagatcctttcccaatttggtttgtgaattggcttttagtcggtgtaagtggtggtgtagtaattttatggaagaagtctgtggtaacatgaattaattgtaaaaatatacatgaattatatattgtcatcatatacagagactattttctgtggtaacaattgttctgtacaacgacaatttgctatggaaactgtttctttcagcgggagagatagagagagagggagagagtaagcagaaggttctggtttttgtagtacttacaacggttttaaccaaggtagggcaacattgggtccaagcctagtcctgaccctcccaagctaccagggtctgcatgcttaactctcccgaaatagcgtatgtggcgcaacagtcttgctaggaacgtgttgtggcagattgtggagctgtcacataccactgccacgtgcttccgggctcttgtaatggctacattcatccgtctgctatcccctaggaatcccactgcacctaggttgtttgaccgtacctgtaatgggttcacagcacaacaagtacatgagtcttatttgcgctacgagttcataacgacaattttgttaatcggttttggttttcacaatcaagttcaactaacatatctaaatagattcttaatgttatctccgtttctttactatctgctagaattttaattatgaaatatcttcatgccacagaatggaaaagaagcagagtaatgtttaccattgagatgatcactgcatcagcctcccgcccttgaaagctgtcaatggttgcgacctcaactccatcagccactggaaaatcatccagcctttctctgagaagttgaacctgagcaacatatggggattgaacagcaatagccattggactaacacctacaatcatgtccaacaagttttttactaggttatcgagcttatattcaggaacacaattaatatgcatgaagtttagattcttcaagctctggtaattgttttgtgttatatcccagtcattcaactgaaaatagatggttcacctgcgtatatcaaagaaatgacgtgattaaccacaatatctgcttctccttcattgtataatgagcctgtgccagctggatccaaacgctcctcgcagcccacggataaactcccatatggcattcttgtgtcaagcagaaccagtgggcattgcgttatccaagtagcctgcagtaagtacaagaaaagaatgatgttacatctaagagtcatggtgttaccaaaggtgcttttgatctacaatgatgttgcattttattagacattcaaaggtaagttaatttgtgacactgtttaatattatccagttaccagcaaaacaagagggaaacatctattgcaagctcatgagcaacatcacttttcaataaggccataaaaaagctgtaatcagtagatatttcaaccacaagtaaagatagtatcatgaaagacaaaccaacagagttgcaagagaaaccagataatgctaaaatggaaaatttctaacaaataaaagctttgaaggtaaacagatgtgtgattgcatgccatgtaaccatcatataaataccacaccaatcaaacagcagaaacagtcagaagaagtaccttcacaaaaggagaatcgataagcagatgagaggccacacttggagcagatttcaaccatccaccatacatctcctttgatgcccaaccagcgattacatcgttcatacgatactgagttgttaattttgtcgcaagaactccatcatgtaaagatgcagctctttccagtaaggatacaccaagtccaccttctaaagctttacgtgatagaacaactggtgctaattggcatggatcaccggaaagaatacaacgtttcccttgcaatattgggatccagcatgaaggctcgatagactgaccagcttcatctataacaaccaaatcaaatgtttctaacctcctaatcaaaggatcagctgctccaatgttagtggcaaaaacaacctgtgcatttgatagtatttccttcacagtctctttttccttcttcttcaacgtctttccaagctgtttcaagagctgccgaatgccagctgcaagaacatcatccctcaggcattgccgaagatcttttcttaaatctgacttcttcctttccaattctgctcggaagcttgcaagcttagagttcacaatttcccccaaagactttgaagcaacagcagatgatattctagcgggatttcctactcggacaatgtttagtccaagatgcaagagcttctcgaccatgttatcaacagctgcattagtaggcgctgttacaagtactctttccccctgttgaacagccagggtaatgacctccttaagcattccagtctttcccgtgccaggaggtccttggactatcataacaggtctttttttgtttactccaagagctatggctctcctttgggaagaatcaaataacttactcactggctcatcactcaactccgcttcactccagtctacataatcattttgctccagccatgttatatcttcaccatccccaaataaagtcgccacaacagatattgatggatttttcttctgcagaccattcttctgcagaagcattagggcttcgcagttacgctgcaacgaaagactatataataagcgagtggtagcaaaaatataataatgtaaactatcaaatatagttgagcaaacactcgcaataatgggactgacatgacaagcatatttaagatggaggttactgtgataaaacactgcatctttaaccaatatggaacaaagatatacctcgtaagtaagggcatcggccaacccatgaatacgatcaattctcacactctttccaaagagcttggaaaaagtaggatctccatgacgagattctagagccacaccaatgctacacccatcttctccaaggttgtgaacaaagccctgcgtacaggcagttgccccagcacccctactgtcacaaactcttatgcaaaccatgtcaccaggggaaagtgtagtaggaggaagacggtggtttcccccaaccttaaacaacaccaagtgcatacctccgagccctgcatattgcttacatattacaacaaatttcatcgaaaactcaaagagaacaagttacaacaaaatgcatatctgcctataagtctcacctgtggaggtactaactgcatacaaattgcaaattgtatcacaaagttcctgtggagcatcaccatgcctaaccaagaactcaatcggttttgaggaatcagagctctcatctggagtaggaacaacatctagttcttcctgtgtaacttccagttctgtatctcgttccacttgaagtaactgcgacatctggctggtgaactcatcaatcctttcctgtatagccttcaccttctctgagtccatccccaaaactccttgaacaggcttagcttgagcagctttgcgagcaacctcccgatgctgagctatacaacatcacacaaggcaaaaagttcaacttcagccaaactataaaccaataagaacttagactcgaagaattcaaacctgaatttgcaatctccttgagcagcttccaagactcagactccttccaactctccattatattcttccgctccaggtcttgaagaacatcacgcaactctctctggaaatgatcgaacaaggtaggataatgagtacaagccttcaaacaaatgacttcagaacctaatggcatgggaatagcattgagatacggttgagcttgaatcacaaacgtcaaaccagatccgacgttctgcctcaactccgaaaactccccctgaacctccgcagttgcaaaatccgaagccatcgctttcatcgcctgactaatccacttcactacgttcctccctaaatctctccgccctaatggatcaccattttgattcaaagctcgaagactcaattctttatcgttcttcggttcctcaacaacacttaaactctcagattcagtattatcgttcctcttctcaattttcttaaacctaagtttatcggaaacgttacttttccttcgtggcttcttcttagtaacactggagccgccattaacgccgctgcaaaagaccttccgcgtcgggaaaacacgaactccgacaacacaaacgtagtttaacggcggtcgagtgaacgtgaacgccgccgtcgccgtagtagtcgacggaatccgaatacttctacacaaaaaacttgaagctgcttccatcagatttttcccagcgattcaacacaaaaggaaacttcagattcccgagaaaacgcaagctagaaagtggaatctagtgacattttctgggaatcaaaaggaaaatatacagagaaattgaaagtctcgtgtaacttatttatatattggagaaaggttttttcagatatttgagtttgagagacgaatttaaatctaagccgcaaaattaaacttgaggttctcagaaatatttttatttttgtttcattttttggtgaaacgaattttgtttttgagactttatgtcacaaacatagcacagagagagtcgtgatgagagatcgtagtggagagttgtgattggctagtattgattctttgtgggcaggtgacgtgtttaattactgtcctatccttatatttttgtttgttgacttatacccctgtatttttagattcttctttggagaccctttaagttggattttagaattgatcgaatggatcggtagaatgcatccaactgatctgtggattttacaagctacatcattcatatagcacatttgaaatactacacgaaattttttcgaccttaattttgaactaattaagattatttttatttaaaatctcacaaaaatttagtttaaaaaaaacaatcgttccatcattctctatcttctatctcctctaaaaaaacagatctatgagtttagttttcgccgtttttgcattaaagtcttttcattgtcgatagttgggttggtggacgaagataaacgcttttcttctccgatcatatgatgagacgaggtagatgatgatatttctaaagcaataatgtttatgctcaaatgaatttattaagagaaatataaaccggaaattagatagttcattaagagtttattattcaaataaacttaaaaaggaaagattactttgttgtcaccaaaaacacaataattccattgatactttaataaagagaaagagagttgttttgagataactctcaaagttacaatcaaagttctcattacataactatatatatatgtctcgaagttacaatcaaaattctcattacatgcataactatatatataagttattatcttgctaaccctagttacatagaacattacatggctttcggattactcataagactatatttggcttcatattaaacttctaatagtaaatctatagtgagttggcgatttcttagcgactttgaatactcatttttttgtttttggttgatcgaagactcttgtgaaacaataaaatagctattttatagctcggcgattaatgtctgatgctttcacttgcggcgaaagttggatttcagataataaattcacttcgtgcaaagaggtatgtttaaatttaatataattggtaaaacaaaaacaactgaatcatgtttgagttataatcttacaatcgttacttaatagaaagtagttgtttactgaaaagcttgtcttcgttttagtactacaaattaaatataggggtgtgtgtaacccacggaatattattatagtttttgaaaaactgtttttccaaagattattggtcctatgtagaataatgggtgaagcaacatgtggcagagaagatcacttgagaaagacaactaagcgtctcccgaagaaaagatcctacttgttcatttttccatcactaaagaaatttcttttttgggtcaaaaaataaaattcttacaaataatatgtggagaaagaagtttctcatcataaattgtcaagcaaaataagcaaatggtcaaaattgagtttgtttatcgtcataaaaattatgcgagaaaaggatgttgtggatcaaaatcatcaaactattttattagaaaataatcaaactttagaacaccctaaaatgcttggtttcatatttgaaagaatattatatatatctttatatatcgaaataaactttttaattacaaaaggatctcttaaatttgaccatttttctagttaaacccaaaagaaccatatgttttcattattaccaataaaacttttaaattttatgtttttgttttatcctatttttaaaaaaatatttaaacagaaatataaaatatagtgattagagccagggatatctctcatgatattattcgaaatatcgttgctatgtaaatgaattatgaaaacaaaatgataaattctctagaacatgatgatattgcatgtacatcaacaaatagagagactcttttaatctctaattaattttggatgaaaaaaacatataaccaacattaaagtataaactatacaattagacccaaattaaagataaaaaaaaaatcaactcatatgtccatctaaacctatatttacagatacaacatatatactagtcaaatctccaacattaaaatttatcttcaacggttattattataagaggttgacctctgtaattttagagaatacgttttcataattaccattacattaagagattttattgtctataggcttatgtataattaataaaaagagtataagaaaaagtggtaaacaaatacatcacatacaaagacagcaagcatactattactattatttaattatatatttgtatactgttattaattctaagttatctttcataaaataattttattataacttattttaagtaatttaatatttaaatcactacgatgtcaccaaatgaattattttaatttctttgtcactaatgctattttaattttctggtcaattatttttaagcccatttttacctttttaaccttctcactaattttgccactaaaagtttattattggctaatgtaacccattgaatatatattcttttgacaaaaaatattttaggtagtatggttttaaaatatgacttttagaagattataaatgttaaattctatttatttaactcttaaaaatcaattcattttctttagtgaaaaataaaggcatctttgaaatcaaaatcccaacattattactttaagaggggtattcaataattgattttaacagaatgaaatggaacgagaaaagttttattataatgattatttctctcccaatttgtgaattagaaaacttttgttttctatttaatataaattataaatattaaaaactccacaaatcctaaactcattgaactaaaaaaagccccaaatcctaactagatcagccaggtgaaatctactacatgccatggagcacatcatatacaagcttttgtcccaaaggagacatatattggcagaatctagagagtactttcaattcctaatcttttgaaaattttgccattctttcggcaagtttgtaatccgtgttgtacacctcgaactcaactcgtatatgaccttgaggttcctcggtctccatatcacccctctatggagtgcctattgttgtagtcgtccttctttatgaagagaacaatatgttttctaccctccttagtccttatccaccttggtctccggttttccaaccgagaaccccccctcattactcctaacctgttttattatctttcgcgtaagaagtaatgtatctcacatgccagtgaaaattgaggtttcgactcatcatcttctcgtttgtggcaatgtatctaatcgctagtgtttttgtcatgaggaatttgatattatttgtgttttaaaggtctttttgtgcctcattacccatgaatatgtattatcatggaaaatatcaatgacgaaagaacttggatcttcttcccattttaattgtgcacatactctaaaattttcatttgatatataatataacattgatattttctcatttatctgtattaagtcttgaagttaatctcttatggatatagagatgctacatcattacgcgattactaggtttctgtattattaaatagaggttgtctgttgtcttttccactatatagtttaacaaattggtgaattgaagcgtccaacatgttcacaaaaaccattggaggcctagtttgcttagcatttgtataagagggactttttaattggttagttatcatcactagactaaattagacggttggatcaaaggttgagtaattgacattacgattgtacctatttttgatgcattagtattatgttgcatcaccgatattatatttctagttgttggagttctatctagtgactacatcaaattgatgtacactcaatatctatctagtaccaccgtgcatatgtccctaatgatagagaagcgttcaaagttgtcagggaaacattttcactcttatagaagtctaactagttttaagtcgtgctagtctttcttccttatatttcatataaataggtcagtggtgcttgtcgttaaatatacaacattgtctgaaaatatattacctcctacatggacatttctagtatctcctacacaagtataatctcatatagttacaacacaactatttgagcaaatgtttactattttggattcatatagttcttaaaaccaacatgcataatattctttattaataaataaccttcaaataacacaactttaatttacagtcaattagaagtgttgatgattgatttttagagattagacattcaggtatcaaattcaaacacctctctaactgatccaaatgatcaaatttaagctaaaattgtagctactgatcagaaaaatagaagcaacatttgttgaatagaaaaaaatagaagcaacatctgttttaaaaaacacattgcttcaaaataataggaaagtacaaaatattagatttaactaaagatattttaaattaattaaaaaagatatttggattatatgataataaatccaataaaaaataataaaatccagaatacagaaaaaaattgcaagaggggaagcagaagaagaaagaacaaaaatcaggagttggcattttgaagacgaaactcatcatcatcttcttcctcagacaacaaaaaaagcttttcactttctctccacccttctctctctccttctgaaagtctctctctttgccgtcgttagcctcttcctacacttggggctgcgattcttccaatcctccgatttcaatttcatcctctcaatcatagtttgaaatcatcgagcttttacggtgctgttggtgtttgacgccgtaaaattcgatccttttttatacatttgatgttgattttatcgatagttttgtgagatcgattttttagggtttcgagtttggcgctgacttgagggtttgattggatgagaataaggggttatgggacttgagtcaattgggtttgtctccctaatcatcgcaaattcctgatttctcagctctttggaaggaattaggattcgttgatttcgagttttgtgttgtgttggttgatgagagagttgggtttggtcaattgaggggtttaggtgttgttttactgttttgattctgatcatggatgacattgattcaagcgatggtgctgcggctgcacgagctggtgagattggctctattggggtatccacaccgtggaagccaattcagctggtttttaagcgttatttgccacaaaatgggtctgctagcaaagttcatgttgccgtgaagaagccggtaagtattgcccttttaatttcatctttggatgcatcaaagcaagctttgtttttgtgtgacatcttttgtataggagatagtgagaacaaatcaaagacatggcaagtgtgtatgctagtttactaagacgatgttgtttgtgaagctgctagttatctctagacttgtatagatttcgagttgaatagccttggttcagtaatgcatgatagtcttacaaatagcctagtgtgttttctcttacattagtaataaatgaggcttagaagatgtttccgcctctaaatctactgaatttatactgtattacgagttatatattaagttggtaacacactggcaagtgccttggaattcttgctaaggtggctgtttggcttcgttgaaggtttacataaattatgtgtaaaatttgtattatatcgtatctcagcttgtttgaaaaccgatgttatatatcagtatctatctacattagacatatttaaattacctagtacatatagcttaatgcatttaccatgcaactttagtttaaggttatatagtccaacacaaatatcactggtaatgcaacgtcaaggtagagatatctgttggtcctttttcggtgtcatcatccaaccaaaatcagctcatttctgaattcatttcaaattttagccatttcatattgttggttcttgagggtcctggttaaattttaaccaaaatcagttttttttaactctaataaacaagtgagcatgttattgctttaatcttagttgcaacacaggcagtggatgattacgtggttgaagtctgtcatgatctttgggtttgcattgggaatgtttgtgcacactagtttatctgctaagaaaattggctggtagattttttggataatttgaatgcataccagagttcaattggcattaagatgaccaatctgaaccttgttgtgtatctgtctggactctggcagagttatagcaagtctctccattagttttctagccgctgttatttggcgccattctgctgtaatagttgggcatggttttggaatttactgataactgttggtgtcttcttgccttgactttaagcgaggttatccttattatttatactctttgtatctttttttttcttgtactgtatcactattatcacaaaaaccgcagaaatgtatttcactcaaggatggtaacagttgaagtgtttgtctctgttgcagtacttttcagagctcagattaactttgatatatttgtatgttttgcaggtggtggtgagactaactagggacttggttgagacgtacaaaatatgtgacccacagttcaaatatagaggagagttgaatcccaagcggtacttgactactccatcagttggtgtgaacaatgatggctttgataatgtcaactacgatctaattctggctgtaaatgatgatttttgcagttcagattcacggcagaggtttgctattgtcttatttattttcaatttttattataccaataatgatcctccttttgttgtgctgtcagacgcataaaatttgaaccacttttctatccacaatagacgtctatttgattaagctaataagcttcactcgttctcttagatacattgtcaaagatcttcttggccatgggacttttggtcaggttgctaaatgctgggttcctgagacaaacagctttgttgctgtaaaagtaataaaaaaccagcttgcatactatcagcaggcattggttgaagtatctattttgacaacggtatgtaattattcaatatttgaatgatcttttgtattcatattcttggtggtgaaaatcgctagtggggtctgtctcttacttttcgcttgggtgtgtagctaaacaagaagtatgatcctgaggataagaaccatatcgttcgcatatacgactacttcttacatcaaagtcatttgtgcatatgctttgaacttctagacatgaatctgtaagttctatgactgaagtattattctccttctatctttctatgtgtttatcctctgatttccttcatgcaaactgtataaagtgtttgttggtgacaattctattgtccttcgtaatatatggtctcaggtatgagctcataaagataaatcaattcagaggcctatcattaagcatagtcaagctcttctctaagcaggtatttatatttttatagatctatgttttcactgttttgtttctttctcattctcttaatctacagtatcaactgttttcgtatggtgtcccatagatcttacttggtttggctcttttgaaagatgctggcataatccattgtgatctgaagccagagaatattcttctgtgcgccaggtctactttctagcaccaatcctatcaaaattttagttaaaaactttaattaacttgttttctttttaattttatcagtgtgaagccaactgaaattaagataattgactttggatcagcgtgcatggaagataaaactgtttattcatatattcaggtttcttcttgctttctgtttatatatctgctagattatgtcataacaaaaaaataactaagcttgctggtcaatctttctacagagtcgttactacagatcgccggaagtcttacttggttaccagtatccttttgaggtccaagatgataaccgttttctcacctaaattaatatgttttctcttagtcctttggcactgaactgtcatatgtcaatggacataggcttgttttagcactatgatcatgtgactcttattgatctatttggccaacttgcgttaactttgtcgatatagttccagcaaattgttagtttcctatcaacatcaatttgactgcagactaaatttcgttgctattttgttcctatggtagatgctatctaaaattatcttgaagtcgtatttggaggcttaaccactgtatagatacactacagctattgacatgtggtcttttggctgcattgttgccgagctgtttcttggattgccactatttccaggaggttcagaatttgatatcttgaggcgtatgattgaaatactagggtatgatcctttgttatggaattgtgatttgtagtctataatcttaggggtcagggaatatttggggtctgcaccttatggtccatcctcattctcttgcgtcttttgtttcatatattggtctcttatatattgggtttagcctattgttggtgctttatggtcattctttcattgccctatgtctccagcaaccccctattttagcttctcaacgtttgtgcaactatgaagtcctcgcttctatataagacaagtgtcaagatttctagcaacgaggagcttttcttattttctttcatgccttttttattttctcttatgattctatcaattttctgtcaatttttttccagcaaacaaccacctgattatgtgctcaaggaagcaaaaaatacgaataagttctttaaatgtgttgggagtgtccacaatttagggaatggtggaacttatggtggcctcaaaagtgcttatatggctttgactggagaagagtttgaagctgtaagtaattcttgctttacctttgagctaaacaaaaatataaagagaggggtggtatggggagaagagagcaatacagaaatgagtattaaaaaccaggaaaacgattatatctgtggataaagtagatttagattgtttgatgaggggattaattttcttcttacattgtcattaagatttccccttattgattttttttctgaataactcgtgttgttctttacttttaactttccagagagaaaagaaaaagccagaaattgggaaagagtacttcaaccataagaaccttgaagaaattgttaaaagctatccgtacaagataaatctacctgaggacgatgtagtcaaaggtaaagtcaggttgttctgatgttctttactttgctttgataatcactggactatcttgcatgatgactgttttttttttttcacgaactatcacagaaactcaaatccggttagctcttattgattttctgaaaggacttatggaatttgatccagcaaaacgttggtcaccttttcaggtattgaacttccttgcttaagttatctatatatttgattttgaaggcttctgttttttgctagccataatggattaacatcaacttttcatgttttaaggcagcaaagcaccctttcattactggagaaccttttacgtgcccatacaaccctccgccagaaacacctcgtgtggtgagtcaaatggaattccgtcccaggtctcaaaatttttgtggtcttattgtcgtaccaatggtgttcaaatcagtgggtgtattgtccttgattcatttttgtttcctgatgataagttttagttcataattttccaaaccaaataatcatgagatggattgaagatacttttccttctagcacatttttctgatgcttcaattttctctgttgtggataaaaatgcttcatttaaaagatcttgcataaatgatctttcttgcagagtgacgtgtgaaacatttctctattcactgaatcggtttttgttccctttcccttttctttgtagcatgttacccaaaacatcaaagttgaccatcatccaggtgaagggcactggtttgccgctggtctctctcctcatgtattgctctttgtcccttcgaaatatttgtaagaccttcaagttgtttgtgcacctattgtggaaacttatttacttctttgacaggtatcagggagaaccagaatcccgatgcacaatagtccccattttcagatgatgccttattcacatgcaaatagttatgggagcattggaagctatggtagctacaatgatggtactatacaggacaatagctatgggagctatggagggactggcaatatgtttgcatactattctcctgtgaatcatccaggcctatacatgcaaaaccaaggtggggtctcaatgcttggaactagtcctgatgccagacgtcgggttatgcagtacccacatggaaatgggccaaatggccttggtacaagtccatctgctggaaattttgcaccactaccccttggcactagtccgtcacaatttactccaaatacaaacaatcaatttttagctgggtctcctggacaccatggcccgacatctccagtaagaaacagctgccatgggtctcctttgggaaagatggctgcatttagtcaaattaatagaagaatgagcgctggatattctggaggttctcagtcgcaagattcttccttgtcacaagcccaagggcatgggatggataacttttatcaaaatgaggggtattctggacaattctctggttcaccttcacgccggcaactggattctggtgtcaaaaatcgtaaacagacacaaggaggcactacattaagtactgggtactctactcataacaatgccaactcatcacttcggtccaatatgtataacccttccagtactgcacaccatcttgaaaatccggatactgccttatcagtacctgatccaggagactgggacccaaattacaggcaagtaaacaagatatctctctaatttaccagttaatgaatgtcaaggttctttgtctgtatgttagtgtgtatatgatgtgtacttgaacaaatctggctggtttagctagaattcgtgatattgagctcatgtattgtcttccatttaaaccatatcagactaggcatgtcacagcccgtgatttctgaccatgttcttgttaactggtagttaagtttttcacttgatagacaaatttgcttgctgaaacagtatcaaaatcgaccagtagagcgacattaagaaccagtcacgttagtgtcaatttatattggcaacgtctttggttacctgatgttattctgtctttttttaatagatacttgaccacttttcattctggctatttacagttgcataatataatactatttgtatgtcaaaattctattttcaggttaacatgttttaccccagtccttcatttggacgttctaatatgcgcaattttgttacatgtacagtgatgacttgcttctagaagaagatagtgcagatgagagttctcttgctaatgcattcagcagaggtatgcaacttggttcaacagatgcctccagttattccagaaggttcaacagtaatgcctcgacctcatcctcaaatccgactacccaaaggtaaccgagaacacgtcttagggaaactattctgaatctacttttcttttgatgttggttcctactttggtgatatttagatcttacatcttccatggatatattaacttatgatgaaaaactgtctagtacttgagtatcagaactgtgttaaatttggcccagggttcctgactagaatattggaacgcagaaaggcccatatttgatgttgatacctcctgtatatgtgatattagctatgtgcatatagttctcttcataggacttatattctattagaaggttgccctgtactacaggtagtcccttgacaagatcaatatatgtgtgaactattgtacaaaactagttcttggtggatgtgtatttgaagcaattaggaagagtctaaacaccattttatattttatgatccagtagataggcagctgaacgtgtgacattccagacaccaatttatattttatcgttactttttctctcttgatgtaactatgaatcaatatcaggagatatgctcccaatcaagccttttcacaagtagagactggcagccctccaagtaatgatcctcatgccagatttggccaacatataccaggatcacaatatattcctcatgtctcccagaactctccaagtcgcttagggcagcaacctcctcaacggtataatcatgggagaccaaatgctggaagaactatggatcggaatcacatgaacgctcagcttcctccttccaatacaaattctgggggtcaacaacgttcacccagaagtagctcatatacaaatggtgtcccttggggtattttctttcactcatcttagctttctctagaactttttttcttgtttacggcctctagttggtcttagactggaaatgaatatatatgtttcatcttgtaggtcgtaggactaacaatcatgtcccgaatgttccatcgacgtcccatggaagggtagactacggaagtattgcttaattctgcagtctttcttctcatttattttgttctttcccttggtgtgcaatcttcttgttagaagtgtgggaacaaagttgtactgagacaagaaacaaacttagttcatggcttgtgggcttctgatcagaacgtgcttattcattgtgctttttgcacaaataaacaaaaaaaaaaagtatgttataattgatattgttatctttctggcatctatctctctgaatttctttttggtattctctgatgaatgtatcttttgggaaagttgttcaagtgtttaagcctagccttgaaaaaagatccttaatttccgtaaatttcagtttattagcagactgatattggtgtcgtttcttgttttatctcttgaatttctctaacaccttagtgaattatatctggtagagtttggaacagaaacagaatgtgtagaagcgaaaggatgggatgttggttttaggacaattgaagggtcctgcagccgctatgtttcaaccagtcaagcccgtagacgcttagagatcatgtgtacagattctctttagtttgacaattcagatttaccaaaatcaaaattcatcaaactagacattacacaaaatcaataacttataacaacacatgtttaacctgtttttgagtctcttccacattaccatcacaccaattctcagccacaaaaccacaacggaacagagacagacagagtgagagaggaatcagatgaattggatgttgcactttgatgaagctatatcaagagtcataagttcggtgcgcaagtgctcactatcgttgtcttcttcaacaccaattttcacagtttcaagatatttcaattttctcaagaaatgctccatttgtttcacctctctaagacttcctccatagcctgaaatttctagcactttgactcgacatgtcgataaacaacaccttccttccacctcagaagtaggactgtcgtcttcataacgtttgtataagtaccttttcttaggcttgctagtgcaagcgcatgcgtttccacatctataagtaactttgtgcagaagaccctgaaagcatagcaaatgattttgacatgtataaacgtgcaaaaaacattgtgtgcactaatttgccaaaagcttcaatatacctttatagctaaagtttgtagatttggagatttcaaaagcagacgaggcaatgcctgccaaccgttttccttgtcactctcaatagatagatgaatgagtttgtcgaagaccggcatggtataacagcggtagtaaaacgcctgatttatagtcaaagtcagaaaccagatatagatagaaatgagacaatggtaactagcaagaataagagacctcaagagaactggacgagaggtgaagggtcttgacatttcttatcgcagaaaccagatttgtaacctcaccaaaatcaaaagtgttagttaactcccacaatctaagatccagtctagcttcggcaagcgaatcaagataatcaacatcagaaccatcggagcgaagagcagaatagtcaagaaactcaagattcggtgtcttgatctcaacatcgtcttcataaggatatgtgttatgaggaaagtggaaaacaatcgtgagtcgcttgatggatgcactaaccacagacctcgtccaagttggctggtcatcaccactaccaacatcaagtatgaataattcctcgagcacagggcatccagagatgagccagttatacagagctggcttagcaacaacagcaccgagggaaagtgtcttgagcgcagggaaaaacactctgccctcaggtggaacattgcctcgaagaaaagttcgataactagataatgtgagtttaaccaatgtattattgcggaagaaaatccctatatccagataatgatcatattgggactgcaagttaagttccaagcagccgcgtttgagggcactgcgaatccaacggttaacactagatttttcatagtgggaattgagagtgagtctcttgatgggacaattgcttaacagagccactgtatctttcatgaaatcagagaagctatcagcatttctgataggtgttgagtcttccaaatcaaagctgtctacaaaatggaacagattcctccacctcttggacagaacagatgtggatacaacgagttttgtcggaagtaaagataagatttttttgccaagaacctcatcaggcaaactgctgatgaaatctctagagcccataaagactttattcgcctgcaaatcaaacaacgttatgaactttcttaagcacacactatatatgaaaagaaatgaacaaaaatgtaatttttccgatacagttgattctaaatagcctaaatttgattacccatgtagaaaaatctatgagcagatgtgcttaatgaatctatagctaaaacggaaagggggcaattaggttcaattgataactctacattgattctgtgagtcaagaacgaaaaaacctttgaaaatgaaagcagacgatggatgtgaaagcaggattcgtcgtctaacaggaagttccaagcatcaccacttcaccacgaacaagaagaagagaaagagatgctccttttttttttttttctttacaaagacaaacgtttgggtttaccaatgcttaatcctttccttagttattaaaaaaaaagagaaaaaaatactagggcctgattgacaagagtctttacaaagcaaaaaaaaatctaaagctttgaaatatatccaatcaatcaatttgttacccacaaggccacaaccaacatactttcttaattattattattttggctgtaaaaagcagttttttctgtctaaaacacacaatttaattatttaaagctttccaaaattttaaattctacaactacaatcacagctaaaacatttacggtctaaaatctaaagccaaagtccgaaccaatcagatccgagatctagactttggggacttggggtattccgtatttgattcggtgttggttcgactccgaatattttggatagaaacatttaggattaattcggttattttacagtttaattcagacttggtttggttttagttatttttaataaatttggttaaattttgactaaaataactaaaaacttaggaatattttaaatattttgagtatttcttattttgatataaataattgatatttttagattattcaaaattttgggtaattaggttatttaagatctaaatgtaattaataatttgggtatataattatattttaaatatttatttggttctttggatatttaggatccattcaaatatttaattaattttggattcaattcagtttttttcttctatttggttctctattccggtttgtttgtttacccctactaaatacttaacaaaatataataaaacctctataaattaataaatattattaaataataaaatttacatgtcccaaattggacaaatataaaaaattgacaaaattcgtttagagaataagataatctctatttaaatatacattcccattaaaacaattaaaaatgttacatttgtttatcataatgttttgtttaatatatctacgtaattctatttataactgttaagaaattaaaaattgcgtctactcattacaactcttcctttaatatttttttttacttatatcgcatattttcaccatcatattttcaccaatcttgatttttcattaacaaggtaaaccagactcactgggtatatattacttgggaccctctcggctaaaccgggttcaaaatttaaaatatacagtcagaaagtttgttacaggggtatatacgtcattttcaacatttgaaattttcaaattcgctgtgtctccctcgcaggtatatatcacagctacacgattgagagcaaaaaccaaattctcaaacaatttttcacttaacaaattagcaactagtgagatactgagtgagaagagatagagagagagagagaatgaatacgagatctggtgatgccgaaggagatattagagggaagatgatagctccggtgagagacggaaatggtggacagaagagaaaattggtacagagcaacgatattcagagagacgaagatggtggagcaaagagaagaatcattcagagcagcgaccagaagaacgggaagatcctgagaggaatccatggctgtgtatctcctcggtgctctgctccgacttaccagtctcgcttctcctggtattttcttctcctctatgaactacatagatctgttctcagatatttttggtgtgcgagtttgggctgagctcgaatttgatttgtacggcatgtattggatggatctaggaaatagagttcgatcaatcatctttgataccttctggaatcaatttgatttgtatgagaattagatgcttatatcgatccctgttcgtgacctgtgtggttgctgaaacctgggatttgagttttgaaaattcaatttcgaatcagatttcttagatctaattttctctgacaaatcaggtatgagcaagatatatggacatacataacaaggtttttggatggtaaatcattggtgaagctgggagcaacgaacaaatggttctataagattgcaatggaggatactgtttggaggtttgcatgcttgcgtgatcttcaggtccctgagacgtttccagtttcttccacctggattaagatttatgcttcagcttttggtaagtttcacatgacttatgatacattctgaaacaatggtaaactcaaaacacgatatggaaaaatgcagatgggagtcactcttacttgttccaccagaaggagaagcatattggttagtccatgaattggattcatcatactctcttagtctcatgttaaatatagatgttgtacagatctttatatggttttgacactgtgattatagattggatgcgtcttggtgcctttgttcttgactctcgaacttcattcctgactgagagtttgagtggtcgtctgaaagtcccaacagaaggaactatagaacaaatgttacaatccagtggttcatgtcttatcaacgacatcaaaagcggtatttggattgcaggtacgaaaattttcttatacatcatcatcttcagaaactttgtcagctgcaggaagaaactgtaacgtggcttatctcatttttcagatttacagcttttgcgttgccctctttgtgacctcagtacctgtgatggtaaaagacactatctgttgctgagactttaggattcatgctagtctattagtctctgcaataactaaattgcaactaagagtgtttctgttttactaatgtaggaacaatgcaaactcttgatgttaggcacattgaactcttccttagtgaaggctacaaagatggaagctgggattataatctgattggatctcataagttggagaaagacgcaagtgcagcctgtggagccatatttgacctcaaacaccttaaaaaatcttcatcctcaggtaacttcattacttacttttatgttcctttactcctctttgaatcatactcctttgtctctcatacatttccacatgaaatctgtctaggtattctcaacctcaagtcttggaccggagaggcagatgattcccaacctaaagcagttattgcaccccatgcagttgctgttcacacaagattgcaacaaaacgaaggtatataactttacatcatcaaccatatctttatctagaaaaaaggaagagaaaacactttttttttgttcttacatatttgaattgcaggaatccttgtgaagtaccacacaatgaaagcaggaacagacggtgacattgtttccatcagaatctcccagcagcttctctgattctttcacagtgcattgtctcatagtcagtatttctggtatacaaatccttctcctcttcagtaaaataaagataaacataagctttactgttctatgactttttccattgtctataagtatgtaaattccaattcccttagtgccttaccacaatatgactttctcaaaacaattccctcttcttctctatttcttcttcttcttctactttcctctcctaaatgcctcaaaaccaaaacgttgctacagttcttcatgtggaggaaacaaccttgacgttagcttccctttctggctatctcctgagcaatcttcgtcatgtgactacccaggattcaacctccattgtgagacagccttaaagcttccaaattccagacgatttctcgtccaagacataaagtcgcagcgtattcaccttagagaccccgataactgcttagccagacggcttctcagcttcgacgcttcaatgtctcctttttctcctcttcaccttgtcaactacactttcttgagctgtcataacgaaaacgtcaaatcctcttctttggaacccatccattgccttactaattccacaccttcagatctcaccggttcaatgccgtcctcttgtcaaaccttgaagacactacttcttccggtctcttcaccactcgcaggtgatctcaacaaacaagacctctggctgaaatgggactcaccggattgcacaggttgtgttgattttagtccgttatgtagcttcataaacaataccatcctcaaagtcaaatgcttcacatacgttgattctggtaaccctctcgtcctataagttctcacatatacaccccaacttgaaatcaaaatcttggcttcatcaagaacatatcaaagaacaatttttcttaaaaatgttagacttttttctatctttcaggaaacccttggttaataacgttaaagatattatgcttatgcctatccgtaccattcttcatagtgataactcctgccgtctgtatcatttttatcccaatccaacaacaagccaagagtgtcccttggcgaaatgacactctctgtcccatttgtttatcagaatacacaagtgaagagaccgttaagtgcttacccgaatgtgaacattgcttccacaccgaatgcatcgacccgtggctcaagttgcataactcttgtccggtttgtcggaattcgccttcatctttgccaaataaagctgccacgacgaacgttgtctagatttgattcgagccactattgattgtttatcgtaatttcaatgttgcgcattacgcaatttcagacgaacatttcccaagctttactaataaatggatagatgtgaatttgtctccgatattagctagtagtcgtctcagtccaacctttgaagttcgtgaaacacacgcacgcgtttctaagcgagtgagcgtagtacattgtatagctttagtcttaaacgttattggacttcaaacattattgggcttctaacaaaattcgctagaccacgacaacattttcataaactttggttagaaaatcgtacataaaatatgggagtcgaatttaacatcatcaaaatgattctgttataacgactactaacttacgggttcaattgcaccaataatttaatgacggagtattttagaaccataaataactaatgagatattgtttttccctgtaccaataactagattctgacccgtacatacgtgcgggatttcttattttaggaaatatattggaatacattttgagtgaaagatattgtaatatataaactagattttaacccgcggtataccgcgagacgatttatttttttaaagtaatatatattaaaatttgcaaattttatttttaaaaaatatttatattttaaagtttataattgttattaaaaaaaaaaagaaactactgtgtgtaaaaaaccttttctctctcttccttctgggcgattctacagcgatcctccaccgacttccaccgcctcaattttctggtgatctctttgtcgtcctagtgcggatcttactctccggtgtctctgccggtccgttcgtgttgttctctttgactgttgttgtcttctctgaatccatggataaagaattatggcaagcgcttcaaaatttagatctaggatctgagagagctcctctgaagatgtcagctgaagcgaggcgctcgcgtgatatagataatcgtctcagcctaattgtcaaaggtctaaaccctcaacatcagaaaccagcaggacttaaaggtgctttgcctaaagcttggagattggatggaagggttacaagtagaattaatgatgacggtactgttcaattcttctttaaggctgaacaccatctcatgtctgtcctagaaaatggcccttggcaccataatttttggatggtggctgttgatcgatggaccaatcgtaccttgtcaaattttctctctcaaatctccttttgggttaaaattctgcatattcctcaagattttaggatagacccagttattagagagacagcaggggttctggggcatattgatgaaaccaaaattatagaagccactgcggatgctgaaggtgaagtctaggctcatgttacaatgaacatctccgatcgtttaatctttgtacgatctgttgaattcgaacctgccacagccccattcatggttaggtttgttttcgctaaactgaagaaattctgctttagatgtgggtcattgctgcatgatgaattagcttgtaaccatcaaagcactgtgctccagttgaacgttgaagcaactagacaagctatagaaccgatgcaaggcattaatcaaggggatgacgaacctatgcaggaaggttctagttcctcaacacatgttgttggccctattcctttagttgtcagagaaactggtgaagcatctgagactcttacaattcgcaccagagcaactaatttattgactgctggtaatgatgaatctatgcaaaaaggagaagagaatcccattcaaacccagccaacacttcactcagaagaaatgggaccgacacaactgcaacctcaagaagagcttgatgctcttagaaacacagcagatagtagtcgcaaaatgaaaggggataacctttttgatgaagatcaagctgcaacaagtcgccaaaggacgcaagatccaatacttactcaaggggaggtggcaacccctaaaccaccatcgccaagatgaagatattacactggaattgtcagggacttaagaggaaccctctgacaattccatatttaaaagacatcaggcagtcttctaaacctgatgtattgttcctcatagaaactaagaacggtcaagaatatgtacaaagtctatgtaatgatcttggatatgcccaccattttgttgtgaatccggaagggcttagcggtggtatggcagttttttggaatgatgaggttaagctggattttctatcatcacctactctccattatactgatatgtatatatcggaatccggttcacctacttttcgtcttacttatatctatggtaatccagaatataaagagcgaaatgccttgtggaagaaaatgattttttgggtagaagcaggactctatcaaagtaaaccacgtctggttcttggtgactttaatgacatcaaaactaatgaagaaaaatcaggcggcccttctcgatctgaggcttctttcaagacttttcgacaaatgcttaattcctcaggtcttcatgacatcaagacgataggaggaaaatttacgtggacgggccatcgatctcattatcacatcaaatcaaaaattgaccgagcagtggctacttcagattggcaagatctctttccaagagcatatgttcagttgatgtcatggggtggctctgatcatcggccccttttgttggatacaggaaacagaaaatggagaggatataaattgttccgttatgataatagatggagatttgattctgctgtaaagcaagaaattcacaaagtctgaactacacaatgtcaagacattcagagcacaaactttcatcttgcgctcaagaaatgtcgtgttagtctgtcccgatggaagtcgaagcacattaccaactcccagaagaaaattcaagagcttaagagtaagttgcataaggcttatgagactcttccaataaactatgctcatatcaatgatctcaaaaatcagttggttaaggaatatcggctggaagaggaatattggggaactaagagtagagttcaatggcttcaagctggagataaaaatacacggtacttccatgcgaaaacaaaacagaggaggaattttaatcgtctcacttcccttgtagatgagcagggtaacgtttgtactaaagaggatgaaattcacaacctggtggagacttacttcagcacccttttcacttcgcatggcagcaacaacatggaagaggtattgacgtctattcagcctagagttacagaggaaatgaacaaccatttgaccaagccggttacagaagaggagctctctcaggccctatgcagtatgaatagaaataaatcacctggtccagatggtcttggagctggattctataaagatcattgggcggtcttaagcaaaggtgtgtttcagtttgtccaaaacttttttaatacgggtaccttagacccaaaactcaatcacactcatatttgtttaatcccaaaggtcgagaatccattagaagtcaaagattacagacctattagcttgtgtaatgttgcctataagcttatctctaaaatcttggctgatagactcaaaccttggctccaatttatcatctcagaaaaccaaactgccttcattccgggtcgcacgatcactgataatgttcttatagcgcatgagctgatacattccttacagactcggaatcttaaacagccatatatggctttcaaattagatattagtaaggcctttgataaagttgaatggtcttttcttgaagcagttatgaagaagcttggttttgctgaaagatggtgtgcgtggattatggaatgtatcaccactgtcacttactcagtccttgtcaatggttctccaattggcagcatcctcccacagagaggtattagacaagatgatcccatctcttcgtacttgtatttattatgttctgaaggactctcagccttaatccgtcataatattcatcaaagtaaactgcatggatttaaggcaagcagaaacggccctcctatatctcacttgctattcgctgatgattccctcctgttctgtaaggccacagtggaagaatgttctgccctcctgcaagttcttaaccaataccatgcagcatcaggtcagcaagttaatttccaaaagtctgccgttacttttggcaagggcctcaactgtcaacaaaaacatgatcttactaatattatgggagtcactaaaattagtggttttggacgataccttggtttacctgaatttgttggcaggagtaaatataatgcttttttttaccttcaccagagagtttcacagaagctccaaagttggtattctcattttctctctcctgcagggaaagaagtcctcatcaaagctgttgccactgctctcccatcttactttatgtcatgtttcatgttgcctatcaaacttatcaaggaaatcacctcagtcattcgcaagttttggtgggccagcacacaacatcataataaaatttcctgggtagcttggagcaaaatcaatgacacaaagaagatgggtggacttggcgtcagagacttaaaggactttaaccttgctatgattgccaaacaaagctggaggcttctccaacaacctcactcactactagcaaggctttacaaagctaaatattatccccactcaagtttgttggaagctggtgtcaagtggcaatctagccatgcttggagaagcataatgcaaggtaatacacttctagctgatggactaaaatgggtagttggtaatgggcagagaataaatatatggcaagataaatggcttccatcgaacccaccgcgtgcccctaaatgccaggaaaatgttcgtacctcactaaaactggttaaggatcttttaataccatgtaccactcggtggaatgaggagttgatagataaggtaatagctttggaagacagaaatctaataaaggttattagaccatctttagtggaggtcagtgatagtatatcttggatttattcaaaagatggtagctactctgtcaaatctggctattatgcagttcgtagaagaggaattgagcaagacgctactgtgaacagccaacacactcattttccttttaagtacatttggaatgtggacgtccctccaaaagttaagcatttttggtggcactccttgcataatggcttgcctgttgcagataatttgaagaaacggggcctacgggtagatgccatctatcagctgtgtggcgaagaagatgaaacagtaaatcaccttttgtttcaatgcaagctcacaaaggaaatctgggacctcactcctatttcaactccttcaggtgaatttcttaatgcccacaatctagctgataatttgcaggacctaatcatgattaatagaaaccatgccaatgagctgaaacttttattcctccttgggtgacgaatttggaagatgaggaatgctctcattttttagaacaaaagaatggttgttcctgatgtcattagtcaagcgcttgttgatttatctgtgtggaatgaggcatgcaaattaaatcagaataagccatgtagtcaatcgcataatgtgaagctgccaacgaaggaaatatgtactatggaagaggcaattcacagctctgacgcctattgttgttttgtagatggctcctggctttcacctacgcaacaagccggcattggttgggaactctataacaaggacgctgccctccttcttcgaggcttctgctgctatctcccctatggtctcttctcttgagactgaagcagaagcagttagaatggcggtgctccaagtcagaaacctgggatattcacatgttacttttgcaggtgacaacatggatctttacaaagcattagagatgaacgaagctgcacatcccttacaaagatgggaacatactacagtctcttcgtatatcagagacatcctgcagataaataacgctcgacatgattttagctttataaagatcttagaaacgcgaaccatgtagcagattctctagcgagaagtgcaagaacgaaccaatctggttatgtaatatcttggaacaatgtaccttgactttattaatgaaaaggttaagttgacgaccaaaaaaaaaaaaaaaaatgttattaagtaacggtataccacgaatccatgagacaattgttaaaaaactaaagttgtaatccctattaaaacaacatattaataatattttaaaattttataaatattgattcaaatacatctaccatgtaacccaattccaaaataaaacctgttctataatttatttacccgtcctgtgatttttttttaaaattagtaatttttaaaatttaagaattcttttttatatataaaatttttgcaaattgtatcattctctaatacatttatattttataatttaattttatatatagtaacattatacataccacataacattttttgttttatataatcttttctaaattaggatgatttgatatgtttaatattagtggtcttaaaaaataataaattaaagatttaacccgtattgaaacggtggattaattatattttattttttattaatgttgattcaaaaacccgtcactccaaatctgtcttgccaaaaagccatttattttattaatattaattttactaatgatatgactctgaattataatttaaatattttagctgataacataggagtacaccatatttatttaataggggaatgtaccatatgacccaaatgcacttttacccaaatccaccaaaatagtcttgcaaaaatactatagagataagaaacgatagtcggttttgataggtataagattagcaaatatattagttagcttaaattaattaaagaatacaaatcgaaaaggaatattacactttattcgaatatagtatcaaaacttatataacacagagatttgataattttttaattgtgaatacttttttttgtgttaatttttatgtgattaagatttaattgattttgtatataaaatattaaattgttttacgaacttatttgtttataatttggtaacagatagatatttgagtattcagtatattttgcttcagtttaggaaatctttgatgacccgtcttaagatccaataagccctataatctagatattaacctgtagtataccgcacgtaggcttatattttagttaaactaaaaacttttattgtaaagatgatttaaaaatatatgatattattttatttgattttaaatgtatagtaaactgtgagttgtatatgttttgttgatattatctatattatttagtgtttaagattatacacttgtagtttgattgttaatttaagagtttcacctgtagtataccatcttgtattaatatcgatctaaacccgtcaattataggattttccagcttgtattaaaaattgaatcacatcattgacataaaaaaatctaatatgttattaattattatagtatataagattataaattttcaatagaatatgtatgaaattaaatataaatatttcaaattatgactcagtaaaaatttttcttaaatctatttatcaccggttataatattttttcatgtattgaacagtttatattcgtttttaaaaattctaattatggcatatgcgaaaaaactctaattatttttttataatgatgatattattttttcgcaaaaatagaatcatataaagatgagaagtgaattataataattaataaaaaattaatatgataatgtagatatcaaatctaatttgttgattttagttggttacttttttggaaattaataatgtatttcatttttctaattaaatcaaattaattaaaatttagatatcaaatcttatatgttgattttgattggttattatttttgaaaattaataatgtatttcgtttttaaattaaatttaattatttaaattagtatttgactttttaatccttaaagagataaattaatttactctttaaaattttatttctaatggcatacttatgtaattacttacaaaaattaaggttatatttaaaatgtacttcccaaataatatagtaggattataatatgcatagaaaagtgtatagtgttatttatgatacaatagctaaattttttattaatttatattatttatatttcatttgtattttgcatagtaaatcgaatgttagatttgtttcgaattgcggaataatatagagatatttggaaaatctgtgtatttttgttactttgatgtatatacaaattaagaggggggtattgaaggaaggaatatgacagaatttaatagaaagttaaatctagtgttattcaattagagattttataaattcttttaaattctattgttattgaagatgctaattttttaattctactaaattcaagtgttattcaatattatctaattttgtgtggcaacattatttaacaagaatttaatagaaacgttaatgcaaaatgtgaagaaacttttctgagcttttgaggtgagatttggacagatatgttattcaacatatcgtatcttgtgaaacgagttgaggaaccttgactatgtcatctcttgaatctttatctctctcacaatctccaggttcctcttgcgagagatattgagagatccaaaaaagaagcaatgttcccttgtctgagattgagagagagatccaaaacaagagaaatttgagattgtctcctctagaattgcgacgaccatgtatagtcgcgattcacgacggccgcggcggtaggagtgaggctcttctggggtcaaaatcaaatgcatgggttacagctttgcaagttgggcattgacagtagaatctcttatgttaatgatccaaaacaattattgttttcacctgtttatccaatttcattatcactgcaacaaattttaatctggattttgtccttacttcaaggatattatttggttatttgacgaacatgaaatccataggtgaaagaaaccaaacatactttgtgttgggtaatagcaggttttgtggtgttgaatggttgattgattgtaggaggtcctgaaagtggaaaatacataactaaagacgagtactatcttcgcctctgtttgtttgacttcgtggaaagagcaaattctttttattaattctaagaaaattatattctattcgattctattaaaatgttgcaaaatatatcctatagaataataaagaaaatttcaaaatctttacacaatctttaaaaatctaactttttctttataattctattcaatcaaattctattaaattcgttgtttcaatacccctcctaattgtttttgtttgaaatttgatcaattagatgatataatgtgaaatttacttcgcggtacaccgttggtcgatttttttgtaactaaaaattcgaatttttaagttatagttgttttgtaaatattgttttttttagtatttaagattgtataattgtgttaaaattgttaattctaagattttactcgtagattatcgtcccgtatgaatatcaatcaaaactcgttccaccagataatttcattccgtaaaataaatattatttttattattttaaaatattcttattgtaatatattaaaaattgagggattgtagatcttggattaatatatttaaaaataatttgtgatttataaatttatgatattgtagtatataaaaaaattagtgtatacctttcaataattgtataaagtatattttaaaagtcaaaatttgtataaatggatattgcaacttcatgaaatcgtagtgatttacctgtaggatatcacaggctaatttttattttatttttatataaacagataaattagttgattttagttaaaaataaaaaataaattaagttatatttgttttgtttgttgtttcagattgtataaatatattttgattgttaattccatgattttatatgtagtataattagggatgtcaaaatgggtaactcaactcaactcaactcataatcaaatgagtttaaggttaaatgagttatgggttgacccaactcattttgttaaatgggttggatcaacccataactcatttaatttgatgggttgagttgttaaatgagttaacccatttaagtaataatttaattaattattattataaaacaataataaataattatcattattagttcattatcatcaaacttaggatatttacggattccactttttacggatttacgtttttgacgagaaaatcaccggtttacgtttttggcggaaaattataggtttacgtttttggcgggaaaattacggatttaagtttttggcgggaaaattacgggtttacatttttggcggaaaaatctcgggtttacgtttttggcgggaaaatcacggatttacgtttttagcgggaaaatcacgggttttcgtttttggcaggaaaatcacgggttttcgttttttggcggaaaaattacgagtttacgtttttggcgagaaaattacgggtttacgtttttggcgggaaaatcacgggtttatgtttttggcgggaaaatcatgggtttacgtttttggcgggaaaatcacgggatttacatttttggcgggaaaatctcggatttacgggtttacgtttttggcgggaaaattatggatttacgtttttggcgggaaaatctcggattttcgtttttggcgggaaaatctcgggtttacgtttttgacgagaaaatcacgggtttacgtttttggcggaaaaatcacggatttatgttttttggtggaaaacttacgagtttactttttctcaatttcatcgcttgtatatttaagaaatttggaaaaatattaattttattaaattggtttagatgtgttggttaaacttaaattggcattggtttagagattttagttggtttaattcaattttacaaaacttgatgggttaattgggtaaaccattgaaaccattaaccattacaacccaactcattttactcatcaaaccaattgactcatcaactcatttgacccatcaactcatttgagtcaaaattttcaactgaattgggttgagttgagttgagttgacccatgaattttgacccattttgacacccttaagtataatatagaccaacacccggctagtttcttgtaatgtagtgttgaccctgaaagaaaaatcgataagaatacgcataaatggatagtaaaattaggagataaacatcattagaacatgaagtaatttacttatgaatctctatctatttttttaaagaatcaatattctagattgattgtgaggcaaaatgtgaatgtatgcataacatttataagagatagattgtacgcaaaattagattttaatttggattcaattttagctttcctggaaaaaaactaatctgaattacatattttaaatttaggatgacgaaatttttttttttaaaagctaaaatttactataatctcaacgattttggtattttttaaattaaacttatccttatacattatcgcaaatatggtagtcattattgttcgaatacaattaatgatctgtcaaaaaaattatattattgtttgttccaaagaaaagtcattcatatttcaaagaaaaaaataagaatattggtgtgaatcaatatttctcattttgaatatttgcattaaaattttaaacattggtaattaaactttgttttactgtttaaaaaaaagaagaaataatcgaatctagaagaatgaatattccaaaagcttgtaactattataatacgtttaaaaatatatattctattatataattcaaatttagcttagtgacatatttttaaaataatgaaaattatctgttttaaaaaaaatactttaaaagtttatatcatttaaattctaattaaaagttacatattttaatctatattgaaacgattttctagataattacaaatctaaaatccaaaaattttcttttgaatttgctaaatcataatttgaaatcattttttatgtgtactaatcataaacaattaacatagttttgttaaaggaattgtataaaatctaaactaaatgataatttgttattaaattacattgaagtttccgaattatctaataacatattaccaaaataaataagtttagatatatacaattcaaattaaaatagcctgatatgttatgaaaacgtttttaaatgatttccgaaaatattgggtagtttttaatttattgatttaattcgaatttttttaaaaaacaaaatccaagaattatatttagttgtagtagttgttaatttactaaattacccatgcaaaaattcatttagttagttttaaaatactcttacaatgttgtagttcacacaatgcttcccaattgatagtatagatttaatgacggagtatatgcattttgcttggcaatgtatctctagttgtctagccacttgtcaaagattgacatatcgtcatatgggtacgaataagggtttcttcctcgtaattttaatactcgaactgattgtttagctaaaaaagctcgggctcgaaatagcttttttcccatgtaagcacatcaattcatgaatggctctctctagcggagagtctcctcccgatatctaaaataaaatggtgttcgggaaaaaaaaaagatattgtttttccaatccaaaagtagtgagtattaaacatccaaataaatacattgaaaatttttagattttttttggctttttatgagtaacatgatatccatacttacttgcattgtatgatagctttactaaaagcataaaatatttgaagcggatatatttttgccgagataaactctgttcgtgaacaagtgtgtggtgtgttttgtgacatacctgtcaaagaggagaagagaacataccagtcaaagaggagaagggaacatattaaacatgttctcctaaacaaacaaaccacaaatatcctcaatcactgacaatacataatgtttcatttttagaaaatttaaccttgaagcaaattaaagcatctgacaaaagcaaccaaggtttaaagtatacaacttcaaaagagattgacccttaaacatcaaaaagaaaaccaaatcttctttgttccatcctttattccaattacacaaaggtaattaaaaagaagaaaagaacgagaaagaaagagaccttagaccatctccaatgtatagctctatataagttttattttagaggaagttttccctccaatgtatctcccatatattataattttgcaatattctcataaaatatgatattatttaaaataaaaactaattatatattaaaaaaacattacaacatataacaataataaaatattacgaagtttattttatacaacaccattagagttttttttcccacatatgatcaattaaaaaaattcataatgagaaatgagcttctttctctttgatttttttaaatctaccaagaaactcttgaaaccggatattatcgtttcctgttatctcgactttgggaggtggagcttctctttcaacttgaattggtgcattgagatcacgctcatctttgataatcatattatgtaaaattctacttgtagtcattatgtcatgcaacacatgttttttccaaaaacgaaccggacatttgaaataacaaacgtgatcgaagaactctgaatgcacgctctacatcttttctacatgctatttgttttgtagcaaaatttttttttcttttgactcacaggctcgagaaaagtttgcactatagttgaccattttggataaataccgtcaatcaaataatatcacatattatattcttttccttgaatggtataatgaacatgaggagcaataccttaaacgagattggagaagaggtgggaagactccaacacattgatatcattattagtgtctggtaatccaaaatatacatgccatattcaaagatcataatccgccacagcttcaagaattatagtaggagatccactacgacctgtatattatctagcccaagcagtaggacaattcttctacttccaatgcatgcaatctaagctaccaagcattcttggaaaacctcgttttccaccaatgtaaaaaagcctagaaacatcattaggtgttggggaacgtaggtattggtctaaaaatatttccactacggctcgacaaaatattttcatgctctcgattgtcgttgattcgcctatctttacatactcacctgcggatttgtagagacgataatccaagcctacccattacatctcttctttgtgtgaagtagttgtcatgaccttcaacagcaccaataatacgaaagaagagagaacaagacatatgatatctcctatggaacaaaacatcattgtacgttggagtctccaaaaaataatcgttgaaaaatctataatgtgcgctttctcaatcacgatagatgaaagaacgtccgtccggggactgaaccaccatgcatcgcctggctttcttgttgatggaaggaaaattggattatcgaattgttattagcaatagcaagatgtattgcttcttcgtccttatcaggattatcgaatatttctaagtagtgaatatgtatttgagtatgataactactagttaaaactttagtggtatttataaatcatcttgtcatagattcattactccacacaattaaagttgtcaaatcacttatatttgtctttttctaatcaacaacttaattaaagggcgagttacaatttgccatactttctttgtcattcataacaaaaaagacacttttcgagattttcatttttttccactgttccacattcatcaatacaattttgctcctgcaaaagtcatctctctctctctctctctctctctcttccaattgttccacattctttttattatcattttagttacttaatataacgtattttgtctatttttaatataataaattaagatttagtttttcctacattttaagatccattgttgcttattttaagtaaataattatattatctattagagaatattacacgtagaggcactatttcaaaactttggacacaatagaacactttaaaaccattaatcactttaactcagtataattacccctttaccctgaaatcgttggtttaataaaacataacaaatttagccggttttctctaatccggttccggttgaaccacgtattatcagttactgtctgggttaaatcttcatttaccaacacgatcgtaaaaaaacgcttacccagtaaaaaccctaatttactgtatctccacatcgcgactgctcccaatccggcgactactccgaatccggcgactcctccgtcgctgtccatcaatccgccactcaggcgagtctatactcgctgaataaaaaccaaatactaatttcccccaaatctctgcaataatcgaatttgatttcgatttattgttctcgtaagccagattcattagcattccagttgattctcactgatcagaatactcaatggaaggtacaaatcgtttccaatcatcttattttggtccaattaactcagaagaagaaatcctcttctcgctgaatgtttctgcaattttttttttgaatcgaaaaatgtttcccaattgtttgtagctaagcacagacgtttgtggttttagtagtttgtacaaatactcgttaatctaatcgttatctcttgaactagtttcttgccaatgaacagggtcgacatctcaggaaccatcttctcagtgggatttaaaccttccaaatagactcttcgccaccgatcattatccgaggggaaggctgaacgtatactctagaccggatattctatcctttatcaagaaggtttttgatgggacagaggaattagattttatacttcagtcttgctttggtcctttattccatttgccagttagtagggttgcgactccgggtaaggtcattcatgccttgttatgtagacagttgcttactaagaaaaagtatgagttttggacagtttttggtggacacccaatgagattttcactactagaatttgcttccgtgactggcttaccttgtggggagtttcctgacgagtatgaccctgaagattctcctgtttatgatgatggcaagaagagctactggaatgagttaattggtccagacaagacggttacattaggggatatatctgccatgctaaccaagaaacgcagtaaactgtcttctgaccacaaactgaagctcgctttcctactcattgtagatggtgtcctcatagcatctaaccaaaccggtaggcctacatttaaatatgtagagatgttggcagatttagagaaattcctttcgtttccttggggtagagagtcgtttatgaagacggttgaagcgatgacacccgagaaacggattctcgctaagagcaccggtaaaagacagctcacaaacgatcctattcagaatttggtgaagcaattgcagcagatcacattccgtcttaaaggtttcccgcatgccctgcagctcttagcttttcgaaacatacctggaatggtggatttgctgaagtttgatgacacctccttgacaatccttcattggaagaatttaactcatccaacacaactaattactcttcctcagattcactctttagaaagcaaccttaaggtttttttctaacccaaaagtttttatatggtctctataatattctctttctatatatccagtcttctttactaataataacattctatttttcaacagagacctgtggatccgcttataggtgaagatattaatgttgaccaaagttgggcagagtgggatgacgaggtgaaagacaggaaagtttcttacatgaatggtttgatactgacagctcatcaattcaaaaaaagtgattggccaggaggtgatgctacattgccatcaattaaaattccaaaggagaagtcttctgttgttcacaaaaagcatattgtggatcgtaagaagagactacgggtgaagtctgaccctcccaaatccaagcatagttattcaactcgttttaatcaagttgtaaggctatctgatgatgagaagtctaggttgatcgttgatctacaaaacaaggtggaagagctatcaaatcgtgtaatgaagcttgaaaagaaaagaaaaactgtcaccttcaagcggtccagaaatttggctttcggttttgttccatcatcttctagatcaaagcgcaagaagtcattggaggtacctactcaatctcaagcctctgaggtaatcaagatttcaaacagtttataatatttgaaccttatcatttacttatacatttttcaagttttaacgcataacaaaacttttattttcctcatagaatccatctcattcacacacgctgtctgatgaacagaatgaggattttgatattgaggtctgctgttttaaccttatgtgtttattgtttattctgttaccacatctatatgtacttaatcaatttttatcaatcttgctagcatcaatctgagcaaaaggatgattcatgggatgtttctcctcctctttctcacccttctacgatagtccaagatgatgaattcaagaagtttcaagatgaatccattgatagaacaactttgacaaacacggttagtgtaatatttaatttccaatatctctttggtagaattgtttacgtcaaaatattttgtttcaggtgattactgatgaccccatggatgtcaatcatactccacatgaatcacaggattctgaaaaggatgatgcaacagaggacaatccaatttatgacactggtgccaaagatccaaatgacaatgaaccagatgatgagggaaaaatccaggtacttttataaatacaaacacaacacatcatacactttatttaacagtttataggatctgacacatttgactattctactttacaatcagtttgattcaagtgcaaacgtaagcaacaaaaaacaatcacctctcgaggaacacaatattatggaggtaagttaatacatcatttggtgcaacacatcggaaatggttggtgcatcacagaccgtaaacataataattgcacatctgcttagttattatggacaggattttgtggatacttacgagtgtacttcaacattcaggtcaatttggaggcgggtgaagcatctcaatcagtggtggagccgcaacccgatgaccctatggaggtatacattttcaactagttccttgatttattggacaccggtgagggatgcttcatcactcagtccttgtccaaaaaaatatttacaggccaattctccagactgtaattctccacagggcaatgcagcatctcagtgcattctaaaagatccaaatggccatgaagcagatgatgaggggaaaatccaggtacaaaaatacaaacacaacacatcaaacaatttattttacaggttatagattctcacaaaattgactattgtactttacaatcagtttgattcaagtgcaaacctaagccaaaaagaacaatctcctctcgagcaagacaatattatggaggtaagcttatatataaaccaaattattgtcagaactttattaaaccaaattattgtcatagcccttaagacatatctgtttgtaattcataattcaggaaaccttggagacggttgaagcttctcattcagtgttggagacgcaacccgaagaaaacattgacgatgatcatatgacggaggtaagctaatacataatttgatttaacacattggatttagtccttaatataaataatgactcttgtgcatagttattgtggacatgattttgtggatacttactagtgtacttcaacattcaggttactttggagtcagctgcaacatctcactcagtggaactaccgcaacccgatgaccctatggaggtatacatttttaactagttccttgctttatttgacactggagagggatgcttcttctatcagatcttttccaaaacaacatttataagccaattctcaacagggcaatgcagcatctcattcattgatagagactcaaccagaagtcaacatcgacggtgattctatgaaggtatactgtaacaatcatcatcaagttttatgtgttgtggttcttgtgtaattggacatgattttctagttacttcataaaatgtaggcaaaatttcttttatttattctaactagctacatgtctacatcaacattcaggttactttggagatgcctgcatcatcgcattcagtgtcggaggctcaacccgaagaaaagattggcaatgatcctatggaggtatacatttctaactagtttcaactaatgatttacattcattgatttattggagattgtagaggtttgatgcatctctcaggcattatgcaacaaacatttatagaaaaatgctccccatgttcactattataatcgacaggattttgtgtataccttaacatttgcagataatattatcttatgtttttctcaccatctttttgtgtactgcaactttcaggacaccatggagacgcctccagcagctcattcattgactgggtttgtaatgttctccaaaaagaaggtcatccttatgtctaaactaaattaggcttgcatgttcacttttatattggattggagtttgtgtattcgaaataatttccaggttatatattcttatgtttttctcaccatcaggtcaccatggagacggctgcagcaattcattcaggagtttgtaaagacaacactgatcctatcaaggtataacatgtatcataattttctggtatgttttaatggacagctctgtttggattgtttttaaaattatcttcttattccaggcaatggttgtgtttgtgaagcctgtatttcatacaagttccaaagctgacaaagagccccaatcatctcccacacatagtcccaatattgtgggtacaaggaacgaggtattgcgtaacatatactgacttttgttaataatgactagggaatgatttttcagttttgtaacagcttgtccctattggtctgatattatatcttcctgtacaggataataactcagaacactctaactctactgcccgggaaccagatcaatattttgagttatctgattcatccccggcgcgtaacagagaaaaaccaaatctctcccaagctgaagcacgtctcgtagccgagttcacatctcaaccaatacttgagacacaagcacttttaccaacactaaaaaaagcggagattcacagtttgtcaaaaccctctcgagctctccaaatatgtatggttatcattcatttttcttatttccacaacattcatcatcaagttcatcactaatgctgtttttttacctcatagtgaacatctaaccaagtgtggattccttatttccaacaaattcttcgtcgaacttgccaaacctcagcaatgggtttcaaccctggtatgtagtccactatatttaccttagtacaaattaacctgttaacaagagatactaatgtgtaaatgttttttttcctagcacatggaggttttggtgtcattactttctcggaggctcagaactacacttgagaatcatcgttctgcttttgttgatccatggttcacaagccatctacaagctaaattcagagccttcaacgctgcgaaggtgaaatcacgtgttcgttggtcagaggacatgcaacgcttcatcaaaggatccaaaactgaatggttcaaggacataaatacaatttacgcacccatgatatggaatgattgccactgggttggtctttcaatcaatcttggcatatggagcgttgaaattcttgacctaaatacagacctctacgacgacgctaaggtaaaaagatgcattgagccagtagtcaatcttttgccccacctcatccaaaggtactgtacgccagagttttctgagaatcacggtcttcaaccgtttggctggagtcgaattgatggtatctacaagaatttgcggagtggtgactgtggcccggttgccatgaagttcctcgagatccaggcaagtgataaactcccagataaaatggctgaaattactgacaaacacgtcgacgcgtttaggcgtcaatatgccatggacatatataaacaatgtgtctgcccactctattcatctaatgtttttgactagttatcgaatgccaccctacaaatctgttgtaatataaacgttgattccgccttctttgaatgcttataactctggatgatataaatatgttttttgtttttcttaaccatatcgataatcttatctctatattgctgttgaatgttttagtggtttgtatcatattatttgtttgttccatccataacaacatttttttcaagtgcatctaacatttgatatcagttaacaatgcgaagaaaaataaataattttgcgtattttgaactattgtttatttggtaaatcattctagctaattatgtttacaaatacgttaaaacttaatataaatgtcatccagtgataatgaattatccaatcagataaacgaattaatacagttatattgtggatggattcttatggatacattatcaattatctttctcttttaccatgaaagacaaatctaaaattccttctaccggaaatattgagatattgttgtatagcgggaatattcccaccatcaggttttaaactaggatttttatggttcgagcataattcggggacattatggttagagcacaattatagttagatcattatctttttttttatttttatttttattttttattatcacgtttattatgagaagataattatggttagctctccagtgtttaagtttcttccattccccattcctacaaaataatcttatctctatattgttgttgaatgttttagtggtttgtatcatattatttgtttgttccatccataaccccatttattttcaagttcatctaacatttatatcagttaacaatgtgaagagaaataaataattttgagtattttgaactattgttgatttgtaaatcattcgagctaattatgtttacaaatacgttaaaaccagtcatagtgaattattcaatcagacaaacgaattaatacagttatgttgtggatggattaatatggatacattaacaattatctttctctttcaccatgaaagacaaatctaaaattccttctacgggaaatattgagatactgttgtataacgtgaatattcccacaatcaggtttaaaaatgggattattatggttcgagacaaatccggggacattatggttagagaacaattatagttagagcattatcccttttttttttagttttaattatcacgtttattatgataagataattatggttagctctcaagtgttgagcataattatatacagttactaaacactcacgatttgtaatgcgtaggtataaaacatataaatatttattgagtattggatgctaattaggttttccatttatactgcttatgttcaaccagggtcacgcaagaatgtctgagaaaaggtacaagtagatgaaaatcaaatatttctgttttctatccaagtatagttgaccatcagatcatatccaaacgtttgattcaaatagatctatttgtaagattagttcgatttacatgattcaatattgtaagattccccaatcagtaatatgttgaaaaattagtaattgtgagcaaattatttttcagatcatgtcagatttacaaagtgcatgtaaggttagaagtttgttgattctgaataaaaaatgtggacatttattgaatcggataatatagaatagagaatatcgactaatacatgtgatttcatattatatagcttagtttttaatattaaaaaactttttacaacttggtaatgaaatggatgtctctgaatatttacatgtagataggaaatgaatatttatatgtctatccacaagccccagaccaatcagatataaccaatcttaagtatttttggaattagtatagtcggaaaattttgctatgcatgctccaaaatcgaaagagtccctataagttatgataaacgagaaagatgttcactagtttaaacgttaaatacaagagagaaatacaacttcataataagattacattaataaactagataaaagagggaaacagaagagatagttatattctgaaagtgggtaactcatgtttttaaataaattaggaaagcaaaaggatgtctctgaagaggaagaagtagacgcaatgtgaacatctctcaccattatattcgttgtaaaattcatggatgacccaacagtctggataatcctcataatgaaagagctcagcgtaagatccgaatcgttttggttccaaatcagaaatgtggtcaattagtgtcttggccatgatatctacatctgtaaaacacttgttctctcgtttgaaagtattaaacgcgtctaatacttcattatctgcgcagcggtttagcgcaatgtaaagaagcttggctataggaatgacatctttacaatcattcaataatgaaatggcgcctttcatgtcgagagaacagaaccctagcctcaagctcaggagatacatagcgtaagggtttctttttgcaagacatttggagtagaatgagaagtgaacagagtcgggtgaagacatgttgatgaagtcagggcttttatctaaacgaactcgggatagtgtctcgacagagaaagctgcagatttcccttcatgaccagatttaatccagtttttcagagcctcaattccttcttctgaaacgtggctaacaattagtgcgagaattggttccggaatgtataatcttgcaatcttcctctgttgacaacgaagacgaaagtttatagaagttacatatactttgtggaatgaatgtaaactatattgtttaaaaaaatgaaaaatttaacctgtgtgtcgctagattgtgtgatagagtgtagacatttggatgatgtactcattttgtcaatttgttgcgaataacgaaagagtaagatgtgatggagagagaagttttagtactgatcaaaacggtttagaaatgagtaataaaaacagagtaattaattggatgtttctcttaataggtcacaatcgtgagggatgaagcttagtggggagtacgggttcagttaatattcactatatattaactctaaatataaaagctaccacttgaattccattaaaccaatttcatatacaaaaacgcaagtcatagttctgaaacaactcaaatcatttgtataataattgtgacaccttttagttgttgattattaagcttttgaaaaacggtttatagggatggcaaatgatttgagttagttcataattagctcgaatgatttacaaatcaacaacacagtttacaaacagaggtcaaaattaatatttttgtgtattttgaactattgttgatttgtaaatcttaatataaatgtcatccagtcatagtgaattattcaatcagacaaacgaattaatacagttatgttgtgaatggattcatatggatacattaacaattatctttctctttcaacatgaaagataaatctaaaattccttctaccggaaatattgagatactgttgtatagcgggaatattcccaccatcaggttttaaactaggatttttatggttcgagcataattcggggacattatggttagagcacaattatagttagatcattatccttttttattttatttttattttttattatcacgtttattatgagaagataattatggttagctctccagtgtttaagtttcttccattccccattcctacaaaataatcttatctctatattgctgttgaatgttttagtggtttgtatcatattatttgtttgttccatccataaccccatttattttcaagttcatctaacatttatatcagttaacaatgcgaagagaaataaataattttgagtattttgaactattgttgatttgtaaatcattcgagctaattatgtttacaaatacgttaaaaccagtcatagtgaattattcaatcagacaaacgaattaatacagttatgttgtggatgaattaatatggatatattaacaattatctttctctttcaccatgaaagacaaatctaaaattccttctacgggaaatattgagaaactgttgtatagcgggaatattcccacaatcaggtttaaaactgggattattatggttcgagacaaatccggggacattatggttagagcacaattatagttagatcattatccttttttttttagttttattttttttagttttaattataatcgtttattatagataattatccagtgttgagcataattatatacagttactaaacactcacgatttgtttaactttcttccattatccattccatccgtttcaacttgaaaacaaagaaattatgctcaagttagcaaaagacaacaagaatgaattaccatctggtgtcaaaaaggttgttcagcataaataaaactacttagttttctatgttttacattcattgtaaacaaaaacttatagtctgcatatgttttttttttttttatctcaggttgctgcttttcctgaaattttcatcccggcaccaatacttgctaaaattgttagctacgttgccgaagatggcgtggatgctttgaaacccttggttatggctggtccaacatttaaggctgcagtgtattccaaggaaacactgatttgtgtccgcatagacaaatctcgttatttcatgtggtggtccatgccgcattccatttattatcatttcttcacaaaatgtcttgaagccaacaatccacatgctttgaaagcaataatgtacaaaccaatagcatatgaaaattttgctgccaaatgctatagatctaccttatgggcggagctgtatggagagcatgaaggataggaatcaaagaaaggaacagatagtcccaaactttgaaagacaatgtggttcctttttcatttctgatgttctgctttttgttttcatttaatcctatgaaaagtcaaatcccataaaaatttgttcgttcagcataaatgatttccaattgataaccctttacgtttgttttggtcatatacgtttggtcacctcgttataataattttcaaacggacatttctctttggacttgttctcctggacagaacatatatttagcataacaattacagataaataactcgactataaaccactgcagacgaattatatatctaatattacaaccaccaccaaatcaatacgtaatattctcaaataaatatgtcatagagcataacgacaacggatcgttcaagtaagcatcccttggatgttaaaagttacatcttttcctcgcagacgaacttacaccgttttggcttcaatcagaggaacactttcacttgctataaatacctctcctattcttgactctatcaagacaacccaatcgcaaaagaaaaacaatatcctctgttttcgtttctataattctctgtttttcgttactcttcacttctccttttcacgatggttaaacatcaccacttgtacgagttgtctccgatggttactggttggacgatttgtgtcatggttttgaggatttacaaaaaatttctcaacccgaacgctttcgaactacgtcttgttttggccgatgaatgggtaaacaattttcctcaatttgttttgcaatttgcagaatttttcgttttccagtgtatccctcacccctaaaatattgttttcacagggcacccaaatagaagcaacaatcggtcctcgtttctctgccttctactttgacaggatcaaagagaatcaatggaaaacaataactacgtttctcgttcgacctaactgcgaagcaataaaaacaactcctcatcagtttcacattctattcatggatcacaccattgtcacttcttccacaccaagagaaacaggtttactgaacaagttcactccattcgactacattgtggatgatgttgttggcaacgataccttggttggtaagtaaattcttttttataaactccattcacttttttcaaaacattacttttttaatagatatctccaacatatctcttatagatgttatcggggcactcgttaatgttgggattctgactaataccgcaagtaacgagaatgatatggccggattcaaattgccgttcacgatcatggataaaaagtacatttcttaaaacctcaatttacagtttttttcaaacatatcatgtttatacattattatagtaagtatataaccacatatttttacatattttcagcaaggatacattggtatgtgaggcttatggagaaattgcagtggacttggagaaaagatttcgagcatttcgcaagaacaatgttgttattgctcttgcttggtggaagattattagattttatccaggttgtaactggtttaagattgttagccatgcacctatattaaccatgtatccagaacctgatgttgaggaagttgaagaaatcaaaatggttgtcgactaatagaaagatgattagaactatctcatcttcttctattttttttcaaagttgtaatatttttataaatgataagatatattaataaaaaaagttatttctttgttcaaaatttctcatttgtaataattgtaacaaatattttattaagtagtacaataggaatacggtgtataaattaagtgcaccttactaaggaacggttatatcaagattacaatctttttatcagaaattagcaaattgcttgagttttaaaaggaataaaattggtgatctgaaaatattgtttcccaacatatctaatttctcaacatatatttgtttacatgactgatagggtggattgttgaaacttttagttgaaatccataagaaattactatcgtggattgttgtttatggataggttaataaattactttcctgtcttttataccctaattataaacgatgtattctcttacttttttccgcatctgattttagttccctcctcaacattgagaaactgatttatagcgggacaatttaccacctattataaattgtttaatataaccgcagaaaaactttaaactactctttccttaataatctatataaacacccaacattcattaatgtttttcccattacccatttcttcagttaaaaccaaaaaacagagaaattatgcagaagtttacgaagataagcaacaatgaaacatcatctgcctcagatgtgaaaatggttgttcgtccaaacccaaagtacttagtattctacagttttaactactactttaataaaaatactaacaatctctttccttttttttccaacaggttgctgctatcccagaagtttacttgccggccccgctgcttgctaaaattgttagctacgttgcagaatctggtgttgattctttgaaatcctttgttaaggctggtccgttatttaaagcggctgtctattccaaggaaacactaagttgtgtccgccttgacagatcttggtattttatgtggtggtcaatgcctcattccatctattatcatttctttacaaaatgtcttgacgccaacaatccacatgctttaactgctgtattatacaaaggaatagcatacgagaatttggttgctgaatgctatagatctagtttatggatggaaccttatggagaggacggaggatgggtacaaatagatggagcttactgggctcaaccccgagttcgagagagtattccacgttgctcccgttgcaaatctcgggcacacaaaagatctaattgtccaaaatattgaaagacaatgttttaatactgtgttatccatcattatctgtctatctacatgtttctatttttctaaaacttgtttttctgtttttaagcttctgctagtctgtctttttaatgttatattctcgtttgctattcaatcttcgtttatatatttgctaaggcttatccatcttattttgtggttggtgtttcatgattacagtctatgtatttattacctgattgtttatggagaacttgttcccccataaatgagtccctgttcgattgcatgttaaaagacatccacgtctatattttatatatcataaagttgtgtctatttggacaacaaaatttggacacacaatgatttattttggacatgagaaaacttactcacatgtctaatttttaaaaaattttgtaggactcacgacgtcgccactaacccatctcaccaccacaccccaacctcttcaatgtgacaaagtattagggttcccattctatcacgatctcaaagttacaaaaattttcattaatagatcgctatttgtacacctttagtactatccgaatcgataatccaaaatgcccaaaatcgtctgcgaaaaaggcaaatgtatccaccctcaaccaatggcacctaccagacatttctggcgacccccaagtgcccttgcacctattaggggaaatcaatttgccgtccatcctcctcgtcaagctttggttcaattccacctacaggtaatgtttaactactaatctttgctatctgaacaatcacccgaatttaggtttaacatctggaattattttatatcagcctcctccgttctctgatttccacatgcctgaacacgtagctgctaaaatagtaagcttagtttcagaggacggtgttgatatgttaaaggcttggattcaatcaggaccagatggcaaagccgctgttttttccagggaaactctttcttctgttcgactagataagtcccctgtattcattcacatggctcatgaatcttctagttatcacatgttttacacaaaatgcctagccttaaaaaatccctatgcactatatctttagagtttagtgttggcgtttcatatgtgtgagctccaggaagcaattgctattttggatggtattaaagacgtgttcccacatgctggtctactttacatcatgctccatagttgcgctgaatcaatcccgtgggaattttatagtatgtacaagcgaaggtactacaaatttagtgaagtcgacttattcgcagataagctaatgttccatatcaacgaggttggtccacgtcgccaagggacatacaaaaattcctgggagtttgaggattacggtgagtgttggtcggaccatcagaacctcaatgagtatgagggacagtggtgtaacacatgtatttacttttacctctcccaagaagtagcccttatttcataagtacattttagttcagttcttctttttgttcttcatatttgcggcaaacttaagaatctatgattttttttatgggattttatatatgaagttattatgtgtgaagttaccttacgatattaaggtaagtagtacttctctactatttttcacaattataaagagaacaagtcctcgaccgttacctcgtctcaaacaatttatggaactgattttataactgcacccattctccccactaagctttatccctctcgaatatctatattttatagaaactttcatttcctttctccctttataacccgttctgcgcagtacaaacattagagattctccaaaccccgccgatccagattttcctcctcagtaatacatccatccaccttccgctgcaatcgttgttgtaccaaatcgtggacacactgcaaaacaggttttagttcgcaactaaacaaacaaatatgattcctttacttattcctaaaattaatcattcctctaacttatcatcggcccttttagcagaaaatgaagaattccaggttatatattccggaaccaatacttgctctaatcgttagctacgtttcggaacaaggaatagacgctttaaaaaattggattaaagctggtcatgttgggaaattagcagctttctctgacgaaacgctaacctgagtgcgtctagacaaaagcccacacttcatctacatgtcttcctataactctctttatttctctttctactccaaatgtctagaaaaaagcaacccctacgcattgtatctccatagcttgagtctcggattccgctgcttcgacctgtgtggagccatttcaattttgagtacctgtaaagatagatttcctttagccgaactactctacattgctctaaaccgttgcgcaggtatcgaactcattgatgatttcaatagtttcaatcgcgagaacaagtgtttctttgatgtatccttgatggcaaacaaacttatcggccacatttctgcttcggaacctaaatgtttcggatcttactccgagacctttctttacgaggaatatcctgactgctggctaatacatgagcttaacaatgaatttaacggagaaagatgttcacaatgcct

SEQ ID NO: 772 - DNA, 70475 bp, Arabidopsis thaliana
ctacttctacctcttccgagacatccttctgttttcctagtttagtgagatacacatcctgttccagctttattatgttttcatctttcacgtttatctttcgtttagtctaatgtgtttggttattcgtaatctctactaattctaatccgagtttaatcacacgtaattaagactccttgtaattattcacatgttagtaaaacccattttaccagtttctgatacaactccttctcttacatagtagacaaaagataatagaaaattggatagttctatctgtatacaattacgttgaatagagttttgtatcataaaatatattaataattggcgcaatcaagctttaatttgattcaaatcaacaaaaatacctttactcattacatatagtaatggctttacaaaaaataatctaaaaaaacaactacaattactaaaaatggattataactacttttcctgttaaaacatcatctccatatggataagagtttatggatagttaaacgggattgcacagatttgcggtttagcaagatatgctaattatagactattttaacacaataaataaacatatatacttatatttggtacatcaagaactaggtttacagaaacggaaaaacttttatgggaatgtcttacaataagaaatgaaatattttataaaaacatggaaactagttatagatcatacatttattaacaacttaaattcaaaaataaaatttctcattgtattagatcaacttgtcctattatgacccaatctaaaaaaaaacaactacacgtactcaaaatggattagaactactttacctgtttaaaaaacatctccatatggatatggctttatggataagcaaacggtattgcagaggattgcgatacaatcaggatataaaattagcaataactaattataagaactgaaatattttacaaaaaacatagcaactagttttacaataagaactgaaatattttacaaaaacatggcaactagttatagatcatacatttattaacaacttaaattcaaaaatacaatttctcattggattagatcaacttgtcctgttatgccccaatctaaaaaaaacaaatacaagtactcaaaatggattagaactactttacctgttaaaaaaacatatccatatggatacggctttatggataagcaaacggtattgcagatgtttgcgatacaatcagggtatgtttcagtaataactaattataagaactgaaatattttacacaaaagataatagaaaattggatagttctatctgtatacaattacgttgaatagagatttgtatcataaaatatattaataattggtgcaatcaagctttactttgaatcaaatcaacaaaaatacctttaatcattacatatagtaatgggtttacaaaaaataatctaaaaaaacaactacaattactaaaaatatattataactacttttcttgttaaaacatcatctccatatggataagagtttatggatagttaaacgggattgcacagatttgcggtttagcaagatatgctaattatagactattttaacacaataaataaacatatatacttatatttggtacatcaagaactaggtttacagaaacggaaaaacatttatgggaatatcttacaataagaaatgaaatattttacaaaaacatggaaactagttatagatcatacattaattaacaacttaaattcaaaaataaaatttctcattgtattagatcaacttgtcctgttatgacccaatctaaaaaaaacaactacacgtactcaaaatggattagaactactttacctgtttaaaaaacatctccatatggatatggctttatggataagcaaacggtattgcagaggattgcgatagaatcaggatataaaatcagcaataactaattataagaactgaaatattttacaaaaaacagagcaactagttttacaataagaactgaaatattttacaaaaacatggcaactagttatagatcatacatttattaacaacttaaattcaaatatacaatttctcattggattagatcaacttgtcctgttatgacccaatctaaaaaaatcaactacaagtactcaaaatggattagaactacattacctgttaaaaagcatctccatatggatacggctttatggataagcaaacggtattgcagagatttgcgatacaatcaagatatgtttcagcaataactaattataagaactgaaatattttacaaaaaacataacaactagttttacaataagaactgaaatattttacaaaaaaaaatagcaactagttaatcatcatacatatattaacaactaaaattcgaaaacacaatttctcaaattggattagaacaacttgtcctgttatgacccaatcctttgcagcgtgagcacctgttctgctgcgtccttcctgtcttacgtttctacgtttaccatgttaaccaacatgttgcattagtttggttagtttttcaaaagcttagacaatgtacgagatttacaaaatatttatctaaccttatattcccctgttgatggtattcttgctaccttaggcctccttgatggtctccgagtatatggtggaagcatggaacggtgtgggagctcttcgggtatgtcttcttctttgccatttgcttcagggaatactgctcctttgtaactcgcaacccatgagtgtggtttgaaataatcatcaactaaagccttgtacgagaggttaatgctattggcagccaccaaagcatgaccacatggtatcttcagtttatcatatctcttgcaggtgcactgcttcttttctagatcaacaacattgctaccacctagcttcccaactacctcgtagctccagctggttaccctaccaaccttgcttccacttgatgttgtcaagttttttgaaatttgcttgtcaacctccggaggtactggacctgaatgtgcttgtgacttcttccgacgcgcgttgaaccaacgtgtcaacatagacctaataaatcttaggaattccacaatatgtgacgatctccccttgaacaacgccttgtttaacgtttcagcaatattgctagtcatcagattgaaacgctggccagggaaatatagccttgtccaatgagccatccctacgtcgtgtagatactttatgcaaagggggttaatggcattaatctgattataaagcgttttaaactttccactcgtaaactcatatccagcgtttttcactaactgcgtcaatcctctgttcttgaaccttgcttgtatattcctacataggtgaataatacatgcaccatgatgtgcttgcggaaataccttcttcacccctacctttatcgattcgtgcctatctgataatatagtgagtgtgttgctgtcagctattatcctctccaactttgtaaagaaccaagtccatgcatcatcgttctcgctatccaccacagcaaatgcgagtggatacacttggaagtttgcatcttgaccacttgctgtgagtaaaacccccttgtattttcctttcaaatgtgttccatccacaaccaaaacccttctcagatgcttaaaaccttgtattgaagccccaaaagctaaaaacatatataaaaacctctctttcctttcatcttcaatatcaggttcggtttctatatgtgttatcgtccctggatttgttaacttcagaagatgcaaatattcagccaaattgctataagactcttcatcactcccgccaacatctgttatagctgattccctagctctccaacactttttgtatgacgcagaaaccctcaaatcttctagtacaagttgctgaagatccattggaacaggaccagcagaagcttcactgtattttgccttaaatacagatgcaatcacctttgacgttgctttcttcatgtactgccttctagtatcaaccaaacatgtgtgttgaagctgcgctttcttaatttcatagtaacctgtgccattcattacagtggccaatattctccaatcacatttctcatctgagcaactgagaacaaaataattccattttgttcttgtttgcttgaaatgaaactgattctttatcgcaaatatagccaatcctatttggcaatcttctttgctcgcatacacttttccctggtatatacctttaccatcatcatcaatgtccaaatcaggtaagttatcaacttcatactcgatgtcctcaaacaaaggtgggatgtccaactcctcgtcatccacttcctccaactttttgacctcattactcgtttcctgaaagcttccaactccaccgaccatctttcctttcataacttgtggggtcttttttgtatgctctgtctttatactttcgccagccccattcacatatatagcgtgatcaaagactccgttgccagtacagaaaaccacttcatccggattggagcccacaaccttattgttagacccgtaccttacatctaaacctcctgttgccatcaactcattagcattggagccaccataatcatctgttaagaaatttgaccaaaactccttatcataaccgccacagggcatactatcttcaggtttttccgtgactgcttcaacttcctctgtatcgttatcaacgaaaaataacttttcaacatcattgttaaaaccttcgttatcagtatcattccgtgacgatttatgcccactgttacttcctatgtttgcttctgcttgttccaattcctccatgaattcgtcatcacgaggggtcaacacaattgtaggagtttttgaacccacagacgatatatcgcgaacagatgtgacaccacttttaggcgtttttgaaccacactcttcctccaaactgctttgatgcggtcgtttagtgctactatctcctcgtgtatcaaaactttgtaaatcttcctccatttcttcaaacttcacaaacaaattaagacctctgttttctctaagtgcacttagataatacagaaggccaacctcgcttgtaaccaaaactggaggagtcttctcctttgttgtgaacatatccttatccggtgcagcataactcaacaaaggatttacaccaatcattccgaactctttcgaaatcgctgacataaacgctcccagtgtcattccctcagaaattggaacaaccctagaaaacagtttgttacagatctccagtttccactctccattcgacgaacaaacccaatctccacaaattaccatacaaaactcatccatcaatccctaaccaaaacaaaacagagcattcacgttaattacctaatagcgtaattgagtatcgtaaacgtgttacgacttttaaggatattttttcattgtacctttgtcgacatcgaaataatgactgcattacaaccgtctgtaatcgtcaagtaactcctttctttgtgtgaagatctcaaccgtctctttatgcactgactggatacgttttttttagataccgctacaaaccttagcaagataaccggttaactaattgattgatcatattggacactcaacaatacacaagtatgaaacactcatcaattttacattttttttttggatttattggacattatattgtggacataatattgtggatatatagaacacaatcagtataatggaaagttaaaaatcagcaaacaaaaactaaatcaaaccaaaacacataaaacattgtgggaaaaattttaaataatcaaataaaatcttcaattcattttttgcatgtatacactcaagtagagctgaacattttgggagaagcatcaatatgatagaagaccaaattattaggaatcctcttttccctacaacaaaaacagatacatcactaaccaatataaatcatggttttcttttttatattttttgggtttgtctaaaaaagtccaagaaggaactaaggtcaaaaacatgaaagatataatttacatccctttacatcaaacataatcaatataacagtttaaacattcgacgatactggacaattatcagtgaacaaatatgataaaatagttggacatacagaagtggacattaatattttgcagtttatctttttttggacttgatatgttggatactagtttttttgccgaaacaatttcttaaattttttccatacgagtttcttgtttaatggtgctcaagtcaaacctccagcaccaacctgtagtaaatgcagttatcgatggagatgatatcatttacagagactacgtggatatcagtatcgctgttggtaccctccactctagttattctaaacctttcagataactacaacttccatcatattaagattttcaaagtctgtaaaaaaatggctattgcaggccgatactaattcagggggagattcctaatcgacgcaaataggcctctccaacaaatctctctttctctctgtcacactctttatcactctctgctatcgtagatcggagaatctcctctgagagctctaatctctcagtaatcttcaccgcgtgtccggatctaattttcctgtaagtaatctcattttcatgatttatctgcgatttcttctcttgatgctaattttcctaattttccccgaagaatcgagaccattatgtggaggagaatcgtttcatcgcatcttaaatccatctccgccgtcgggtcctgcgcggctccgtcagatttgattttcgatatagcctttagctatcagtgttacaatcaattatcactgtgatatatttatcactgtgagaattaacaaccatcgacattgagataatttcactcggcgaaggtaacttccttttctcatctgtaaatatcaactgtcgatttattagaaggaaaccaaatcaaaacaaacatttctaaccggttaagtaaatttttggtttagatgagtggggatataattgtccatttatttttcaaaaacaaggaaaagtgccttgtacgtgagaagtgcctcaaaaagaataaaagtttgtagaagtgcctaaacaagtccaattccctatctattatccttttatgattgaacatttgtttattattaaatagatattaaaaggtacttaaacaaatatactataccaatatttataactattgatcatccaaacaggtgagagaaggtgaatgcaaagcttgaaaaaacaaaattgcagatttcttaattcaagagttctcatctgatttgattcaaataaaagagaagaacatgacaagtaaggtgtccatcaaagattatatgtttttgaatccagtagactagtacatggacggtatgaacttgttgaaacgaacaattgttcacaatgtcatggatagtatggttatcaacataatttgcgcgacacgttcgtatgcaaatccataatatgcaaagccacacgctctttttcaattagggttgtgtttaaaacgagactttggttagagatgagagaatccagatcttatgagaacaactccattgaagtagcttacaaagcttatgaaatgaattcttgaaagaatccagatcgaatagtttaagaagcttctcccatccgtttgctgaatcgataccaccgatttctggtgagccaccgctatcatcgagaagaggaattgatccaataagtgctggagagatggagagaggaaggcggtaaaaatcatggagagagagagagagagagagagagagagagagagagagagagagagagagagagagagagagagagagagagagagagagagatcctttattatgacaaacattagttgagggtgtttaggtaataacataagaaaatatcttgttgaaagatgaaagtatggaatagtgaagaggaagttgagaaagtgtgggagaaagtaaatatctccttaatgaaattttcttgtttgactttggcacaccaaagaattgtttattttcaaatcaaccacctaattaaattgtcttgtttgactttggcacaccaaataatcgattctacttttctacttagcattttttacgtgactatattctggtcttgattgatagcttttagttggcggaactgaattttttttaattgaaaaatgcactttatcaccaatcaagaaaaataacaatattttgcgtttaaaaaaaaaaaaaaaaaaaccgataatttttagactgataaatgtagtagaccgttttttttcttcgaaaaacacactttatcaccaatcaagaaaagtaacattattttgcgttttttgaaaaaaaaaacgctaatttttagacagataaatgtagtgaaccgcgtttcaaaatgatacccatgcttttacctgcgattcagtataaaaacaccaatgagtaataaatgtatgtttttctttttcttttacttgagtttaatgtagaaatttttcttatatgtaactagctctctcttacgtaaactattttttcctaaactatctttgatcctctctaactacttctacatttaaggtaattacttcaacgtatctcattaatttcattctatttatgctaaataaaggtcaccaccacgattctctctcttgcttaaatagtactaattaattatagcattcgttattaacttatttatatagtaataattaattagaacattaatgtattactaatttaattaatatatacttatagatattatttaataattatactatatctttttagaatcttatatttcatcacatctattatatatatatataattttttctttatttatagtttctaataattgaaaaaagattatttgattcaatatctataaatttgtggttttaaattcaaattttattatagtaataggttatgtatttcattaatttggaaagaaagaatgatcgttaattatcatagcaattgttaaaacaaatataaatcatggagtttgcatatattagttaaattaatattattcgctaatttgtaatccatttaacttggtttgtctaaattatacatatctgttaattatgtaattaatttcaatttgtaatttttcatatcatttcttagttattttatataaaataacgtttatatatattaagtattttttgtacttgaatatatatacttgaaatttatattaataaaataaaaataaatagttaatagcttatcaaatttgtttaaggaaatttttttgattttagtgattgcagatatgtcgtctaatcgtcgacggaacacaaatccttccacaaggacaggttcaactcatcccgaagtttcaactcctcccttagaaacaacagtgcgtgtaaatttacttttacttctattttttctaaagaaaaatatttattaaaatttgacataataaattacattgtattcactaaatttgtaaaacaaagacaagtacaaatggtcatacattaaaaaaaaaacattaattcaattgtttgatgaagtaattgctatgaataattatactattaagcatcctacttctatcggtagagactatatggttgaaaagttcaatcaagtgttcaacatgaatagaacttatgttttcttcaaaaacaagcatgatgaattaaaaaagagttacaagggatggaagtttcttacgcataaaactggcatctctgttgatcctaagacatcaatgatatttgcatatgacgtatggtggagagaacgagagtttgtaagtacacataacttttctacttatcaaaataagttttaaaattttgctattaaaaatctaattgattctaaattttagggatgtaaattaacaaaaagttttaaccgaaagccgcctgagttttgggacgtgatgaaacgatgtctcgtattatatgatgttcatcccaatctcaacatttatctcgccaaagaagagaacaattaatcaacgagcaagcaattgatgaagaaagcgatgatgacacagacgctaacagtgccagcaacacaagtttccaagacacaagaagaagaagaagtgtatcgtgttgccattgatgatgatgaaacgttccaaaattctgctcctagaaaccaacaacgaattaggctaatttggagtcaacaggtaggcgtggaagtagttcacaaagatctgggagaagcgcataagtttttgttggaagtggttcacgaggaaatcgtagaagacaatcttttgaaacaactatacaagacactattgctggttatagagaatttcaacgacaaagttttcaacaacttcgtcccgatgcttttgaccaagatgattacaatgaatttaaaaaggcagaagcgatatttgttgcgctagacctttccaaacacacaagatttaattgggcatgcattaatgcacttaaagaactgtttttggcatgctttaattgggcatgcatcaatacaaggaatgtattggaatcgacatgataatgcatcattaaacattatggcaatatgcgatttgaatatgttatttacatatatttggaatggagcaccgatatcgtgccacgatacagctgtttgcaaatggcacaacaaagtgattctgagtttcctttgcctctttccgaaaaattttatctcgttgattttggctatccaaacaaacaaggatttctgactccttatagattatcacgaaaccgcgttgtgagatatcatatgtctcaattctattatggtcctcttccaaggaataaatatgaattgttcaaccaatgtcacgcatctttacgttctgttatcgagagaactttcggagtttggaagaaaaaatggagaattctttctgatttttcaagatataatgttcacattcaaaaaagagtgataatggctacaatcaaattacataattttatcagaattttaaaattttcagattcagattttgcaaatgtaatgacagaaacaaatataaacaacagagattgtgagcatgatgtaggtgacatggatgcagcatagttagcagatggagaacatatgacgcaaataaaagacaatattacaaatatgttatggaaaaatcaaaatactcgatgatattttgtaaaagtgatgtaattgtttttttattcaacttttatttaacaatatgtatgttaaaaatttatttattttatttaattttggatgtatatgaatatttaaagttattaactgtatgacctattttttactaacatcaaacaaacaataatatacaattatactaattattaatataagaatatttaatatgtaattcgtaccgctttttttcttttttaccattcaaatatttatagtgtaccgcaaatactttatttcaccaatcaaagattattctgtaccgcccgttctttaaaaaccgcacttatcccataaatatatttcttccgcacgtaccacaattaaaccgtactgcactataaaaccgcttttccggcacaactaaggttgtgaatgggagcattgaaatcgtggatttcaataattattttcgaaaaccgcacatcatttaccaatcagcacttataactatacgtttgagttttttttctttaaaaaaaacatattgcgtttttcagaaataagtaaaaacacatggactgcttttcaatttggaataccttttttattttttaaatattttaaacaataatatatatgttgttatacatgtctaaaaattctttcactccattgtaacacctctccttctcttttttgtttttttcttttctttttttagcttatcttttgtctgcacgaatttcaggtaatatttttgtaatttgttctataatcacattttcaaccatggacatgagtgtaattgtaaaatattttttcataattttgtttccataatattagtttactattatttattatattagccaaaacagttttttattttattttattgtgcttttcaataattgatacttttaaaagatttagcaatattatatcaaaaaataaacttttattttagattaattagaatatttaagattcataaatcaaagaaaatgtttcttcattttcacaaaaaaactaatctataactattaatatatttatttataacatttttatctataatcagtaatacataccgtttattactcttttaccattcaaacattttattatgtaccgcaattagttttttcaccaatcaaacattattctgcaccgcttattttgtacaaaccgcacttgtcccgcaaatacttttctcctgcacgtaccgcagttgaactgtaccgcactataataccgtttttcccgcacaacaaaaaccgcggttaccatgcggtttgtacaaaataagcggtacagaataatatttgattggtgaaaaaactacttgcggtgcggattataattatatatatgtacaaaataaactatatagaataaagttcgattaattaatatcatacgtaatagttgtctatttttaattcttataaagttcaaaaattattattaccaaaaatcataattaagctaaatgtttttgtatatttttcaaagtattttgaattgaagaaaagtttgaaaatataatatgtaatacaaatttataatatattttttattttttaaaaaattattatccagggtgttttgtctacaaataattcttgaatttgaattaatattttctaatattttaagtaaccaaaataatttatatttattatataaattatagatacttattcaatataatttatgcatacaataattaataaataaatacctatttagaaaaaaaaataataataacattagtcacaaatttaagaaggtgaaagataaagattaagaaatgactatttttttcttatattgttattaaatgtacatatgtttgttttattaataaaaatttgaaaaagaaaaaaatcaaatgtattactcactgcgttttttgttagaccactaggtaaatactatttttgcttttaaaggcggtacacgccttaatgtatgttggtaattccgcaaatcttttttttttgtctttttagaaaaacgttattatataaaggcttatgttgattggtgacttaaatacgttattcaaaaaatgtttgaagaccgtacctcttttgagtcaccattcagggcctaaatacattgttaccattcggacatttatctccatctgacatttcttccatttttttccacaaaaagtcaattaagctacgtagcatgcattggtcgttaatatgtatgattagataaaaaaaaactaacacaaacatgcattggtgaatggatattcgtgtaacattaaaggaacgtggtttataaaatatatagtacacaataggtaaacagatcatacaaacaatggtttactaagataaaacttttaaaaataataataaatatctatctaattttttaataagtgtaaaataggtaaacggttctaaaatttacattggaaatataaaacttctatatttttgggacaaatatttttccaaaaaaaatcatctttgtgggacagaaggaataatatatttgggaagtattacgtgccattgttatgtctataaatatcattatttctatctataacgttacaccattagtaatactagcacttgattttaaatatgtctcgttcttttttatattctcaagaagaagacaaacttttataggtttatatggatatttttcaagatcctatcaaaggtgtttatcaattatctaaggtattttgggctcgtgtgaaggaagcttatgagaatgaaaaaatgcaacttggagtgaacatattcaataatctatccaatgtctaattcaagctattgagaaagcaacaaaacaaattcatgcatgtatcaacaatgtgaaaactgacatcaaagtggtacttcaaatgatgatattgtaagtcttattattattattatagatataattttatgaatgatgatattctaagtctcattattattattattagatatatataattttataaatatttcagattttaaataactaaattttgtttaagtaattaaattttgtttttaatggtctttagttacatcaagctaaatcaatgttaagtgaagatccaagcattcatggaggttggaaatttgatcatgtttggtgtattattaagaattttgaaaaatttaaagatggtgtcactccttctaaacgtgtatcaatccaatgttatttttgatatacatctttagagttagaaaatcctacccttgcttctcctacacaaaaaaattcagatttgtattcattttctgtaaatgatgattagggatgtcaaaatgggtaacccaactcaactcaactcataatcaaatgagtttagggttaaatgagttatgggttgacccaactcattttgttaaatgggttaggtcaacccataactcatttaatttgattggttgagttgttaaatgggttaactcatttaagtaataatttaattaattattattacaaaacaataataaataattatcattattaataattattaatccattatcatcaaacttaaaatatttacgaattccactttttactgatttacgttttcggcgataaaattacaggtttacgtttttagcgggaaaatcacaggtttacgtttttggcgggaaaatcacaagtttacgtttttggcgggaaaatcacgagtttacgttttttggcggaaaaattacgggtttacgtttttggcgggaaaatcacgggtttacgtttttggcgagaaaattacggtttacgtttttgacgggaaaatcacgggtttacgtttttcgcgagaaaaccacaggttttggtttttggcgagaaaattacgggtttacgtttttggcgggaaaatcaccggtttacgtttttggcgggaaaatcacgggtttatgttttttggtggaaaattacgagtttactttttctcaatttcatcgcttgtacatttaaaaattttggaaaaatattgattttattaaattggtttagatgtgttggttaagtttaaattgacattggtttagagattttagttggtttttcaattttacaaaacttgataggttaattgggtaaaccattgaaaccattaaccattacaacccaactcatttgactcatcaaaccaattgacccaataactcatttgacccatcaactcatttgagtcaaaaaaaataactcattagggttcatgggttgagttgagttgagttgacccatgaattttgacccattttgacacccctaatgatgataatgagattattagtggatcttcatctccttgatcaaatggggtaaataaatctaaaatgaaaagaaaatttgttgatcaatcaacatcggttatcaacaccttagaagaaagaaataaacaacttttagaacaactaaagaagacactagcacaacgagaatatcatttggagaataaaaaaaagtatgctttgaatgagctaaaagaagaaaacaaaatttttttttgtgatttgaattccttcaaaacccaaatgttcgggcatattttgagactgaacaagcacaaattttacaaaaacgacgtgtccaacaacaagatcaagatcaagaaactccttctccatctacttcatttggacaatattttaactatcttggcggatctacaagcagcttaccggaatattatattattagttttatgttttagttatcttatattgtttattttaaatttcggacttgtttgcttgttaattttataaaactatgtgttgtagttgttgtttgtaaaatgatgatatatattaaataaaaaagtttaatttgaggaactaaagtataaataaaaaagtttaactctaaaataaagtaaagaatagagttattctatatataaagtaattttgtagaaatctttgtttagaatctaatatataatagggttggagaaaaatttagagtttttattgtaaaatacgataaggtcggagatatgtcctcagggaaaatgaaaaggaaggcaaggtttaccaaagttagtcaaggtttttgccgaatcgtcataagtgttgaaggtcttgaacccgaattctccataaacacttgtgacaacttaaacaacaataacaatatttgattagatttaagtattaattgagattcgtataaagatataaacaacaataataaatttttttttctatatcaatatttggtattttgataatgcttggtcgattatctgacgatgattatggccgtcgctacctttcaattcaaaaactattagtgaatattcatttcatatttaaaaataatctcaactattgtatttttgtgtaattacaattaacactcttgattagttttttaatgaactaagatattttttaaaacaattaagaaaggattaacaaaaattatgctaattttctccctgttattgtttcgcggcaaatttacatgtcactgctaagttttaatgtttcacagaaaacgagaggtcatgtaaatctacatattacaactgagtcgttacgaatagacatatttttcataaatttattcgagaacatgtagttcagctttaactgatggctcaactcattcaaccaaaaaaaacagaaaaaggttgcatacacacaaaagaaacgatcattcatcattgtgcagttcaaaagaagagagtttaaagctatacaacaatactatcagacatcctattttattccaataacagacattagaaaggaaagcccctcactgacttttgcaatatcttgattctccaacgttgatgtcggcaattccacacccgtgaacatgtaaagcgccttcaattcttctgaataagtcgtgctcctcgtaacgttatatccaactaccttccttaatgcctcaatctttgtccatatctgctcctcgctatacaacacctttacccacaaacctcaatttaagtagccaaacaagaaaacaacctttgagaaggatttggaaacaaacaattcaatgcatgatctagttgataaagataaggtactatgtatttacacaagcttcttgaataagttctcatgtactatgttacactaatgctcacacggtacttatggttaatgcttgaacaaatttttttagctattcatttaaattagagagacaattcaaagtacaaaaacatttggatttatcactagaaacagataaatgagttcaagaagctaagctattacacggacgccaagtaatcttaataaaaacaattgtgctactcacttaataagaagtagcataagtgactgaataatgaaaaatatgtccctaccattaaaactgtaccctttgttgttctcttttcaagacctcatttcgtctatctaccttataggactcgtgatcctaccattaacctagcctttgactgtgaattttacccacatatatatactgttacacactcttacaaccactggactcgagcagcatataataagttcaaatcaaccgtcaaaaaaccatatgaagagagcgaatcaaacaaccacgtatttggttacttgagataataacaccatcaaacgaaacaagaagcttcttaagagaggattgacccataaagacccttacactatccacttaaagatccgtagacattacaatatacaataaggcacaaatttgttactagccaaaacactcacaaacataagggcatcggtaagcaccatgttaactcgaagcaaatggatccacataacagaacaagttcaacacaaaaggcctgagaatcacttaaacaataccatagcacaatctgatttttactcagttcgacatgcaacgacgacgcctcgcaaccactcagtaatgaaacaataggatgaaagaagatatactaaccgtagttgaagatatttccatatccttctctctagacgttttacttgtagtggactcaagttctcctgtaaaaacaaaggcttaaagattcataagctagtttcaaggaattcacacatttttaaaaccttaaaagcttcacttatataaccaccttcatgtatagtcacagattcttgcttcttccctaatagatcttcaagttttgctctaacattctctgacttggcatctctaggaactatagactgatctttatcctcctcttcaaatcctttttccaatatgactcctctataaagtgattgattatttttaccctcgtctcttatactctctaaccagctctttaactctttcgtcatatcctcatcttcccgataagctattgcgatcgttgtctcttcttcaatctgaacaagaacaggctcacttatagccactcgcgcaacggcttcatcataaatatcaccgtgactgatcttgttctggtgtagcaccatttcatgatcacatcttccactaaacgcattagcaggaagcagttttctcatcaacttttcagtacaaacatagctcaccaagaaaaaacaataaggaagggacgaaatcaacgcgattgtggaggcaacaacgagtgcgggaacgaggaacggtgcagaaaacactagaaaacatgctgcaagaaccttctttcccacactaactcctttcctccaaagccaacccatcttcccatccactcttgtgacttcttccatccgatcacactgcttaaattagtaacatacccacaatttcaattgtatgaacaaacatgtttttagagaaaccataagccaaaaagtttccaagtttctcattagaatctgctacatttccggtaaaagtcatcttgatcacaatcgttagactaaaccagtgagaattgacacatcaaaacatttaactactaagaaactttgttatagttaaaacacacaattaaagtaacgagtatgcaaattcctcaagttccagaaaatgtagactcaaacctgattaggcgatcaaagcgaggataaccaaagatgccatcggaagagtaaaaaaacttctctaaagacgagagagacagagggacacgtgttgagatttggacagcacaacagaagatttcatgggttctataacgtgtttcttcttctctatatccacttgttttctcattttctcgaactatgacgcatttaatggtctgttctgcaactttgagtaaatgcagattgaagataaaagaacctattatttctctaaataaaataagtcataagtacatatcactaactataatatagggaactacttaataaataaatctctcacggtcttatctatcacaaaccctaaaattttgacattaatctaccgatgagagtcatgagaccgctcacagttttgggagatgaatatatatattttttaaattccggagatgatatttaaagaacaaacaaacaatatatatatttgttgggaaatgactagtaattatgatgtaaggtcttgttttccgtgattccgtttttaaaagttacacaagttgactgggccgttattttccattgcgggaagataatgcaattgtaatactttatcctatggttttatcattagttttggaatgtatatatactacacatttaacatttgctttggatacttggatatatttgagttcttagaaacgaaaattgaatatatatcttcaagtgagaatctgttgtctataaaacaaacatagaatagcatgttatttaaatgcataagatgattatctattaaacaaacagttcgataaagagttttattatatattcgtttagtagaagaataaaatgttggacgtgccacggtacaaataatattgtttagtataacaacacgtttttttacctataaattataatcacacatcaaactatgacataggcaaaatacaaaaaaaatgtagatataatttttcagttttttattaatagatataaactgtagatagaaatctatttttacgtaaagaaaaaaatgatgagaggggttcaagatatttcaaaatccactagaaaatgaaatgagaaagataaacttgaagatgaaaggaggaggcatgcattttcgtaaaatggccatccaatataattcttaaaccattttgtgaattagtaaccattcgttccacctaatttatcttatatctaattggtttggtcaaatgtgatttttgtctagggtaaaatatgaaaaaataacaaagctagttggcttgatcagttagatgtaaacttatgtacgttatgtatgatacaatatgattttgtacggtagaaaagtatcaaaatgtaaacgtcaaacccacccaaactcacgtcacttacgtctataaattaatctttgtcttcccaaccaaagaaaactagagacaagccgaaaacaaaaagaaaaatatgtacatggcaatcatgattatcctcttccttagctccattcttctttctctcctattgctccttagaaaacatttgtcacacttctcctatcccaaccttcctcccggaaataccggccttcccttaatcggagagagtttctccttcctctctgctggccgtcaaggccatccagagaagttcatcactgaccgagttcgtcgtttctcctcctcctcctcatgtgtcttcaagacccacctctttgggtctcccaccgcggtggtgactggtgcatctgggaacaagtttctattcactaacgagaacaagcttgtggtctcgtggtggccagattccgttaataagatcttcccttcttcaatgcagacgagctccaaagaagaagccaggaagctgaggatgcttctttcgcagttcatgaagcccgaggctttgaggaggtatgttggtgttatggatgagattgctcaaagacattttgagacggaatgggccaatcaagatcaagtcattgtcttccctcttaccaaaaagtatgtactttgcttctcatctttttaaagcaaatttaattttttttgtaaatgcaagaaaatgggaagaaaatattagaatttcaccaaactattttatgactaagatatacatataaaaatctcaatcaggttcacgttttcaatagcatgccgttcgttcctgagcatggaagatcccgcaagagtaaggcaactagaagagcaattcaatacggtagcggtagggatcttctcaatcccaatagacttgccaggaacacggtttaaccgagccatcaaggcgtcgaggttactcagaaaagaggtttccgctatcgtaaggcagaggaaagaagagctcaaagccgggaaagcattagaggagcacgacatattatctcacatgttgatgaatataggagagaccaaagacgaggatttggctgataaaattattggattgttaatcggaggacatgacacagctagtatcgtatgcactttcgttgtcaattatcttgctgaattccctcatgtctaccaacgtgtgctacaaggtactcgcctctctctacaacctctagtgttattctttgaatacattaatatgtttaggtacaacactttttcaattaacttgtactttcctacacgacagcttcctcaataataaaactaaacatagcttatgactggtttgttagctaggaattaggatcatatcttatgacttctttttgggataatgaataaataaataaaaatactatgtaagaaacattacatatgataactaaatatgaaccgacaatgcatgtaacatattggtttgtccggactcaagcctacataatgcatgatcgtcaatgacacataatgcatgtttcagaaatttaaaagaaaaactatgaaatgaatcaaaaatattatcagtatcatatatgtgagaaaaagtagatagctttgctattttgtattattggtaccgtcaatttgaccaaattttccttaccaataaatattaatttgttgtcgacaaaagaaaaagaattaggttgtatatcttaattgacattaaaaaaatagattttatagtcttaagtttacagaaaaaatttactcacactaaggaattgcagagcaaaaggagatactaaaggagaaaaaagaaaaggaaggattaaggtgggaggacattgagaaaatgagatattcatggaatgttgcatgtgaagtgatgagaattgttcctcctctttctggcacttttcgtgaggccattgatcacttctcttttaagggtttttacattcccaaaggatggaaggtaaggctactccaaaatccttaagacagtttgacatacatatcaagctcatgcacaaaatcatatatatgttttgatcataaacatagttatattggagtgccaccgcgacacatatgaatccagactacttcccagaaccagagagatttgagccaaaccgtttcgaaggaagtggtccgaagccttatacctatgttccatttggaggaggaccaagaatgtgtccagggaaagagtatgctcgtctagagattcttatattcatgcacaatcttgttaatagatttaagtgggaaaaagtgtttccaaatgaaaataaaatagttgttgatcccttaccaataccagacaaaggtctccctataagaatttttcctcaatcttgagtctagtttgaaacttgatatggatcactagttggtgctacgttagtccaatatcctagtgtattggtctcaagtcttcattgtatttgttgattcatggataataataataaaaaatccgctcactttcttcgcaaactagaatctcttcttatcgatataacatagcttgtcttgataacaccaagactacaaggtcttggagggataaataagtttacatattgggttgtatattttgtgggacaattgtacacattagtgttatcttttagttttcgatgcaattttcttcatacggtgtccgttcgctagatgaatagctcttcaaagtcgcaactggggttcttctattttcttacaaataactttgtcatcaatatatagctttgaagaatctcgactcgattataattagtctgttcgtttcatcaccgcaggcggcagcggcggtagcaaactctaccgctgccattgccgcaggtgcatatgttcgtttcgtcgccgctgccgcaagtgaaatcgaagaagacgattcaaacagagaacttcaaaagctcttaagggtcaagaagagaacttcaaaaactaaacccattacttcaaaatcaccaagcttactttgttatcccatctcttcttcagatcgaaatcgcgttaaagagagaagagtaaggttttagatggtgatgtgtattaggttctcttgtgatttcctaaatgtgttaagggtatttatgtcattttaattttattattaatcacaggttttggataagcggatgctggatttaatcggcgattaaaattattcaccgcaaaatgctgtgtttgccgccgcgtcttaccgcaagtactggcggcaacaaaacgaacaatttcatatgcgtctgccgcagccgcaactacctgcggcgacgaaacgaacagcctagacatgaatagtgatcggtatgacgcaagaagaatgttagagccaaacaatcatatttgcgagtaatgtaggaacattgtatgctacaaggagacttctctataatgagaacaaaatgattcaattcttagctaattaacttgttgttgagaaacaagaacaagaagtccttgaggaccaaccaaaatctcactaaggaaactcacaagcccaaaccaaaccacaggagtaacatcaacacctgcaagtggtggaatcactttccttgtctgaacaaggattggttctgtcggagcgtaagctaaaacgtacggaaacttgtcaacgggaagtttcgggtaccaagacataacgattctcaaaatgaatagaaatccaaaagctgataaagctggacctaagataccaatagcgagcttcgctgttcctggatctaaatctgctagagaaatgttacgcaacgattccgaaatggaattcgtctgtcgaatgagatttgttgttgtggctgcttcttctatgtggcttaatgttgctgaaactatgggaagagacgtggatcgattgcggaaatttggagaggatcgtcgtgatttcttctgaaaaatcatcaatgccggcgagaaagagacgaagctggtggtcactgtcgtcatcacaatctctctgctctgttttttgtgaaccaaaatatcgtgaactctgtgatcgattccagtgtaaggttgagaatctttggttctggagataatgcggatgtgctgacgtggaatacgaaaatgggtacaacccgaaatacttgggttaatttgaattttatggttacaactacaaccccacacaaactgggatattttttttcactacttaatgtgatatatgtgcatatgtttttgcgaataaattaagaaattatttaatttttattttttcgataaaaacataatttattatttatttatttttggacaaaaatgtattattaactttgttagtggtgagaaaaatatagacatgaccaaaacttaactataaccgtataaaattgttaaaaatcgtaattgttaaccgtaaaataaaatagttacggtttaaaaaatattttcctcgtaaccattaattaactgtaaatgtaccaaaacagtagttaaccgtacgttaactgcacgattaactgtatggttaaaaccttaaaaagatacaattttgactattagtttttgtaagggaaaaatgtcgttttatacgcgaacttttaaaaatggccatttaatacgtgaattttttgtaaggccaaataaaacatgataaaaacgttgactggccatttcacacaaatgttatcgttgaccaggccaaaatctccacgacgttatcttgcattaacggacccgataattccgttagcacacgttaactagatccgttaatatccaaaacgacgtcgtttcattgcaatcgaaatatcaaaaatcccaaatcaaaagccaaatccctaattcctatttggccaaactacaggtccaaaattttgaagcagaaaatataagattcatagccagagaaatcatgattttaagaagattagatcatcccaacattctaaaactgaagggattatcgcatcagaaattcaaacaacatgtactttgtgtttgattacatggagcacgatctcgaaggcttatgtttatctcccgacatcacattcacggaggcacatgcaagagagatacacacacacacaaaaccataacctctcctgcaagtgactacatttctttattctgacaaaccttaattttgttttcaaatcaaatgttatgaagcaactgttatggggagtagaacattgtcatacccgggattatgcacagagacattaaagacgcaaacgttcaggtgaataacaaaggagttttaaaattagctgatttcggattagccaacactgtaacaccaagaaaaaagaatcaattgacgagtcgggtcatgacattatggatttagtttttgaattttggggatttctaaattgatttgggatttttgatatttcgatttcaatgacacgacgtcgttttggatattaacggatctagttaacgtgtgctaacgaaattatcgggtccgtcaatgcaagataacgttgtggggattttggcctggtcaacgataacatttgtgtgaaatggccagtcaacgtttttatcatgttttatttgactttacacaaagttcacgtattaaatggccactttttgaaagctcgcgtataaaacaacatttttcccctttttgtaatgcaaagataaatattgaatattcggatacagattttttaaaaagtaaataatatcgcatataaaaaattctactatatacttttcatcttattaaaaacaacaaaaaaagtcggatgatacgtaagattttgccaacagtattaaatgcattgtaatcatcaaataagtcataagcttattttaatcgtaattgtagtcatgcctaggaaaatagttaaaatcctaagagtgataagatcgtaaccatgataaaccaggaaagacttggtcaaggagaaaagaagaaacaaacctttagtgtatccctcagttttaaggagatcaatctccacgtttacattttcccaatttgtggattatgttccttgtttctaggattggtgatcgatccactttgcttcatttgtgtataaagacatgaattcattatcatgaatcagacttgaaaattggacaaaatatagtttatttctttggttattttgttcttgtgttacacaaaacacatctctttggttttgaagagggatttattattaaaaaaaagaagaaaaagggacttatcagtggtagcagagtggtcaaggagtttcggaggagagtgtgaatcgtttggtggacttgaaaattggataaaacatagtttatctctctgattacttgttattgtgtgtcgttgtcttacacaaaacacatctctttggctttgaagagagctcatctcatcgctaggagtgtaacaaaggaggatcaccgccaattatattagcaaccggatttcttttgttggttgaaacaactgtttgaggataataatagtattcccgaggcgtagtactcatatgggttgaactagattgattgtcttttatcccccgacccccaaatttatagtatataaaacttaacacaatttaaccaatattaagacaaactgttaaataaaaatattcaaaaatataaaacaattaagaaattttgtattaaaacgtgagaacatcacttactatgaaacaaaaaaaaaattctaaaacatcaaatatgttgaagcagaaaaagtatattaataaacgtctatattcatatcaaattttacaaaattcattcacatatacatccgtgaattaacatatacattcttatgttaaaacactgctcataaccaaaacaaattactggaagaattgtcaacaatctgtgatctcacttgtgtcaaattacaaccaagcatttgcttcaaagctctcatggaaccattgttgatttaccttatctatctttttgtggtattggggaatgccctgttttgttatgttttaaactctgggatttctgaatctctctcttattgtacttatttcttttgtccaaaaaaaacaaaaaaaacaaaccaaaacaaattacttagcgtgtaaaagtctacataaacttctatttcaccagaatcgtaaatttttgctgtgctttacagtttacctcacgcagttaaaaattcgatcgtggcgaaatttcctaatgtccttgacctgcactccctgatgtactgcctcttacttcaatcttgatccctctaatcacctttttatcccaaacttgtcctatttcagttaccaacaacaaaaaccattgatatagctaaattttttaagtttttgaaagaaataaaaaaagagactaaagacggtttcgagtatcataaatggaaacgaattcttatcgttgagaacaatagaagatgatttacaatttacttatgggatcaataaccttttgcatggtagttcaaacaagatgttgttcatacattttatttaatcgagttgagagactaataaattatttctcataattagatcttacttgtttttggagattcatatgggagtcgagccaggactgtatttgatgatgcagataacaagagaagaagcaaagttatcaaccaaaccatgtacattttgttttcttggtttactattacgagttttgaaacatgtaacatggtgtatttatatgtaagcgaaaatgcattcaggtcaagtggaatataggtcgttaattttgaagctagaaaagtattcattcttaacgcgtatactagttaggcattttcagagaatcttattccttatgaagcatttttcagagatgaagtatttttacttacttttggtgagaaaatggataaaattacccctgagattttgacgcaaaataactaaccttcgttttttattgtcgttcaacaaggaagatatttacgaaaaactcagtctagttatgttctttttagtatagaccgttggattaaaaaaatatattttaaaatctatggctaagatgaaataaaaaaaaaatcattctcttgttatctagatcagataataacatctctcttcttctctacaaggaaccatgttttttctatcactctctctaaaacaaatccaaaaatcaaatggcgagttgaagatttgtaagtgctgagtgtgtgatgagagcaatgatggagtttgtgaagatagtgtaccttctgtatttactttacggagaagcctctctagatttcgattttgtgtaggttcgtaacctctatttaacgaacacaattttgtttatttctttattttgtgaaaacatgattcacataagcgaaattgtgtgttgtcaagacgacgagatctgatgcatatggtctattctcgtaatatcaatatattgtcttgaaggtagagatctctgcaaatttaaacaaaaaccaaaaaaaaaattcggtgtacataataacgagtccattcatatgtgccatacaaaaacctttttactgagccatatccattctacacaaagttattgtataaatctgctccatctacttcattctcccaaataatctctacgtagaacaattctctccatgaaagcatataaatatatcgtaaccataaaaaagggtgataactttactaaacagtaaaacgcactcgcaacaaatcaaaaacatagttgtccattgatgatgttgtggatcttaattctgattcaactttaagtgaccggtttaggtgctgtggttaagaagaattgaggaccggttagatggagtgttttaaaccggattgaagaggctaaaggaaaccttcttttcacgagagagggtcttctgtttctatttcggacttagtataaaaggcctttatttcttcttcttcattattcgtgttttcatctgtaacaaacaaaaagaaaagcttgagactccattgttgagctctgcttgtactctgtaattctcattctgttctagtggattgccgaactgattcggccccagacgtagacttgatcataccgatcttgttgaactgggtaatcaaatctcttgtgttgtttctttcgttcttcaattcgtttctgttcttgagctgattcaaagtttcgattactgagttttcgaaagtttgtgaagttattgcgttgtgaatcgagcataaaacgtaacagattggtatcagagcccaggctttgggtgtttcgttcacatcgcatcggtcgatggcaacgacgacgagagtggagatcaaagccttcgacggcgataacaatttctcgttatggaagatcaggataatggcacagctcggagttcttggtttgaaaggaactctaactgactttgctttgacaaagactgagacattaacaaagagtgaggagaagcaagtagcttctggagatgaatcatcggattcaagtgctgtgttgactaaagaagttccagatccgatcaagattgaaaaatcagaacaagcgatgaacattatcatcaatcacataagtgacacagtcttgagaaaagtaaatcactgtaagactgcagctacattgtgggaattgttgaatgaattgtatatggagacgttgttacctaaccggatctatgcacaattgaaattctactcgtttagaatgatgacttcaaagacgattgatcaaaacgttgatgattttctgaggatagttgcagaattaggaagtcttgatatcaaggttgcagaagaggttcaagcgatcctaatcttgaattctttgcctgttacctatgatcagttgaagcacaccttgaagtatggaaataagaccttgtctgtgaaagatgtagtatcttcttcaaagtctcttgaaagagaaatggctgagcttaaagaaaacactaaggtggtgaatacaactctatacactgcagaaagaggcagaccacaaacccgaaatcaaaatggtagtcaaggcaacaatcaaggtaataaccaaggtaaaaatcaaggaaaaggcaaaagcaggtcgaattccaaatctcgtgtaacctgctggttctgcaagaaagagggacacgtaaagaaggattgttttgctaggaagaagaagttcgaaaatgaagaacaaggtgaggcaggtgtgattactgagaagttggtgtactcagaggcacttagcatgcatgaccaagaagctaaagagaagtgggttattgactctggatgtacctaccatataacttcaagaatggactggttcacagatttcaatgaaaatgagtcaacactaatcttgttgggtgatgatcacactgttgaatcaagaggttctggcatagttaagatcaacactcatggtggaaccataagaatgttaaagaatgtcagattcgttctaaatctgagaaggaacttgatctctacaggtactttggataagttgggctttaagcatgaaggtggagacggtaagatcaggttttacaaagaaaacaaaacagctttgcgtggaaatttggttaatggactgtatgtccttgatggtcacacagttctgaatgaaagctgtaatgctgaagggtcaacaaaaaggacaagtttgtggcattgcagacttggtcacatgagtgtgaataacatgaagattctgactgagaaaggtttgattgaaaagaaggatatcaaagagctgggtttctgtgaacactgtgttatgggaaagtcaaagaagttgagttacgttttaatgtgggaaagcacaatactgaggatctactaggatacctacatgcagatctttggggatctccaaatgtcaccccatctctctctggtaagcagtactttctgtctataatagatgacaagactcgtaaggtgtggttgatgttcttgaaaaccaaagatgagacatttgataagttctgtgaatggaaagagttggtggagaatcaggttaacaagaagatcaaagtgttgagaacagacaacggcttagaattctgcaatctgaagtttgatgagtattgtaagaagaatggtattgagagacatcgaacttgtacctatacaccacagcaaaatggtgttgcagaaaggatgaatcgaactctcatggaaaaggtgagatgtcttcttaatgaatcaggtctagatgaaagtttttgggctgaagcagcctcaactacagcctatttggtgaaccgatcacctgcatcagtagtagaccacaacgttcctgaagaattgtggctaggcaagaaaccaggttataaacacctaagaaggtttggctcgattgcttatgttcatcaagaccaagggaaattaaagcctagagctttaaaaggcgtttttctgggttatccacaaggagttaaaggctacaaagtgtggttgttggatgaagagaaatgcgtcattagtcgaaatgttgtatttgatgaagattcagtctacaagagtctgctacctgaaagtgataaagaacagattgatgggaaactcagtaaagagactaccgttactgtgaatgacagtgttaaagaaaaaggagaaagttctgcttcaggtggagctattgaggaaatcagtgacagtagtgactcagaggttgctgctacagaagaagactcacccatacagactgtaaatctcgaaaactaccagctagctcgagacagacccgaagggttactagaccacctactaagctgtcagactatacccattttgcttatgcgttagtaatggcagaagaacttggtgaagaagaagaacctcaatgctatcatgatgcacaaaatgataaagactaggagaaatggaatggtgggatgtctgaggaaatggattcattactgaaaaattaaacctgggatattgttgataggccaaaggatcaacatgttattagctgcagatggctatacaagataaaaccaggaattctaggtgttgagtcaaagagatacaaggccaggctagttgcaagaggtttcactcagaagaaagggattgactatgaagaggtatttgctccagtggttaaacacatttccattagaattctaatgtctattgtagttgcagatgacatggaattagagcaaatggatgttaagacggctttactgcatggagagcttgatcaagtgctatatatggagcagcctgagggatttgaagcagatccaaacaaagatcaagtgtgtttgttgaagaagtcactctatggcctgaaacaagcacctagacaatggaacaagaagttcaatgctttcatgatggatcaaggctttactaggagcttacatgattcgtgtgtatacgtcaaagaggtcatccctgatcagtttgtgtatctactgttttatgtagacgatatgttgatagcaggaaagagtatggctgaggtcaataaggtcaaagaaggattgagtttacattttgagatgaaagatatgggtgcagcgagtaggatactgggaattgatattgaaaggaatagagaggaaggaactttgtgcttatctcagtcaaagtacttagagaaggtcattcaacgttttagaatggcagatgcaaaaggtgtgagtactcctattggtgctcatttcaagttgtcagcagtcaggaacaatgatgagagtgttgacacagaagtttgtccttactcaagtgtagtaggaagtgttatgtatgctatgatagggaataggccagatgtagcgtatgctctcggattggtgagcaggtttatgagtaacccaggtcatatgcattgggaatcagttaagtggttactaagatatcttaaaaggtcaatggacctgaagttggtttacacaaaaggaaaagacatgaagatacatggtttctgtgactcggattatgctgcagacctcgataagagaaggtccataagtggatatgttttcacggttggtgggaacactgtgagttggaagtcaagcttgcagcatgttgtagcattgtccactacagaagctgagtttatggcacttactgaagcagtaaaagaagccatttggatctgaggtctcttggatgatatgggattgaagccagaagcagcttcagtgtggtgtgactctcagtcagcgatttgtctgtcgaagaacaatgcatttcatgaaagaacaaagcatattgctgtgaatttctatttcattcgagacataatcgaagctggtgatgtagaggttgagaaaatccacacttcaaggaatcctgcagatatgcttactaaagtcatacttgtgcacaagtttgaagcagctttagatcatctaaagctcctcaagtgatacttggaattatgattgccgaaggttaagttcaagtagtgcaattcactggagaatgttgaaagattgaatcaaggtggagtgttgtggatcttaattctgattcaactttaagtgaccggtttaggtgttgtggttatgaagaattgaggaccggttagatggagtgttttaaaccggattgaagaggctaaaggaaaccatcttttcgcgagagagggtcttctgtttctatttgggacttagtataaaaggcctttatttcttcttcttcattgttcgtgttttcatctgtaacaaacaaaaagaaaagcttgagactccattgttgagctctgcttgtactctgtaattctcattctgtttctagtggattgccgaactgattcggccccagacgtagacttgatcatactgatcttattgaactgggtaatcaaatctcttgtgttgtttctttcgttcttcaattcgtttccgttcttgagctgattcgaagtttcgattgctgagttttcgaaagtttgcgaagttcttgcgttgtgaatcgagcataaaacgtaacagatgagtgtccaagtagtcaagtcgaaatggtcatctagtaattcacatagtcatttcatatcagtagacatgataatcatcaattaaaagtacaccgtccatttttctttgaccaatatttgcttgtgtatggacacaaccattattataaaatggatccatacccttacataggctattcaaataacaaagcaataaccagtggtccatcaaattcaaactttaactcaagactgaggaaagattctaatagggagacctttggctggtattggtgcgggatcagccactaatttattttcttttggaaacactttttcccacttaaatctcttaacaagattgtgcataaatataagaatctctagacgagcatactccctccctggacatatcctggatcctcctccaaagggaacatatgtataaggcttcggaccacttccttcaaatcggcttggctcaaatttctctggttccggaaagtattctggattcttatgcgtagcggtggcactccaatataactaaatatgtttatgatcagcacatatgtatttaaagtatgagcatgatgatatgaatgtaaatatcttcaaatggttttgattatgtactcgtaccttccatcctttggggatgtaaaaacccttaaaagagaagtgatcgatggcctcacgaaaagtgccagcaagaggaggaacaattctcatcacttcacatgcaacattccatgaatatctcattttctcaatgtcctcccacgttaatttttcgtttacgtctttgttgtttagtatctccttttgctctgcaattccttagtttaattagtctttgctttcttttaaaattcaaattagttatggtatacaatttactagccaatattaaggtcatgtaatcattaattaatgtcgaaatgaaaataatattttagattcacttgtagtttgtgactttatgtcttagctaatatccggagttgaattcatgtccaaacataaggacaacactatcacaaatcactagataacatacattgatgtgtttatttactctgaattcttaagtatgtaacattttaaaaataattaacactagtttgaaaaatggatacgcagactcaaggatttaactatattcattaatgattcgttatatatcccaaaaattatcgtagtagaaactttttttcctccctctcatctttttcgctagcggtatcttttataaaataatgattaaagctcactatcttactagaaaaatgtagattttgtttttgcatatgctattattaattaaaacattaactacaccaaacaattatttgataaatagatatatgatttccagtctatataaaacacataggatataatgttattattatttcaatttactaagataacatgctattcggcgtagaaactatatactatatattatttttcaaaattaagaaaatactcaatcttagggtttcgagtttctttatactataagttttgtagggttgaattttatttttgtttttcttgttttggattatcctacatgagtttatgattttaatttttatttaagatttagagtttatttttgtaaggttatggtaaaatggcgctttttcacttaaaatcatatcggataatttttgttcgtttattaaaattcaaacaatcgcatatgaaagaaaaaacacttttgtatgtactatatatactactatatattgaaatgattattcacttcatgtattcaaattatgttgttatactagattttgatccgtggtatatcgcggggctaggtttttaataaaatttgttatataaaatgtatatgtagatatttgtttcaggggcggatctacttacattggggaggtggcagctgcccccacttaatttgacataatttttttttacttaagaaaaattacaattatgatggacaattcggataattctttctttatgccctcattacccatattttattgcccccatttactatttataatcttcttaatatatgaaaaattaaatatacttccaaaattttagtgtagttaaccacaatcatcatttactaagtctaaatttccttactgccatagtattgtaatcacatttgccttattacttttcttaagttttagttctttagctatagcctctttattttacgtgtgtatttggtatatgctatatttttgttgtttttattttttaaattcatatttatgtaataagtttaataatatctacaattttcttaacaacaaataattatgtttgaattttcatattgttggagtataatgaaaacttaaacatacaaataacaaaatatttgtataagctatgcccccactaaataaattttctggatccgccactgatttgttttattaatattatttgctttgtttagtgtttaagataatgtatatatagattttaattgttatatttaggatttcacccgtagtatatcgttttgtattactatcgatccaaacccgtcataccatctaatcctgcacagtgaaattaaacatatataatggatttcacttgtggtataccgtctcgtaatactatcgaccaaacccgtcctaccactaaccccgttcggtaaaattagacattattttgttatttttgttttaataatactttaatttaaaaaatatttaattcaaattaatttaaaagttttctttcaaatggttatttaattgttgtaaagtttatatattataatattataaatacgtcctaccatctagttctactatctaatcttgttcggtaaaattaattttttatttttttaataatatttttattaaaagatttataatttaaatcaatttaaagttttctttcaaatgattattttatttttaaatattttaaccattttggcaaaaataattaggccatggaataagaacatattcctttgaataagatttgctttgatttgatagttaattttcgtattgaataagccaattacagccattgtaaataagttctaactccaggatttatttcacaaaataactgcaaaaatgtatatgtagattcttaagtttagatcccaatatagttatcacacaaatttactctttaaaggagagggatctgcataccttctagcacacgttggtagatatgagggaactcagcaagatagttgacaacgaatgtgcatacgatacttgttgtgtcatgtcctccgattaacaaggcaataatcttatcagccaaatcctcgtctttggtctctcctatattcatcaacatatgagataggatgtcctgttccactgatactttcccggccttcagctcttcttttctctgcctaatgatcgttgaaacctctttgctgagtaaccttgacgccttgatggcacggttaaaccgtgttcccggtaaatctattgggattgagaagacacccgtcataaccgtagtgaatggctcttcgagttttcttactctttcgaggtcgtccatgctcaggaacaaacggcatgctatagaaaacgtgaacctggttgaaacaaaaacaaattacataaacatttcaacgcataaacaaaggcaagcaacatataaaagaagagtagatgcacgttacatactttttggtgagagggaagacaataagttgatcttggttggcccattccgtctcaaaatgtttctgagcaatctcatccataacaccaacataccttctcaaagcctcaggcttcatggacggcataagaagcatcctcgtcttgatggcctcttccttagagctggtctgcgttgaagaagggaagatcttgttcaccgaatctggccaccatgagatcacaagcttgttttcgttggtgaatagaaacttgttcccagaggcaccagtcaccaccgcgaagggagacccaaagaggtgggtcttgaagatacctgaggagaaatgacgaactcggtcggtgacaaacttctccgggtggccttgacggccagcagagagaaaggataaagtctctcctattaagggaaagccaatctttcccggaggaaggttgggataacggaagtttgataaatgttttccaaggaagaataggagagggaaaataatggagctaatgaagaggaatattattgtcaaatacatatttttttccttttcgttttaggcttattctacttttgttttgcagctagcttagacattatatttatagacgtacgtgagttagggtttttgtaaaaatccctttgattatattcccctgtacactattaatcataaaaaaaattggtagttgagaaagctcgctcataacggtcattagtcacaatcggaaagaaacatgaacgttaacaacgaagattctgtctatcatcaccgatgatgtatgtcattcatttgataccaaaaaaaaagcaaaaataattgtatgacattaggaaaaatatcgttgatcggttgattataatgatagtattgaccaatgaattggactatctcttgggttaccggattaattagactacaaatcaattgattaaaatttatttaattaatttaatattaatagatattttagagtttttataaatttatttaatattaatctatactattaattgagaatcattgaaaataaacaaccttatgaagggtaaaatattacataaaatgccattgattgttagtgtttttaaataaattcattaaggatacaatagtaattacaaaattaatagatttaaatataaaaatatggtaatattcttttaagtaattatgagttttccaaaattaaactcactttctctttcctattaattatggacgaaaaattaaaatttatttcttaaaaattgttaaccaataaaaattgaaaaactaagatttgatatcaaattatactatattattaaactaacattttagaagttaatttttattttaaaattttttaaaatcataacacttgcttgataccatgaataaaaaatcataatttgtgatagataatatagataaataaatttaatttttagaattttgggttaagtattttgaaatagaaaacgaaaatttatttcaaaatttctaaaaacgagattagatgttacaaagatttctatgaattaaacaaaaataattaatttaaagtaattatcattatgccttacatttagaaatatctaaacaataaattgtacatactaatttcgaaatgagggttttattttttatttttttcaaccgtatcttttttaaataaatccataatatattattgaacaaacttttgaaataatgtaaactaattatacatttttcattcaaaacaaattatccagcaaaaaaaattgcttttataggtgtatttcaaaattttaattatattccaaaaatccaattaattatgattaaaaaaagagaaagaagaatattgaaaatgtagcaaaggaaataaacatttttacatttgttaaaatataattttttacaaaattatttgttataatgctattcatatttttgaatttgaagaaggaaaaaaaataaaaaaaagatatttgtgtgttttaatttatgatatatttgtaaactttaacatcctatatattaatccgcaaaactcagtcatatatacattggtatttaaaggtaagtaaataagaattttggtacgtacttttaatggaacgaaatgaaaatagaaattatgagacacaaacgacatgaaaagaaagggaagtactatataaaataatttgaaccaaactggacatcaaattaaatatctaactggtatgagtttgggttatgagcactatataaaataaatttgtttatacacataaccctgcatgtacgtattttatgacacaaattctatttgtgatggttacgggttggtagtatttttatttcacatatatagacgggttatgggacaaagaatttatgatagatacatcacatgttttccattccaagaaatataagtcaaatatacgtttttattttctaaactaatcaaaacattataacagtttgattattggtgtaaaataggatataaatttggttttagtttgggttatttctccgtgtgagtccgaatcttaaaatataactatacacgaacacaattgaacttcaattattacttttaactctataatatatatattattacaaagtttacttataacaaaatattatatattttaaaaatcttttaaagatatatattttgtacgtatatgcgagttcagatatctaatacattgtactataatatatatcataaaataagaaaataatctacattggattaaaaatatgaaatcccgcacgtacatgcgggtcaggatctagtatatctgtaaaagatgtttaacaaaatatgaaattcaattgataagaatgcagtgattttgtttttttaaatctaactaaatgtctaaaactgtaacacattatagtaaaaaagtaggatttaacccgtggtacaccacgggataaatattttattcatatatttaataatattaaattttacggttttagtttagtataaaaattttacggttttagtttagtattaaagttatataattttatattaatgttgtaactaaaaaaattggtgatgataaaataataaaataaatatttaacttgtgttatatcaatccaaacccgtcctgctatatttcatatcaatccaaacctgtcccgctatattttacgtcccatgatattttaattttttataagtttaaatagtagttgtggaattagttgtgattgtgattttatgccaaaaaagttatggacttttaattccatggaatattcaaaccaaaataaggaatgtttttaggtgcacatataattggatttgctcatcttacggaatcgtaaatgtatttttgtttgttttaatttattgccgaaattaaatacaaataattcaaatactttaaattttggttgttttaagatttagtggatattgtaggagagataagaaaaagataatttattgtgttttgtgtaacatatgagattgccatatatttcgaatttttttggtttgttacacaattaattgccgtaaaaaaattcaaaccattaattaaataaaaaataaaagaattaaaattcagtggcagccattgtaaataagtctcaactttaggatttatttcacaaaatggttaaaaaatgtatatgtagatcaccaattacgaaaataaactaataaacattgtgaattcaaacaattaatcttgattttctttctcattatttaatttattgttttaaaattgcatcttgaagtctttattgaaaaaaataaagttattttattattattttgtattatgaaaataataataattatatattctactagtcgttggtcttacattatctttgaatttgtgtataacagttgactggaatataccgatgtaattttaatagtgatgcttattacttgtttaagattaatattatatttaataaaatatatacccgatatttaacaatttttaaccgatttgtttattattttaatttttttccaggtttattattttgattatctattcaaaatttcataaaatacttgtttataagttagtcaaacaaaattgggaaaatctttgattttaatttttaaagatgtgtttaggtcacaaacacgtatagtccaagtttaaatttttttttaaacatatgaagatcaatataaatatcaaaattttaattttattatttgttagaccataagttttgttttacttgtctgttatgaaatgatgattgcttattataagtcaattaagtatgttgaagatgcagaaagccctttcacaaaaaaaaagagtatcttgaagatgcttaatttttctattttaaaaaagatttgcttgctcggaggatcctcctacacttagctagcgaaagtatcttttacgcgcatgagtcaagagttcgctaataggctgttctaattaatatatgttggttgagtgcatgctgctctttcgagtcctaacattaggatttataaacaaagtccaaaatatatccctggtgagaaaaaaagaacatatgtaatctgaaacgtaaccgagtacttgtgtaacatgtctaaagttgtatgacatggtttaaagatacgcccactggtggatccagaaaatttatttagtgggggcatagcttatacattttttttgttatttgtatgtttaagttttcattatactccaacaatatgaaaatattaaatttattacataaatatgaattttaaaaataaaaacaacaaaaatatagcatataccaaattcacacgtaaaataaagaggttatagctaaagaaaaaataaagaactaaaacttaagaaaagtaataaggcaaatgcgattacaatactatggcagtaaggaaatttagacttagtaaatgatgattgtggttaactacactaaaattttggaaatatatttaattttttatatattaagaagattataaatagtaaatgggggcaataaaatttggataatgggggcataaagaaagaattatccgaattgtacatcataattgtaatttttcttaagtaaaaacaaattatgtcaaattaagtgggcgcagctgccacctccccaatgtaagtagatccgccgctggatacgccttataattgtgtacgtacaaaggattacacgaacaaaacactacatgtttcatactcatacgacagactgagtacatagttgatttaggaaacatgggttttaactcaacatcatatcttaaaaccgacctgctccagcaaggattaggtcatgaaaaaaaaataaaaaaataaaggattagctcatgtacattctacaaatactctctctatatttttaacactaagatatatcgcaaaatatagtggtgcatttagaaagattaaaagaatttatttggttatccaaagtatgtttatcttttcctgtcaaatatggaatttcatatttatgcgtgtttgagctgaaataatttcatgattaataatctacaattaagtgatttttgatactgaataaatagaccaaacacataaaaatatcacgttgtgatttgtagggttagtagacaatactctaaagcctccaaagataacaaatgagcgttagacaagtgtgaggtccaatattggccgagaaaagattaaagatgtaggaaccaacggacgatgacggtctgggcgttacaacatccatcctttgagcccaatgccttccattacatgcatgtatgcgattatgtatgtataacagaattaaatcatcataatatagacacaagaaataaaattaatatattgtactagccgtggccgttacaagttggaatttgcgtataatagttgactaaaatagggaaaataattgccggaatccagttaggtaagaagtaaacactacaacaaacataaatcatgctgtaaacaccataatcataaacataagacctgatataatttaaagaagtatcaatttcattaatacgtcacaaattacacacatttgaacgcttcatagaattcaattaggtaagagccttggtcatacatgagcaaatctattaatattaagtatgatgaagttgcttttccaattttagaaaggtaacgaatgagaatgctaccacgtgaatgagcatactggaaaaaagaaatttaaaagtctttataggtttatttatttataaatccatatgtgatttaaaaattctcattaattttgaaatctgatatatgaattttaaactaatatggcaaacccacataattgaatctttatatattttactttcaaatctattaagaatttaatatgcaatttaaaatccaaaaataaatcattaaatggataacaaaggattttaactagtatttatcagtattcaaaaaattggtttaaacggtcgcttagatcatacgagtcattttgatgctgaagtgacgcctagacgaccgctttaaccttctaaagtcgcatctacatcgttttagtgtatttaccaattttgagctaagttttattttacatatacatatttataaatgttcatctattgttggatatttgtttaagatttaataattttatgtttctaagaaatatttatatatatattatatttattttttaatcttacaaacgcttaatcgtttaggcgttttaggaggtaaacattaggctgcttaacgtttctttgaatattaatatttagaaatcattgaatgtatataatgtgatttcactaaaattatttatgtgttagacaatcaatgctgtttttcttatatgatatggaatgattattactaactgttataagattaactatgatgaagatgatttttcaattttagaaaggtaacgaatgagaatgctaccacgtgaatgagaatgagcatactggaaaaagaaatttaaaagtccttcttggttcattgattaataaattcatatgtgatttaaaaattctaattaattttgactcatatttgaatatttctatttttactttaaaatctaatatcggttaaccacggttctacaaacccaaacagatatataatctcatttccttacaaaatttaaaccctatttctcatttgtagttataaaatctaaactctaacaatactttcgaaacccaaaccgatatttaacctcgtttaactgtaaaatctaaacataaattaataaaaccaaaccgatatttaaccttgtttaatcataaaatgtaaaccttagtttttttataaaccctaactgatatataattttgtgtcggtggcagattccgattgtcaggaataaagggggtgaatataatggtgatggggtgaatataagggtgatcggcgaacccttttttttttttttttaccttccagaaatgtatctttgccacatatgagtattttaccttatttcggttggttctaagttgttatcttaattgcacattctacctaaccaggacattggtcagttatactcaaactgtattgaacactttaatcaaacattagctcgtttattagtgaccaatggtttaaaggttctcagacttcaaaaaataccctaacttcttcataaaactaaccaaccccttagaccttagctcgacttaatcttacaaagttcaaaaatccgagagcaggttgttacaactgactatgtatgtctaggccacaaaataagtcttaattttttttttgggatccctcgtaaccattgtagtccttttaagtggcaaatatacctagtttttaatgaatttcggttgttaatctcggattggctcaagatctaccttggtaaccaagaaaaaagaggtgttcaaatagagtatctttattaatgttccaaacctttttacattgaaaagcaagaatttttttcttttatttttctgtttttggtcaagtaaaacaagaaagtaaatgaacttcttacattgaaaaatacaagaaggagataaatgaaaacagtataacacgggtgatgagcttcagatgtatggtcatcatcaaaggagcaaccgtatagccttggtgtagtgtgttagtgcccaaagagtgaaagagtttctaaaggttggaaaatttagcatcacattcattttgtaaacaccccttatttcctacaaaatcgaatgtacaaatgagcaataatatcacagtaaatttgaaattcttaaataaaattagggtaacaagaaacacacctgctgtggaaaatcaccgttatccatttgtgaattgattaatacttttgcagcgcggtgaaccggtaaaggatctctatccatctgaccacccattattagaaccatcaatgcttgtcctgtattcaccacatcggtcttgttcccctccaaaggaatataatttttgttggggcaagaaagaaaactctctccccaaccgccttcaccgttttgtatatcaagaaggaatcgaactgctctacggattgcctcacagttatcgtaagtgtttcccgcggccactaaacctcggacagcaaagaaagtcccatatataaaacatattccccagtttccgtaccacgaaccatccgcaatttgtaagctttctatgtatttcactccctttgttataaattttttgacttcttctgttctatgccctggaaactgtttcatgaagcgtgccaacaccactatcgctgaccccgtgcattctagatactcatgctcgaggatagtgtcttcaataaactctatgggactaagccactacaattgttttgaaatatttccatcacatcatttatatccaaaagaatttagaattcaataaatgataactacctctagccattttttcccactcgctgcttcccatatagatatccctccatttctgctctgttttgtgagataactataagttactaatcagcttgtgggggtgtttatgataattaacaagaataaaattacctgcatatagagaagcatattgacggcatcataaagcctctccacttccattttctcaccaatgaattcggatgacatactctcaaagatcaggcagcactagcaacacacgcgcattcaaaaatcaaattttcatatcttttttacacataaataaaatgtaaaatttattcggaaaaatatttttttacaaatagtgaagcgttttttttttttttttttttgaataccagaaggttctgggctgaatcccgtaattcctccaggtccgaaaccacaacatgtaatattagttgcgtcacaagcgcaagcgtttgtttatatcatgcaaatctttatatcagtaattcatagagaaaacacatacctctaaactctcagaaatacaatctgaaacaggccatccttgatctttgtctgaatagccccaccctcctttggatatgtctctaaacatattgatatagtcaccgggaggattctctgtaaattgggatttcctcaagtaagagtatccctttatgagcgttggccttatctcatcgtcaacatcagccgctaacatgacttggagaacgaaggctgtatcccatatttggctaccaaaagtctgcaaattatcgtaaaaaattaatgctattgaggttcatagtgtcgtcgtcaaaaaaaaaaaaagagactgacctggattttcaagccgtcctccgcaatccatatgaaatgagagactcgcgcaagatgttttttaaaataatcactctctggatcttcaacccaacaagcaagcatatgaaacacctaatatagttatataaacaatgtttcatcactgttttttggtcttctttcgttttcctctatttgatgtttatatcttttgacgaggacatgtagcttagtggtttgtgttaggatcgttgttatgttactatttggatacaaactcttaataaattgtgttaacacaaaaaaatgctaatattacctttggcactgctccacctgtaatgtaccgggtggcttcgtcatggtagtgaatgagttccattgccgttcgaatagctttttctctaatgagcttgttgaaaggccatcgatttaagatattctccgaaaacatgtgaacaagtttccaaaacaagtcttgtaccaatgattgtggataatatagatcttcctgcatcatattttactttgtaccaattaaatcttgattgtttaatttattatagagagttaataatcgtgatgtgctcatgagcatacaatgcataatatatatgatttaccttcgcacatcgactgcgagcttggctccaaacaatttcagcataaggttgaggataaagttcttcacgaagttgtagaatgagaggtgttggtttagcaacaaattttttaccatacaaataggacattgccatgaaagtatcccgtaaatatatccagagagtgcctacatgtataacaaaattaaattgtcggattaatagtggtttagtatttaggccggtactttaaaagagtcccacagttcaagccccgatctttttttttgtcaactgatattaattaagactcaacagagccaatcccgagggtactttaaaagactctcatagttcaagccccgattcatggccccacatttaaaaaaaaaacttaaaaataagaattattcgaattcaaacctccattaataggaaaataggaaggaaaaaaccagaactctgggggtatgggtttgcaaccagaccattcatatactccaagaacctaatagtttgagttgaaaatatttaattagggaaaatcacaacgaaaaccaagattgattatttggttggtaattatatatgcaacataccgaaagccaggcttttccaaataatggcgtataggtagcgccaccgtggtcaatgatccatttacgagcccttgcacaagcactttcaccatcatgatcgggatctactccgaagattcgtaggcagatgtagttgatgaccgtgcaaaacataaaactatggctttctacgtctattccccatccaccatcgtcgttcttgatggtaagatttgatcaattttggaaaagaatgggaaacattaaaatgatttggcaaactatggagaaattgaaaaaatataatggttgtgtataacttttagttgaaaatgtttgtgggatttgtttgtgtcatgcaaaatgtgtgttgttcttgtgtgttatttgcgtcaatgaggatcttgtgtatttggaattcatctcaaacatatacatatataaacactcttttcattcttctggtgatttattttttcatttttcatttcttttttttactatcttacggatcaacagaactatccatatatttcacactcaaaataaaagagatagtccattgtaaagatgcaattggcgaaacggtcttttctaaagaagctagagaaaacaacattttgggtcataaaaagaccaaaaatgtctttgatatatatatatttataatgatttgtacggttgtacctactgccaagttttgattaacccctacggtaaatgcatcactattactattaggttatcagtcaacacaccgataaaaattgccagcacaaattagcacttaaagtgagtatggacaaatgacaaatcattgaaagataatagtacagattcgtattgtttgtagttttgtacccctagtttggcaccaccatagctattgaattttattttaaacacacaaattattatttttccctacaaatgtatatattttattattcatcgtaaggtaaagataattcagatgtcttataaaatatatattaatatatatatatatatatatatatattacttattcacttatcagtgtgtcttgtaccaaaacatcatataattcggatcagagataatatgtgtacatgtttgacaagaaactataaaaaaatatctttatacagataaagtatttcctagttaagtatctccaatctctaagacatctacctataaatatttttctatatttataattctatctaatgaatctttaaagaataaaatatattgatcgtgagctaggtacctgatggttgtacatgtaacgcaacatctctttccgatgctcttcagagaaaactttatccagatggccagtgatatacaaacatataacctaaaattatttgcacacttggttattttttgtaattttctttaattagaaatttatttaagagtgtaatggagcgtccagcttacaaagggggcattgaagaaaatgcaaccagcgttttcggaaggccaatgtccatcatcagattgcaacgctgccatataatgtattcctcttctcagtgtattttttgcgtcttcaaatgttattttcttggcatcctctattctcactcgtggaatcttttgctcgaaattcttctcccttagaaacttttagataaaaaaaatattatgtgataccgtataggtagaccaatttacgcgcatgtgtttcactgtcaaagttttacctgcatacgccaaaggagatcggcacaagccttgtattgtgacctattgtttgagaaattttgtcgagcctgatcaacctcagagagttccgctggagagcctgcgttggcatcaaactcccatatctgccttcccaagaagttgttggtggtgcacaagtgagggtcatctcctgccttagctccgatcctcagcctccacattttgtaataactctcctagaaagaacaaacatattttgtgttaataatgtctatttccttgcacttatgtataccaggttatattccctaccacacacggggagagaaatttgattgttaaaaatacttcattgtgaaagtgatccatatccataatagttaaatgaacaaactgttttccataaaaatattcttaaattcagtatatctttagatgtacaattagttttatttttacttttaagatgataacttaacgcatattgatttaagaatttacaaagaactctcaatgatttttaaaagaatgattttattacattaacttgtgttgaattgtttttaagaaactattataactagtgtttggttgattgaacagtaaaaaatatttttggaaacttgtttatagataatgataaagcttagaaaaataattatttttaacctttagtaaatttttctattctagtggtaaatactgttattacacttgggaaaattttattttcctagattctgtttttattttattcggttgtaaaaaattataaactcgtagagaatatttggtattcaaaatttttatattctgcaattatttttaataaataaaattataaatagttcatgtcttaataacactagagtttaatataataataaaaaatgatgataagagagcttctgttgactacaaatacaagtttaaaaacaatcaaactccagatctcttaccctgctggcttgagcttggactagaaagcttctgtaagtatgaggttgtcttctggaattatgaaagaaatgtaacacacatgtacccatatatatacactaatgattgttcttattacataatattttaaattttatagtagatatctttcaaaagaatcaccagacttttcttatataatatttaaacttttatagatattttatataagaaaagcgacaataacaggtctaattctttaaatagctattattcaagatacgtaaacaaatccttaccaaaaataagaaaaaaataaaaaatattaggaaaaacccttaccgccaaaaagagaaaaaaataaaacgatttgaatatctcctctctgctgtctattaacatgagactgtctagcaatctttatcggcaccgtgagagggctcttcgattaatggtgtgcttcatgcgttttgatctcattttcttctatgtttcgttttcgaatatgaatttgttcgaggctcaccaatgattttttctgccttcaaccgatagatccactgctacccataatcgtttttactgttggtaccatagtaattagggtattttttaagcttcctccactaaaaaaccatacatatctggccgagatatgatgtgtctcgactctttcaaaccggacctagtctgatttaatatctccatcatcagttcacaccacatttggcgatttcaacctcttctactaagattctttcttgccgttttcaaattgcttaaaatctcgaattttcaagtctccaaaaaataagcgaataaaagacctgacgttcggatttgatggcatctgtttcccatagatgctaaaccaatttttgaccatgaccatgaaaaacacccggacaaataaagaacaaagaagcaaactaataatattagtagttttgttatgttttccgggttagggatttctcccttttatttttttctgtgctttgaaaatttggtttttgtatcacatttgctcggagtctcggacagtcatttttctcgtttattggacttttggtttaagtaaatcttattctcccgtcaacaactttatattaattgagaggcttcataagtcattatgggggaacaaatataatactggtagacacggacattatttgctaacgtatccgtttttatattagcattacgagaagcaaaagaaaaatacgagaatgttttcttacacttctcttcttattgcgtacgtcataaatgccggccactctattggtatagatgcaatgttcaccggatcagagctgtccgtgatgaaagcaacttcagtctcaagttcagcaattaagcatcgatatcttatcgttcacactaatgcttttaatttgatatgtaaacgagagagcctccagcaaagattataagctaccatgggttgtgcctcattgttgatgttcgcacaataccatcctaaacctgaataaggatgatgttcttttttttttctttttttttaatgtaatatcaaattatatttaaaagaaaaatatatatggttttacaacttgtgcttcggagatagagaagaagatcaaaaaactttggaaaatttcagcaaatgtttaaacaaaatttcagaagatcaacttgtgcttcggatgttcttttcatgaaccatcaataaatcaacgataacttttgaagtcactcctctcgagagatagtgcagtagtatcatgaggctcctagataacatctacttgtgccaagctccatgcaggctccatgtttgaggttcaccttccgaaggattccacgtggatccaaattgtcaaaaatcttatcattttgagatttctaatttaaatataccagagaatcgaaggaaaattctgaattttatctattttagtaatcggcagactaagtaataatgtatttaaacctatgcaaactctttgactttgttctccaaaggatttaaacctttgcctgatttgtctctggaagaaagtctcaatctttgccggctttgcacagtttctgttttagttccaataatgtatctccagtgaagacaaaaaaaaaaaacaaatacataaaaaaaaattagattaataaaatataacatgcaaacgtcacctattagctgtgcctgtgtcatagacatcaatcttgtacatataatatttttcgttttattatagagatttacttgaagtctttgtgcaaattattgactagatgtattttgtgtgtgtataattgttgattgagtagcgtccagtttataataataaataaccttttgattcaattgattcccttgactagtctaccagtctacctagagtaaagcatacataagaggattcattcgaatgaaaattatttgattttttaaaaaaggtataagcagaaggtgtgaaaccattttgaaaatgacaattcgaattagtaaaaaagtggcaaaatgaataagaaaattcgagttttcttttttttacaaccatgatcatgcattttgaatctaaatgtgagaagattagattcggttaagtctaataaaaatatagttgtagacaatcaaaccaagaatcaaccaagcattttgacactcgagccacaagatcaacacatggattttccgatttttcatggtgacacaagcaacatattaatattaataagagcattgaattcagggctaagcttggttatataaagatgataaatcattgtccctagtggaaatgcaacggaagcaaaaaagcatctagacttaatcctaaaatgcaaagaagagataaagtttctatgcttgtttttgtttttggaaagttgtcaaatctttttcttttgaagaacttctatgcaaataaactatacatattgcaaggctcgaaacaataaaattagacacaaataaaagcggttaaaaacacggtgagaaaagcgtttagagggtaaaacgtaaaacaactaattaacatgtacattgcccggtcgttaagacatataggtgaactatgtgatcggccgttcgttgaacaaggtcgttgcggacttgtcttgaggaatactacaatattagacatttagacccaaatgtattctgagaatgttgtggagaagttgactgttatgcaagtttatattttttcaagcatatcagaactagtattactatcctgaattttcatgagatattgttcttttgatcgaggctcatacgaacgtggcactatttttcttatttaaacaaaatcgttttttcttcaaaagcttaatttattttgctgtttgtttactctgtttgcttctttctgtttttgttttaacatgaaacaaagaattaagggtgaatgaaatatctatacctataagagcaaataattaaggatctatatatcatttcgttatttaggtgtaaattttcttgcaaattaaatatgacataattgtccctatacgaatagagaatcggtaggctctttccgctagatatattgtccgtataagaaagagacacaaagcatttaagtctcaggtgtgtacctatatatatatctccttatcatttttcaaaaaaaaaaacagtcgataacaaaacttttactatggcttttaaaacaggaaagaagatgttgctcataactttggattatcgataattttgagaatatcatgataatatacgaaatagcaggataaagaaatatttacatattatatttgttgatggtgtacgaagaaactagagtcgataaagtaggtgttattcgataaaaaagaaaaatgactgctaatcatacaattaatgtgttgcagggcggcaagtaagcgacgagggaaaagtttttttgacggcggaagatggaaggaggggactttttttttggactaggagggtttaaacaaatggtttcacttttgttatgaattagagttatcacctaatacaaatggtacgtacgttaaccttttgttaacggctaatatctgtttacatatagtgataataccttcataagttttgcatcaaagttaccacttaatacaaactggtatgttaatacttaggttatcggctaatatcataagttcttagtgatttcagatagtttcacttttgttatgaattagagttagcacctaatacaaatgttatgttaaccttttgttaatagctaatatctgtttacatatagtgataatacccttagaggtattaaaaatttaaattcataagttttgtatacgagttaccacctaatacaaactggtatgttaatacttggattaccggctaatatcataagttcatggtgatttcagatagtttcacttttgttatgaaatagcgttagcatctaataaatattacgttaacctttatctcttgtattgtgttttaataaagaaaaaaagagatacaattctccatataaaaagagaaatgatgatgacgattggtttccccaaaaattaataaataaataacaaaaaaatacaaaaaaccacatgcgaagaataataatgatctaacactatatatttcatacagtataaaaagatatttctgatatataaaagtacatgcgcaatttccacatacacaatattagttaaacagtggcttttttggacacttaaataacgactctttcgaatatagattctgcaatttcccaagaattaaaggaaacgaaaaactttagcgttatcaaggtgagtcttttaccgtaaaagtaaaaccagaaaatgattatgtgcaatgattccgctattcagctgttattttgacacaccgactatatatattattgaacatttttaacaaaataaaaaaactaaaaaaaaataatatcaataaatttaaaataaataaaagtttgtcaacgttagttatagtgtgaactgtagatttcgttttaagtatattctaccagccatggccagtgaacggtatcatgaaatgtgtgtaaagcagttgaccgaaatatactctgattgatatagtataactacttcgtgaattacgtgtttcatttaatatagttattggtttgtgactttgtgtgtttatatggagttacatggatttaaaattaatgaagattctattgttattctaataagtttttgaaagctttataagatttagtgttattagtttacatattagtaaaaaacaatctaaacattttacaagtttacctttattggattaattaatgattttataaaaccaatgatgttattacaataaaatactttttttatcctattaaaatattgtgttattggtttattgattctatattttattcttcacaaaatatgattatcaaagtatgagactatcatataagattctcaaaaaacatttctttcatagaacataaaagtaatatttttaagttgggatcatgtttcaatacgcaaactagtgatatgattaatgatttgctagtcattttctctaaaaaaatattaaattaatgacatcttaacatataaattttcaaagttcacttaagttagacccaattttacgtagtaaatgaaaagttagagatttaatttgcaacgcaaaatatgaaaaaataaatggtcattttcctctttttattcttatataaaatatttggcatcaaacaaaagattagtaaatagttaatataataaaaatcgtatgcaattttaaaatgactctacaaaagtatttttatattttagttataacatctaacaatttagaataatatgcaaaacgttttgacaattttacgaaaaactctttctaagggcttgattgattctccctctgccacccgcaaacgggatgtagcggttgttagcgattggcatcaatcatacaaactgctagataccgctttggaccgctcgaaatcgccagatttcaaaagctccttcccgcaaatgtttgcggttgcgggcggtagcggttagattaaaaaaaaattaagataatttttttgttagattaattaaaataattctagcttccacccaaactctagtcactatgattaaaataatctaatcttttatatatcttatttttattagaaaaccttaatcaatatattgtaaccctattctctcaattatgacatccctcaaatttatggcatctccccaaactgatgaaaatcaaaatcaagaatcaaacgtaagtatcatctatccttttatcgattcattagctagtgtaattatttgagtatttcatggcatcgttgttttttttttttgtattcttttgagtttttttattgaatacatgttttgattttttttctcaaattagaaaatcatttgggcacacgggatgatatattgtacttttattttttatcaatttttgagatgatatattgtatttttatttggtcagaaaatcagttttctaatattatcaatttattataataatatattgtatttttgtttcttttaataataatatattatatttaatatataattttaaaatcatcaaaactctacttaaaacttaaaagtgattataaagatccaacaatacatctttacctatgtgtgaattacatgtttagtttagagttttgtgcaaataaaccctcaaaaaattgccaaactttataattttatcctcaactttcaaaatatgcagaataatccaataaagtcaaaaaaaaagaaaaaaaaaatatagcttataaattataaacgttttcacttttcacagttacatacatttgtttttttaaattataaatgtagagtttgactcttggtcttgggtgcgactaatgtcttaacactgtcttctaaatttttttttaccattttgtctaatttcaataatttgaagaaggacctctcatactaaaattgataacatcctagtggaatctaatttccatctgacggtaaaaaatgctagataccgaatggtcatggctgcttcttggcattagtgattcattgtttgtgcaaatattttataaagccaacaatagtatgtaaaatagcctcacagcaaaatctaatttgctttggctgtggagaaagagagagagagtcttaatacgtctcatggctgattcttggagtgtctctcagtaaagttctttagcctggaaaacccttctatgagaagctcaagctcaactgcaaaggtgatacgtagccagttcttaagcccaacagcttgacctacaagaaactcatccattatctgttattttaacgacccctagctgtcaacttgttaacaaaactatataatattacctggtaggatgatcatagattcctctttagccagcttggagcagaagtccaaatcatcactgatatcttcgagtagtgaaaagtttaacttcacctgcaccaacaaatggattagcctctgagcttgagcttgaggttaaccaatgagtaatctggttcatgtcgattcattaccatcgtgaacattgagccctcgggtttgcaggggcaagtgatgcaaggaatcttcataagctcctcataacaaatctctgcacattttttcaccatttcaagttttgatgagaagaactcttcctttgtattcccaatgatatcaggcattgctccctgcctcggacaaaacaaaaccaaaatcatttttcttgaaaaactccagccgtgattcaacaccaatgcatacctgaataaacgttgcaggatccgtcgacatgttgacaacattgataagagtctgaacaaactaatagacaaaaagaaacagagattgatcacaaatacattcttgacaagatattaatcaactaaacaaaatgtaactactaaccccagaatctttcatgatgccatgagggtcaagagtcaccatccaaccaagtctccatccaggaacaaaccatcttttagatatagcacctaagacaataacaggcactagctctgcaaactctgccatggacacaaatggtttatccccaaaggcaaaatggtcatagacttcgtctgcgatcacaagtataccaagcttgcaagccgtctctgcaatcttcatccaccatataaagaagacaaatccataacaaagccatttccactatatcaaatgaatgattaataagaagcaagtgtacaccttttgaagatgttggcgagagaaaacattcccacatggattgcaagggttgataacaagtatagcaacggttttgtcatccgcaagagcttcaactccatctagatcaacatcccaaccattttccggtaggaggtcgaaataacgaacctcgagttggcaaaaagccgctcgggaatcgtacatcgggtaagtaggcctaggtagcagaatgttagctccaggaattgcgagagcggatatcaaaatctcaatggcttgcacacaaccagctgtgatatgaacatcatttggtgatatctggtaagagagatcactagagaggtactctgcaacagccctattgaggtagagaaacagaaccaaccaaatcatcaatcctttctcaaaaagccaatgtgatccaaagtatacactaatcaaagattttaaccaattcaacgtttcagattattgtctttgagtaatcaagaagcaagaacagagacccttagagataccaaaagaaaacaaaaaaaaaacgaagaagaagaagtaatcttacttcctagcgacaggaacaccggaagaagaagagtagttgttaaacttggtcgaacggacagcatcacagatggcttcaacagcggcttgatcggtacgaaagctcgggaacggagaaggatcgccgtgacctagtgggatgacgggtcttacatcaccaccgtcgagacaattgattaaggtgttaaggtaatcacgaatggtaagtgagttagatcgttcgacgacctcgttagctccgaagttccatcgcttggctccgttttctcccatttttttttttttaagaagagacgtgacaaaatgtgacaccgacgattttggttatgaatggtttgtgaatgggactggtgtggttgtcgttggtaaactatttcatttattttggtatgagagaaaacgccaaattttgtcatttaatttaagatatgtcttactcactgattttggagtttagggtatctttgtttttttctcttttttattttatttttgactacatgcaagtatgcaacactatctacaattctacataaatataattttttttaaaaagttagggttacgcataaatcgtttcataatagtattagagtgacagctccctcttggaacattacaaaggagaatagagaagagagaagagaagatccaaatcagacaagaagaagaagatccaaagcttctcaaaacgatgtcatcccatgtgacaaaatgagaatgggccaaactgaagtataaggcccaacaaagaagcaaatccatttagcccacagctccaacggtcaccagcaaatgaagacaaaaccaagacatgatcagctcaacaaaagcaaaagataaagagtgtgagctctaatagtacggactcgatggttttgaagaatagatttggtcatttggagctattgaattatttgttcactaaagtataagtctccatgaagcacaacttcgatgaaaatcaagtacccattgttacggaagatatcgaagttttattaccctcaatggtttttaatatggtttggtagggcttatggttagttttatgtttcgttttgtttaaaacaaaatgcggttttatttagatacaaacagacttgactcacaatcccacattgactgttggaattcaagattatgctataaaattgaacagtctagtaggagatgatttctatctaagtagagaaatataaaggaacaagcctatcctcagcattctaattggttacagcagaagccatggctaaggtgtacttatgcttaaggtaagctttgatgaaagggtccaagtcaccatccattacagatgtgatatcagaagtttcatgacctgttcggacatccttaacgagtttgtacggatgaaacacgtagttcctgatctgctgtccccattcagctttcactgcatctcctcttatttccttgatttcagtagcacgttgctcctccgcaatcaccatcagtttcgcttttagtctgatcagagctctcgtcttgttcgccagttgacttctctcctctgcaacatccaacgcgatcttaatcaactaccatagtcagttctgatgcattgataacacgatcttacgggacattcaggttgtaacattagtggggaggaaatacaaacctgtgcaacgaacagcaacaccagtagggatatgagtaatccgtacagcagtttcaaccttgttaacattctgtcctcctttcccacctgccctcgtgaaactaatgtcaaggtcctcttctggtatttcgattcccaccgcttcctcaggcaaaagcggcatcacttccacaccagaaaagcttgtctgcatgcaataccaatataaatccatagcacacaaccacatatgctttttgagctcatagaccttatttttacctggcgaagacctttcgaattgaaaggcgattgtcggacaatcctatgagttcctttctcccctgaaatgtaaccatatgcataacgcccttcaatttcaagagtcgctgacttaatccctgcctcttctccattagacatttcaacaactttcgtcttgtaccgctgcttctctccccatctcatatacatcctaagcaacatatcagcccaatcctgcactgaaagttatcattgttttaaaagaacctcaattcacatcacaaacacacacaaacctctaagagagtataataataacctgtgcatctgttcctccagctccagctgtaatgtaaacaacagcaccttctttgtcataaggtcctgataaaagctgagtaagctcaaatttatctaaagatttattcaactctttaatgattcccatggcttcttcaagtaaactaacatcagtagagtccatctcttctgttagtttaacaatcgtttcggcatcttcaacctatacctcaagcaacaacacattatctcaaagcctcaacatcataaacatataaaccttagatatgtaacaataccatcgttttgaactcagagagtaaccgcatacgatctttaagatcatttaaagacgataaagtttcttgagctttagtacgatcatcccaaaacgatgtatcagtagcttttgattccagatttgtaatctcttgttctagttgttgtaaattagcagaagctctaatctcttcaacacgagctgatgctatttctacatcttttctcaatgtataaaaatctaatcaccaatgaaacaaaagaaatcaaaaccctaagaattcagattcactgggaaatatgttgatagatcaatggtgataagaaggtaccttgcatcagccactcactggtttcgttttcgttggatacactcaagttactctcctgtgcagcgaatactactgaaacgaaattcggaagaaattggtttacacaaatttgaaatctaaaattgaagttggagcgagagggagagaagaacttactgggcgaattaaaacgagaggacgaagagaaattgggaagagaaagcgggagtgagagacggagaagagggaggtttgttggtcgaagaagcagaagtttaggttttccggcgattgcgaaactccgaccggcgaggggtccgagaacggtgagctccatggacatgtttctgctcaaagcttttcttcagatttctgacctttgccaagttatccatacaaagctagcagccacgtcatcagttttaagtataaaagttaaattgtggaatatatttaaaaattgggtttttaatggattaaagaaaagagattgacgaagatagtaatgaaaaaaataatttttcaaaaagtagtatatcttttaaaaaattccacaaatagtactacaagtttttattaaatactaaatataaataattaatttaattaaataaacaaaaaaaatatttttcgtcaaaacttttttaaaaaagtttccaccaaaacatttcccatcaaaaatattcttttttttttttggtcaaaacccaccaaaaatattcataaatattttttcaccaaaaaatatacatcaaatttttacaaaattcgagaatgatttgacagaattcaggaagaatttcggaaaaaaaattacgtgaaacccttcctgaatttagtgaaatccttcctaaatttcagaaaatgattatttgaatgattcgccaaaattcataaaaaaaaatctacaaatttcagggaagggtttcatgaaattcaggaaggattacagacaaaaaaaaattctaaatttcgtgaaaccttcctgaattgcttaaaatcattcctaaattttgtaaaacctttcttgaatttcttttttttggtggaaaaattttgacgaaattgtttttggcggaaaaatattgtcggaattttttttgaattttttctttaaggatttttttattaaaattagattaaaatttaatatgtttttttacacaagatttgggttactctagttttacagtttgattgagagttatttgagttattcttgttaggttttgagtcaatctgatataatttagataaaataattaagcaaatctcttgaaaccatacgagtccaaaacaaatcaaattattggattggttagttggtctttttttgtgtggacttttttgttttttgctgctttaaaaattgatccagatcattgaagatactctggttgcgttttgaatcaaatacaattatagagcaaaagattaatagtatataattatttttctatgatcgcaaaatgcgatgacgattatttagtaattttgtagtccgtttctaatagttatatagagttgagccttaaagacattgctaatcagaatctgaaatacgaaatggcaaacaagtacgtttcctctgttctgaagtcgctgcttgtgcttcttcaccttgtattcttgagtaagcaacatgttgactctgcctcaatcgtcaagtctcttcctggttttgaaggtcaacttccctttgagcttgaaaccgggtttgttttccatgtttttacttggttaaatccgtgttctgtgtttgcagataacctaaaagtatgttactgtttcttgtgaatgaaggtatattggtgttggtgaggaagaggaagtgcaactattctactacttcatcaagtctgagaggaacccaaaagaagaccctcttattctctggctaactggaggacctggctgctctgccatctctggccttctttttgaaaatggtgaaatcgaaaacattgataaactccttcttctgcgtctttgattagtcaattctatatatgtatataagcagggcctctaactatgaagcttgacgtttacaatggaactctcccttctttggtctctactacatattcttggacaaaggtaatacaaaaaaaagtgtgtattcttgatatatatgccgatcagcaaaacccaataatcaatatattcttgatcatcattttcctcagacttcaagcataatattcttggatcagcctgttggaactggcttttcctattcaagaactcaacaatttaataaacctagtgattcaggagaagccaaacggatccatgagtttcttcaaaaagtaaatggcaaatcttgatgcaacgtttctttgtgcatggacaaattagttaggatcctttttctatttttcttgttgttgttgtggtgtagtggctaggaaagcatcaagtgttttcctccaaccctttctatgttgccggagattcttattccggtttggttgttcccgctaccgttcaagaaatctcaaaaggtatatacactacatagttttacaatatcaatcccacaagcctttttctcaattaattattattattagattatgggcttccaactcaaaaccaattgacaataggtggagaggcccatatcttatatataccacttaagatcctactcaacttccgatgtgggacaatatccctaataattctaacaaaagaatcatgcatggtgatgcaggaaattatgaatgctgcaatcctccaataaatcttcagggctatgtgctcggtaacccgttaacagactatacaactggtagtaacagccgcattccatttgcccatggaatggcactgatatctgatgaactctacgaggttagaaacaatattagattttgcttttgtttcttgtccttacaaggaaaccggtttttttaaaaaaataccatttggttcgcagtcgttgaagaaaacctgtaaaggagaatatacaaatgttcatccacgtaacacacaatgcttgaaattcgttgaagaatttaataaggtttacacactcaagcgccttatttattttgtggttattaaagattcatgatcactaaattcagacactttttttttgtggttatttatttttagtgcacaaacagaatattccaacaacttatactagatccgttgtgcgaaactgaaactccagattgctatgtaagtaatctatatatctaaatgtcctctattagccgttaaacaatttggagaaacggaatttatatacttttgtagatttatcggtatttgctaactacctactgggccaatgacgcgactgtgcgcgaagctcttcaaatcaataaggtaccaaatttattttgaaggttcttggtaaaggaacagagtcattctgataggaggataaatatgattgcatgcatgcaggagagtataggggaatgggtacgatgttattacagtattccttacaataatgacattaaaagtagcatgccttaccatgtgaataacagcatcagtggttatcgttctctcatctacaggtgagagtttaacagttgttttgtccctaacaagattcaagactaaaatttttgcggtttttggtgaatagtggtgatcatgatttcgaagtaccttaccttggaactcaagcttggataagatctctcaactattcaattattgatgactggaggccatggatggtcaaaaatcaaatcgctgggtatataaatggattcttttttttgttgttgtttccctataggagactcactttgaaattcactcttgactctcttgcttggcagatacacaaggacttatgccaacaaaatgacatttgctactataaaagcaagtctttctttttttttaacctaatgttaaattatattcaaaagaaaaataacgtttatacaacgagtgcaacgaagtttgaaagttattagaatttaaaaggaatcaaaaatcaaaagttggatttaaattttgccccgaaccagaattgtaaacctttatcgtatcttcggtccccgcttgctctaatagcagagagtctttcttctttcctattttatctactcgattatttttaatttgcggtttttttacttgtattgagatgtgtgggttttgattatagggaggtgggcacacagcagagagtaaaccagaggaagcctctatcatgtttcaaaggtggatcaatggccaacctctctaaaagaggggaggacctgcctttacgtataacggacaagaaaatatgattctagtaacacatccaaatatatatgagaacccttggccctataaatgaatagaatttaaactcataatttgtaagcaacatgtgtgttgcttttcaacaagcttggtgtacagttgcatttcaccttctttttttttcaacaagcttgttttctatttgtttgaagcaaaagttaatttacatgtataaataagttaatttaaagttatatatattattatcactaaaatgtttaaactaaaagatcatttgtggaagctcccttgggccaatggttgaccaaaggttcattaatgcttctacagcaagacgtctggggttcgagtcccaactactgcgatttattagtagatttgcaaattaatggaggcaagtgtgcaggagatctacaacgatgtacaattatggatctaataagaaaaaaaaaaactaaaagatcattcagtagtatacttgattggatcaaggttgcgagattttaatatttttatccatgaaaaaatgtgacaacgttggtgaagaagccaaaactaaaagataagagtttggtaggcgacttttttgggttttagtataaagatgcagtaattgttttccgtaaagacattgctaaccagaatctgaaacagggaatggcaaacaactacgtttcctctgttctgaagtcgctgcttctgcttcttcatcttgtcttcttgattctgcttctatcgtcaattttcttcctggtttccctttgcgctcgaaaccgggtttgttttcaatctctttgtgtgattaaatctgtgttctgtgtttggagataatctaaaagacataggatattgtttcttgtggatgaaggtatattggtgctaatgaggaagaggaagtgcaactgttctactacttcatcaagtctgataggaatccaaaagaagaccctcttattctctggctaactggaggacctggctgctctgccatctctggccttctttttgagaatggtgaaatcgaaaacatcgaataaacttgttcttttgcgtctctgattactcgttgtaactcgatacatgtctatataagcagggcctctggctatgaagcttgatgtttacaatggaactcttccttttttggtctctactacatattcatggacaaaggtaatacaaaagtgtgtattcttgatatgacgatcagcaaaacccaatgatcaataattcttgatcatcattttcctcagacttcgagcataatattcttggatcagcccgttggaacggatcagccagtaagtataccccttgagagacacgctaaggtcagtaaaagagatatcccagtcgggagtgaagtcaaaaaccttccatgaatcagagttaaaattgtagatttcaaactcataaattcggtagttcgcgacggatccatcattaaatctcaagatcttgtggttacgaagtgagttgttcttcttgttctcgtatccgatagcgtacttgtcacaaaactgataaaaatttctaggtttgatccacctttgtttgcccaaaataagggttcgtaaccgcaagcttgatgtcatcgttggcgatgtataacaataacaataaaccattgcagtgaaaaatataagttggtatgagagcatagagataagacgtggttacatatggatcttatattttagagataaaagatctaaggaagcagaggatttattggtcacacgtattcaaggaagcttggaatccacaattgttttagctaagattttctatgggggaatttttagcaagtcagtcttgatgctgaaactgaaaagccatgaagttcttaagataaagtattatgaattggtggacaaaggatatcttcaaagatttaagattcgggtcgaatctttctaccctggagggactgatgcagcgcatctccaatatcgaatgcctcaagattcgaggatgaatcttctctaacccaaggagactgatgcagcgtcaccgatgatacatgggcttttatttttatttgggattttattgggtatatacgattatttcttttaattagggttttcgtttatgaacgtcttatataaggcgtatatgttgctttagtttgtgatgagctattgattgaataaagagttttaggagagctttgtgtaaagcctagagaagagtactctcaaccataagagcttgtgttcaagccctgcaaggagaacttgcaaaaccttgttgatatcgatcccttggaaccgatctcgaccttatccctattgcttcttcgtcaagtttcaacattctaaacaagatccgttcgtgaatccgagttcttctagagattttatgttctcgtccgttatttagcttccgctctctatcactatccctcaccgctctaacaactgctctctatcgacgttctcgaccgtgaccttcaaacactgtaacactttgttacaataaacccaagtttgtgtgccaacatggggagaatgggacattgaaaacacaacatgccaactcaagacgaaaacactttaacgagactgactaaaatgattaaagtatgcaattgtaaaagtgtaacaaataaaattgtggttgcagacttttgagaaagatgttggtaaagtagaagaaataacttgaccataacaacaaacatgtgctttcacaataaatgaaatcaacaaaaattcctaccctcagaagtaggtattcttgcaaattaagattgtcgacaaaaaatgatgcatgttgtatatatagctgattgcaaactttatgattttatgttgtggtatggctaaagcagatacgtgaaacaaaaatatgacctaattaacacttctctcttttcagctaattagcaaaggttaaagaaagcttcaaaggactaagttcaagatcgatgcattttactgtttcatacaaacgacaaggatatgtatttagatttgctatatcagcggccatgtatgttgagttatctgatataactatgatcgatatacatatcaataatcgaaaatataaaagtcttaaatagacaaacctagaaagaaagaaacgccctttgaagccagagagacatctatctaaaacataaataactcaaaaagatgtataaaagataaagaaacccaaaatacccgaaacagataatcctgccatcctttcccaccaagacaatgtgatgatgatgcatcactcgtgtagcttgcttgatttgcactgaacttggaacataagagcacacaagtgggtaacaatatttgtttgtagattctccaagatccacttgtttaaagtatccatcatttccaataatattagctatgtttcgtgtattcaacacatctttaccaagaaccacgacgacattcttcttctcgtcaatgaaaaaactcacattacaaaactgaaaagcagtgatc

SEQ ID NO: 773 - DNA, 76994 bp, Arabidopsis thaliana
agtggtatcatatcaaccgctaagaacaacttgttccatgagacctccttaggctcaatcttagtcgtaacccaaatctccatcctccataaatcgaagcgcttaatcaacaccgcaagctgttcttctctaacactagagagaatcacagtatcatcagaatgagagtgaaagggcaggtgaagacgcggtccaaatctctctgttgtaaagtcaaaacagatcaagaagtcaggaggatcatctattctttctcctcttatatttatctctctagcaaaccagtaagtgtttcccttgagagacacgccttgagaatacggtaattcccagtcacgagtgaaatagaaaacattccatgaagcagagttaaagttgtagatttcaaaccaataaatccggaagcagaaggattctttatgaaataacaacattttgttggtacgaagagagttgttcttcttcttctcgtatccgatagcgtacttgtcacaaaactggtaattagcttttctaggtttgatccaccttgtttgccctaaatgagggttcgtaaccacaagcttgatgccatcgtcggtgaagcctaacaataacagtaaaccattgcagtgaaaaattatatatgtattattgagtatgtcatcatcgtttaggctaatgagtttagctttatgcatgatagatgatttaatgttgttgtcgtcgttttctttgtgaattctatggagattgacgctcattaaataaaccttagaatccatcatcatgaccaccaaacactcattttcctttgttgttattgttttaccaaagagcttcctcgtaaagctatgatcgttggataaagtgttccagtttttgcaagtagagcttactgctcttatagattttaccggaaccctagagatgatctcctccaccaaatcatttggaagatcggacatcgccattgtcgtttctcaaagtttggtcctctttctctgactaggggattaccactggcgtggctttatatcaacaagattaatgttactaagatttttctcttaatcaatctcagtttttttttttttaaatgagtaatcttctatatcttaaaagtaattaaaaggggaaaactccttacaaaaaagcaagttatttaatattttttcacaaagcatagaacttttttttgtggcaagaaaaatacacatcaaacatttttcttttcttcttttcttcaattaacaatgtcatgtgttttttatatcaacaataaattaatctgtctatttacctgacaaatattaaataagtcggattttttttagaatattttcctaattaaaagtgtatttttgtttccaaacagacctcgcaagagagagctttacaaaatgatcattgacatacaagcagagaaaaaatttgttggtactcggatgataaggccgattgatagagactgttagatttggctttaaaggcttcgacttttaaaatttgagcttaagagaatttggctgtagaaactttgactgttaaaattgattggtagaacaaagttgtaaaagttgtgactgttattttattattatatattaatattaactatataaaaaaaaaattatgtaacaatataattttattaatgataaaatttaaaaatatacaaaaattcataaataaatgaatacataaatattctgaagaaataaactaaacatatattgttcatttattttttaataaccaaacattgcatttaaaagttagtctttaaaaataaaattattaattaataaaatctttatttaaaataaatgacaaatgtttagaatttttttttctaaataaacatatttattaatatttattgtttcataccaaaatttaatatccaaacacattagtaaataggataataatgaagcaattaataaaataattgaatgacatatgagaaatgtatatattattttaaaatacgaatttgtttttgttttgtgcaccaagaaaaaatactaattctataacttttttacactcaattaatggtaatgatgaaaaataaaataattattagtgaaatggatcttagaaaaaaggtagaaaattgataataattaatttattaaaagtattttgtgaaaaagtacatgtaaacttgtagagaagttttaattgttttggggagaagattaaaaaaaacttttaataatttattaggagaaaaaataagaaaaattgaaaatctagtttatgaggctttaaaaaagaaagagaataaagaagaaaaaataaaaaagactttgagaacttacaaaaaaaattaagtagaaaaagcctaattggcaaaaaaaaaagacttcagcctacttttaaagtcttgaaagtcagtagccaatcaccccttacaactacatgcaagaatacaattttggagtactttgttgcttcaacggtagtaaacctgtggcgaagtattggagagcaattagcagcaaacaaggatcaaagacttaacgatttgtcctgaatggtgcatcgaagaagacaaggcccatactgatatcgtatttgtaataccaactaccgatatcatatcactgacagcttcatcaaccatttcgatgataatgactaaagctgaaaagacatacgttaagcaacattggcccaaaccaacattgaccttaacactgtggttatttgccgagccacctcctaggcattcccattctagtgaatatagaaggttttggacttttgatgaacaaattatccgaaaacgttagtccaagcatgtattttctctaaataataaaaaaaaagcaaatcttttccaaacatatctatttaagcatcgttttctaagtgtcgaagttgtcaattttcaaaggagtgatgtcatcagcaactttgaaccctccaaccactcgggcaaagaacaccatctgttgctcaagtgtgtatttgatgttttccgcctgttaatcaatgtatataagtaaagtaatccactgttaatccttatgacttgttattattaatgcaagtgatcaaaagccttaccttgcgaaaaccgtgttgttctccttcgtactcgacaagagcaacaggcagaccttttttctttaatgcttcatagattttacgtgattgatctggagttacaacctgcaattttttcagcattttaaaccaatcgttaagaatttcgtatagaagtgaaagacattgtcttcgcaaatggataaccaaatctcgaatttaaaaactatcaagaatccagaatatgataaatctagttaagacttctgttactagatgcattcaagaactgccaacaaaacaaaagaataaaccaagagcggaaaatataagaaccttgtcttctagtccttggaaaaggatgatgggacaagagaacttatcgacgaaattgattggtgatctctcatagaaatctttttcatctcctgcaattacatactcaagaattttggtaaccgatttacaaaaacaaaaagcaaagataaatgctttcttcaatgcatttgactcaccaacaagattgtcgatataacgggattcaaatttatgaccttcttctttcaacatttttaaatcagccacctgcgttaagaaaagccaatccaaacttctatgaattatcagttgtttataaggtattcatcctgcatcatgcatttgaagagaattcggtggattgtgaaatagtatcacaatatataaagataaggctagaattcatttagctaaatgtttttcactgatgcaatgattctgtactcactccgtataaggacgctccagctttgaaaacatccctgaacgccaatgatgcaagagttgtgtaacctcctgcagaaccgccagatatacagagccgcttaacatctgccttgccagaagatacctgcccaaaccaaaaaagtttaggaaatgctttcaaagtcgttcacataaaataggcgaagaaagaacataccaagtatttagcacagccacaacagtcatcaacgtcgactattccccactgccttaacaaccgctctcgatactctcgaccataaccttcaaaataatgttacactttgtcacaataaacccacgtgtgtgcccacatggtgagaatgggacatcgtaaccaagaaatctcaagacgaaatactttagcaagactaactataaagatgaaaagatgcaaccgtacaactgtagcgaattatgggaacttgtaggtaaagtagaagaaacaacttggaaccataagaacaaacctgtgcttccaccataattgacatcaacaaatgcccaacctcgacttgtccagtattggatattcagatttaaggatccacgtgattcagcagtaggtcctcctgtagattcagattgtcaacaaaaatgatcgatgtgccatgcatagctgattgcaatatttatgttacagctaaagtacatacttgaaacgaaaacatgatcttaagatgaacaagactgaaactgaggaattattttgattaagttttgaaaaatcgggatgtcgtaagtttaacataccatgactcttcactaacaacggaggtttctcttccatgctagcattgtagagcggattggttggaggataaaagtatgcataagcgttctgaccaggaacctctgttggaaattcaatcaactctggcacgctgaagtaagccttgtacttcaaaacatcgggtgacgacgaccaaacaatctcagaactgagtgctttcgtcttatgctgatccagtgttacctgttgataggggaaattataaatctactgctactacttttatattagacaacttgtgctcagctaaaaccttaaataggaatcatttttaccctggcaactgatggtggaagaactgctgatgctccctcaacataaaggcactgatttcccaatgtctgaaaatggaagcacaatttctcattactttcagattcaattgggaatcaattgaaatggttttgcaaaaactacagaaaaataaatattacaatgctgtcaaaatccgttaaaggaatatcgagcagagaacatgatccctgtgaatcatctacaatgcctagatatgacttccctttctgcctgcattcaggaacaataaattgttatcaaaacaggtaaatcagaaaatggttgaaagtatttgaattttggtattacctatagctgcatgcaattaggttcttctcttcagaacactcgattatctcgtaggagttagtaccgaaaatccatagtggtttcgcaaactcaccgtcgagaggatatacagaaacaacctcattggtactctcaatctgtgacacatcgagaaagaggaaaaaattaaataaggaacaaggtagtcaacagtaaacatgtgtcctacattgggaatttctttgtgcaccaagtagatttaagaaaagcttcaagttggtggccacatatcagtctctacccaagagttctaagaacttagcaattaatacaactaacaaaacaaacagctaccatttgggatgtatatggtaagccaaaaacaaaactcaaacagtatgtgtctaatgtaacaaaactcaaacattatgtggctttttttttatagataattttgaaagaatgagactacaatcttctccgagaacaaaggtttgaattttaaaatctgtctagtgaagttcgtaaaaagccaagaaaaaatgtttcctctatgctttcataagtgactaaaaaactactatccctatttcaaatctaaaactaattctcagcattatagagcaaaagcacactatggaatttaccaaatgtggctataattggcaaatgtgaagaatgtttacccatttatgaatattccaacatccattctttctgtcagttacaaaaaagagttcccctgcacgataagtcagagagtctcaggtcaatggaacctatgagaaatactaaagcttgacaggcttaattacaatatgaaaaaatataatttattcaccaattttagagctccagtaaaacatctaatggtttggagaatgatacgtgaaggttcatatcagagaactatcatgatgacatccattaaaagactctagtttcagccaaggagtttttaatagctaaaaattataaagataagaagcatatgcaaggaatttgtagatcaacctttttctcagtaaaattcacagtccttgtcacttggttagaagaagaaagatgaatgcaaagagcggaaacaacaagagagcagagagaaaaagaatatcattttatggagaagaccctagtttcatccaaaacagaaaaaacttataagaaaagctcaactgctaaaagtatgaaacaaatagaaagtcagaaatccaaggtcagtgtctaagaactgcaaatcaatcttttcccagaggatttcacaatccttgtaattttctgcatatttttcatttaagacaaatacctcttgatgaccacttcggctcagtgggtgattcgacgtatttgggatcacaaccagcaacacatacgcgcttatcaatatttctgcagaagggtgtaactttgattaatatttgcaatatgcaaagcatttgaaaaaaattgcaaatgcttacccgccctcggaaatgtacccaacccacagctctgctttatcccatggcatattagggtgactccattcaatccatgccaatcgctcacacttgggatccaaccgtggaaatgcatagaaatcattgccacttacgagtacttttggttctggatctcaaatatcagaaagaacacatatgagtgtcaatgatcagctgtaataagttggaaacttagaaacatgtactacatggcactactgacataactcacatcccctatagactctttcaatgggagtaagaatacttctttcactaaagtttgataatctaccttcaagtgtctctccacttagattaacctccacgattgttgtaattgggtttgatctatcctggcgaccatctataaacaccagtcaaacaataacatgtaaatctcgataaaaacacaatcaaacatcaagagagtcaccaatactaaacactagagacaaaccaaccttccctaacagtaacataacggttaaagcgtgaatcaaagactccatctgcataagtaacagctggtgtaccataatctggagtaattggctttggagatgaatctacacacatcaaccatcaaaacaaacaacatcagaacttgccaacaagaaatttacatagctagaatcagtgaagaggttatctatcacctttatcagtaatgtcttgcttgtacaatcgctgatccttgtaattagagaacacaagtgtatcatctgatgaaatctggaaagcaccaccaccgtattcttgtgttaaagttctcacagcgaagtcttttggagtaatatcaattgatgtttctccttgtagcaccaaaactcctctccttcaatcatatcaagctcgcaatcaaattagggttttcattttcaaaatcaatcaaaagaagaagaagtaatacccggattcgttagggcgagactcgagcaagacgagacggccatgagaatcgacggcggtgccgccaagacgctttgaagctccggaaacgatgtcggcggtgattggagatttccaggagccataaggagcggtggttagaggagtctgagcagcgtcgggggaagaagaagacatggatgcgaaggagcgaagtggtttgagtgagaagcgattgaatcgtctgatcgaagaagagaaggaacgagaaaggaagagattgtgagcggaagaagaaggcaagcgagtgagtgagaatgagactaggtgattgagtgaggtcaacaacaacaatgccatttatttactcatccactctttgcttgttttcgctataggtttttgaattatatgtttttttgggtcatccaagtggccgcgatccgaacacttcaccagatcattcaatcggtaggagcaacggactgtttgtacaaagggcatggacgtagtcaacacgagctgatgactcgcgcttactaagaattcctcgttggaaaccaacaattacaatgatctatcctcattacgatgaaatttcaaaagttacccgggtctgtcggccaaagtgtgaactcgttgaatacattagtgtagcgcgcgtgtgactcagaacatttaaggacatcacagacctgttattgcctcaaacttccttggcctaaacggtcatagtccctctagaagccgtttacttttcttataatactcgattgcttttctataaatctgctagtaacacttattaaaaataattaagatagccataataatccatcaagattttacatgtagagagaatcattgatttgcattaacatgtcacacatcttttattcgtagtttcaacaattttaggaaataatcttatgtagaaatggacgagctttgcaaatagctttcaaaggaatcgctttgggtacagtattcccaactccttccttcatatccacttccacattcccaactctctcccattcaaagcattgtatcaatgacccgagagctagtcccacgattcgttgggccagacccgatccaggacacgctcttctacctaatccaaacgccagaagcttttgtgcttcctcttctttctcaaaccgctctggtttaaagctatccggatcatcccacgtgtttggatccctatgtatggcccatgcattcaccaacaacgttgtaccacgtggcatatcgtaggatcctatcttgcaatcttctgatgccatgtgtgggactagcaatggtgtagctgggtgtagcctaagggtctcaaggacaatgttctttagatatggtagctcgctaagatctgcttcttcgataagccggtctaaaccaacccggttatcgatttcgtctctcgctttagatattacgtcaggatggttaagcaaattggaaagtgcccattctagagtgactgctgatgtgttagtccctgctattaccattatctgcattaacataataacatcagacaatttatcttacttataatcaaagttaacaaaagatctaataattaatagaaaaaataaaggaagaagaaataaaccagtatgatgcctttgatgatttgatcagtgtaatactcaatatcagatttttggaggacaagcaaatgatcgatcattgtagtaccggtttcttgttgcccacgtttatcgtcaatgagaccttgtaaaaacttatctgtctcctctcctaactttttaaccctattttcataacttgaaaacagtctgaggatggggacgtagtcaacggcgttgcctgaactcgtgttagccccaacatctgctaccaacttacggacacgctttgcttcttcctcatcggttgtttcttcaccgtagtatcgttttccggtcatcattctcattatgttgttgaatgtcaagtccataagcattggtttcaattccacaacagtttttttggttcctgcaattattaaaagaaaaaggaaaatcgagaaccaaacgagaaccaaaaatagagtagtcgagcttttcttcattactttgtaaaatgtttttagaaatctctattctaaaaatattgacgtaaaacgttctaaaagtaaaagagttttaagaaatcttcatggtacgattgacgcccacaaagactcagtggtcaatataattagcacttaaataacaccaaaaaaaattgaaaagttgactagtctttatcaacaaacttcacgacgatgaaaaaaacacatgtgacaaaacttttctcattagtcattactatgtaacatattttaaatttttaataaaaactttattttcgtaatacgtacattttagtatttcgactttgcaaaagaaactcattctattcatcaattacggccaccacaagctatctcatccttattttcgtatcatcattatttcatataatcatatttcaattttttgtggtcactataacactaagataagacaaacataaatgaaaagtcaacgaatgatgaaagcacttgtagcatatacattaatacatatatacctgcgagacgagagaggcggcttataaggcgacgtacttcgtcggtacggacataaagaaagcagttaaggcggtgtgttgaaaagatctcgatagtgcagaggcgacggaggttacgccagtgatcaccgtaaggtgcagcgatcatgtttgtattgttataaccaacatgttttccgatgatcacctgtggccggttagctagaacgacgtcgttcttgccaaagcactcctctgccgcaaccttatgtgacgacaccacgtagactagacgggatccaagtcggagggacatcacgccgccaccatcgttgtggtcgagggtctcggagaaggagcggagggtgcggtggatgggtggcttcagaaggcggagatggcctattattggcaaccatcccggcggagacggtggaagattctgtttctttggttttaagaacttgaaagagattatcaagaagatgagagagaaaatggagtagagaacaactctaatgttggtttcttccatttgactgtttgcttcttcttttttttcttgtcctctttagtaaagttgtttatatgatgaagtttagaaaaatcaaaaatcaaaaagttggttatattattcgaatttcgacacgtttggtaattaggatttaataattaaaaataaggatcgtgacgggatgagactaaataagatgtatgaactttttttttttttcactaagtgttgtcttcttttagatcataattgtacaatagtagatctaccacttacagcttgaagacatacacataaaacaagtaaactaacaaccatggcatcagaaaccaacaaggttaaccatgttgtatactcaaaaagttacagagcgaacgtaaaaacactaactgcagccatatagtactctttaacccaaaaagtgttatgaaggccataccccttcgacgcattatttcagagcttggatatgcacttgttgaaaccaatgctgtcctaaaccaaaaagagttgacagaattagtagagtgcttatcttttctttggaggtttcagaatccctctcttcatgtgcgcttgatcttggtcattgtaaggtcctttctcctcttgacgtttccttgattcccttgtttcaaaccttcttgaagattggccaatttcataaacacgttgagttccagctgtgattgttgttcccactgatggagtgatattagaatctattgagacttgttgtccttgacagagaccatgttgactagtgcctctaccatggtggttaagtccttctcttgtagtaggaaaatacggatgcgctgcaacaaactttccatgattcaactgtggtgtagcaatccttggaggtggggtcataggaactggaaaggaattatcattcatttgagactgagaattcatactcgatctgaacctttcatcatggaagacaggtctttcccttccatagttaggtaagcgttgtcgatatggacaatagttcatgtgatgtgtaactctaaaacaactactgcatatcctccttagccgctcatattgaaacctgatgagagcagtttccccagaatcaaaaatgatgcgttggaaaaacctaagtctgtcagtgattccaaacctcactcggactcgaatataagcaatttgagtcgtggtggcatcatgaaagtccaaagtgatgatctctccaagttcttgagcaatctccaaagcagtctcctcacaaacatacagaataggaatgcccctcatctgcacccaaaggtctatggtagtcacaaaattaaaggcaggagcaggctcccatatatgagttgcaacaaaccaattattgaaaagtaagggttcccttctctgcacttgataacacgactttttatcccgttttagctattgttttcttatatttcagagagcatttgatgccattctagaaccaataagaggagaaacacgtattctaggtgccaagaaggtttttaagagttttgaacctaaaagtatcaaaaggtgatcattccagtacttcagaagtttagcatctgtctgaggtcttccctatcacggaaacgagatattttggtatgtatggaatgatagaagagtcaagattaacgtagaagtcgaatcaaaacaatctataaagccgtttggaagatatgacacaaagagtgaagacatgtcaagaaccggccgtttagaaataataagtccaaaaagcatctggccaaggagacttgaacctgggcagctccgagaaactcaccaccgaacactagttcacgcccaagtccttccctctttgcgccaccgtcattaggctcctttcctgaagcccactattcggcccgatcacttacttacccgggggaatgacgttcttacccctaaacctaattcctggccctcaagtataaatacttgttctaagccctaactctaggtgtgccttcatcacaaacgaaccctagccgtcgccgagagctgccaactcgcagctgcacctcttgaagcttgaagatcaccatctctctctttctcgttttgtgtaagactctttatatggaactttgcctcttgtattctacattcaaagaagtaatctctaaaccctttctaagttttattcatctttttgttatggtttactcaatccaacttttgattagctcctttgccatgagcgagtagatctctagttgggtttgagggggtttcaaaggggaattcatggggacttttagatcgaaagtctaggttggcggtttctatggctttgtttgatcgtttacactattctttctagttgagtttaatcttaatgcatgtatgtccagaacaccacctagtacatgatcttagatattttatacttgacagaatcttgtataattgcctgaaatagctcaactgaataaaaaactataaccgttgcacgcccgccgagtgatagggacttatggagtagaatcgaattttaacttaatgctttgatcttgtattttgaaaccatgtaagcacctactagccgttagggcaactgagtacacaagatataggtgagaatagccggctttcacctaccagccgttagggttagctggtcttgatagagtttcgtatgtccgagaatttggaagtaaacaaacctaaccatgttatcacctagattgagatctatatcctattgtttgaaccatgacatccggagaaaccctcgaaagcctaacgcttctctcttattgcttatcgtttagtttagttacttgtcttttattttggtttattgcatacaacaaccccctctctttttatttggtcctagcttcactctcttcttaaggatttctctgaactacttctctccttgtggattcaatcctaaagtactactcctatatactgtgcatttgcagtagtcgtgtggtctttcaggtaaaagcttgaggtgaaataaaacacgcatcaacactgtaagtaaatcaacctcattctggaacaagaactgaacataagtagcatcaagaattctaccatggacacgcgatgtcaatctccaagatctaggaagagcagcaatgatagaattaagattctaagctcgtggattaagacgcctagcaatcaagctaagctagtttcgatcttccaccataacatacgcttcatgaggaatggacagagccggatcctcctgaccaagctccaggttttgaattttatcccaaagctcatctcccatgatatttcaagtagaaaagagaaacaagaaagggatggactcttaaaaactataaacgattaactatatataagacatcacaaagacgtagacctaaagtaatttaaaagataaagtagacctaaccaaagtaaatattaattgccaaatcgacctctaagaaatttaaaaattaaaaagcagacaaaacaaaaataaccgacttcttaaaaaaaactcaaaaaaatgaaaaaaataaaacctatgacaatgcaaacctactaaaggaccatcctaatctgattacctccacctacagaattattcttttcatccacctattagaaatctgccatgtttagatcagttcaaacctcttaatactacttgttacaaacctgcaactcaatcagaggtagacctcaaataccctgttgctgagtcatttctgcttcaaacagacttctcaaccattggggaaagctccgtgctatataagattgccacctcattccaatgatgacactcttatctatttcaaacgcaccagtgttacactgagcagattccatcatcataaaccagtttggtttatctttggtaaagcttaataattatgcgatatgactaatcatcaatggccattctttaggtttatttaaagctttaataatatcatgggatgaggctccaaaggtgactttatcaaaatgcagatgattcatactctccaatgctcattcccaacttttaagttttgcatcaaaaagggattgtacctgagaataagatcttctactgtgaagcaagaccttccccatagagtctcaaaccaccaacgatgtaccaacaacttgcttctgtttagacaaagcaacaccaatgttgcatttaagttcatccacttgaggaggataccatttctgaacacctgtatttatctaagaagtcccatttccttgagcattgacccattgagtactatcctcataagctctatcagcaatgcttctagttgtagatcatgtaccttcaaacaaaactttattcatgtttttccataacacccacattatccatgaattgactgttctcatttgtctagaaattctcatgttctgggaattgtgaatcacatgatctatgttagtgaaaatagaactcccgaaacctgttgcatgggattgaatgagagaaagagcccaaacttgtctagcaaaagggaattgaaacaacacctgattaattgtttctatttcctcattgcaaagtaaatacccatcatcaatctgaattcctcgtgttcttaagatgtcttctactgcaagtgcaccttttaaaactttccacagaaataccctaatttttggagccctttcaagagaccaaatcttatcatacagaggattaacagaaggacaaacttcaacctctttaaaaaggtcatggtaggtctctctgctacttctagtataccctgacttcactatgtataacccaaaattagtcccaacacaacaaaaagaatcttcattagtgaggacatgtctttgttgcaaaatgagctgaatgtttgtcctaggaaataaatctctgagcattttcaaattccaattcctggtaagaggatcaataagctgacttactttcaactgaatatctatcaatgaatgaatattcattggtctcctattttgaccgtttaacagccacttatcaacccacacatttgtctgctcaccattccctataattcttttcagccctcctctaagtaattccctagcatataatatacttctccaagcatatgtgggtatagttccttgaggtgcattgaggaaatctgtattcaagaagtacctggttttgagtatttgagaaagcaggctgttagaatcattaagtaacctctaagcttgtttggccaacaacgcctgattcaagcacttctagtctttaaaaccaaactctcctaaacttttaggaagaatttttttttgaccccaatctaatgaattttctgtgacgattccattgagttccaccagaaatccatcataacacttgaaagcttagtgcataaactttttggcagcttgaaacaagtcatataatatacactggcaaggccatagcaatggattttaacaaaatctccttaccacctttggagaaagttttagcataccaaccagtcattcttgattgcattgtcgctttgatgaaccccagtaaatcctgtttagaaccactcaagttctcaggtaatcccaagtacttcccagtcccaccttctaactgaatacttgatctattcttaatccactgtttggtatcctcctccaccttagctctaaaagtgattgcagatttctctacattaatcagttgacctgatatatgtccatactgtgataaacatctcataagctcttcacaatccgcttttgttgctctacacactatgaaggtgtcattagcaaacaataaatgattaattgtaggaccacaaccattaaactgaataccacagactttgtatttactctcagcttgatgcagaatatgaaccagagcctaagtgcataacacaaataataaaggtgagattggatcaccctagcggatacctctttctggcttaataagatcaaatggctgaccatttatcaaaactgaatacgagacagaggtcacaccccattatccaagaaaccatttattattaaaactcatggcagtcaaaattcctttcaaaaagggtcattctaccctatcataagctttcgacatataagttttaaaagccataaaccctttgaaaatcttaggattggttcgtaaactatgcacaatttcatgtgcaatacgaatgttgtcagaaactaacatttcagcaacaaatacagattatgaaggggaaacaatggctggaatatgtttcttcagtctgaaagataagaattttgagactatcttatagaggactgaacataagctatttggtctgatatctgacattctttgaggattagtaatctttgggatcaaacataagtgagtgtgattccactcttcaggaagaaccccagtttggcataaatccctaatttctgcagtgatttgatccttgaccaattcccaattttttctgaaaaaataaggcagtaaatccatcagatcctggagcactttcaacattaatggagaagacaacattaaagattactttttttgtgacttcttgagttaaatcttgattcatatcttcagaaactcggtgacaaaagccttccaaaacagactccagattagcagaaaaagaatatgtaaacagattctcaaaatagtcagctgttatcttgcctttctctttgtttagcgtatgttccttgccattctcatctaccaaaaaactcatgaattttttgctctctgagctttcaccatagcttggaaaaactttgagtttctatcacctccaaaaaaccatttgtctctactctttaatctccaaaaagattgttcttctctaaaaacaacacccaaatgagcttgaatatctgaaattttagcccaacatagatactgctcactttttcttcatccaagtcttttcttaacctcaaaatcctgctctgagcattataatcactatgctctttccatctactaatggctttcctacaattgaccaaacgtagcatagaagaaaaaacacctgaagatataccaccattccaagagctaagaacaacggctgcacaatgaggatcctctacaaaatgtttatcaaaacaaaactgacctctaatcatctcttgatcattcacaaatgtaaccataacaggtctatgaacagatcccaatctctcaaggaaccattgatgagaatttgggaacagatcaaaccactccaagttcccaaaacatctatccaatttacattgtatccattgagcatttcaagttcctccccaagtaaaaccattacccgtacttcccaattgatgcatgtcacaattaagcaccatatccttgaaaggctgaaaagaggctagcaacctagaaggtccccctaacttctctttgttagacaaaatgtcattgaaatcaccaatcatacaccaagcctcatttctcactaaaccaatactgcttaacttctctaacaagagagatctgagatgcaacacatggttctcataaacacaagaaacaaaccaacttttactttacttccttgagacacttttaaatccaagagattcttatcttcaaaaaggaattcaatctctatataatttttccaaaaatagctaatccaccactctttccaacattttctattgtgttaaagtaatcatagcctagccatctaaatactttcagaataaactgatcagaattcatggtttccatgagaaataaaatatccgggaaatactattttttcattttcttaaggtgtcgaattgtccaaggattccccaaaccttggcaattccaacttaagatgtcttattgatattgcgatggttcactaggaaccaccgtattatcatctctcttaagacattttgaggattcagttccaggcccttgatttttccttttgtaagtaatgtcaaacttaggattaatactcacctccttatcagttgcatccatggaaggcactgcattctttcttatcgctaaagctcctcttcctaggatttttctatttgatactcaaacctgaagaacaagcttgatcaatagagttaaagcccgacgagaaatccagattaagataatcagaacagggctaccccatagtgacttgcaacatttgtgattgatgtgcctgtgagagtatcctttcaattcatcaggtaacataataaactttggtgagcgtgaaggagaaatcataggagcttgaactactacatttttctgtttaaacacacctccagaaatctctttctcatttttatctgcctgggtatcattaaaatccattcccaccaagggattaataagctgatcaaccatcactctctcaggtaaacacttctttaaactcgcactaggaagttgcagacttccttgttgacggctgggacagtcaaatttgtcatgagtaaatatttggcaaaagaaacatctctttcgaatacgctcataatcaaaagtaactgaaaccacttcacctataggtacttgcacttccttagagttacgcaatggatttcgaacatcaaaaagcacttgaactctcacataatcttgagcttgagatttctccaaatctaactccacctttaacagctccccaacacaagcagcaatttccttaatcgtctctttcgtataatcattgacaggaatattgcaaagccgaacccaagatcgtttctgctttcatatataggtgtatgaactttaaaatagtcatatgtaaatatatcgttacccttatattattgatactaaaatttaacccgcggtacatcgcggggttatatttgtttttaaaatgtaatatttttgtttaaaagattaactgaagatatatcatattaatttgtatttttaaatgaagatatctatctatgtattacttagtatatgattactattttttaggtttcaatttttgaagtatatatacgaaaacatatatatttttaatacatttaaatttttgaatattttgtgtataaggttgtataattgtattttgattggtaattttaggatttcatctgtgatatacctttctttattaatatcgatcaaaaattgtcattccatataaatctgtctatattatctcgttagctaaattattagtgttataaaatctaagaaaataaattattattattataaatttaataattttaggatctcacccgtggtatatcgtcccttgaatgattttaaatttatactactaatatagattttaaatttatcatataaagtatatgatttcaagtttttgtgttttttatttaaataaagcaacggtttaaatgatgatagatttagttctttttcttgtatgtgtatatgaattttgtgtgaatattttaattattataaattagtatttttactgctatacaaaatgttaatataaatacttgctataaatcagatttatgcatattttgtgaagtaaaattcacagattgttttttgaagatatatgaaaaaattgtgtagagatttttagaaacaaattaggcaagatattgtttggttaatatattttttaaattttgtaaaactaaataataaatgtcaatgacatttcttgtaaataagtctcaactacatgatttatttcacaaaatgactgtaaaaatgtatatgtagattatttaataacataacttattatttagtaaattaagagagactttttgttaagaccctcttatctcattttctctcgcttttttttccaattttgtttttttgatatatctgatctgctgattcgattatttttgagaaataaacattccaacctcggagttaggtaatatggtagtctaacacctagtgacatatttggaaatgttggaaagtctccaataaaactccattgaaattcatgtaacttaatgtgacatattaataatgtagagaataacgatagtcgtcatatctacggtttggatcggatttactcttgcaaacagtaaaccattatcgcttatttcggatagccaataattttaagataaaaacttgtcgctaagaagtaacatgtgccacgctttagatgggtgctcttcctagatcttttttttgggtaggatttatggtctcagtcctacagcattagcaagggtaataatttttcataagaataaaaaaaagttgtgcttaatttcaacaattctacaacgttctaatcaaaagggccaatgcaaatgaatgaagagccggtttgtgggaagaagatggggttaagtttaggatcttagccgaaaaagcagtctaatacttagtttaatgttggattgaatttgcacaaaaaaaaaaatgttggattgaaaggtttggagagacaagtcattggccagagtggggttggaactctattgcataattttaaggattgttttgttgtatatgtgtactccgtaatatgaagatgcaaattcaaccctaaaataacatttacattccacataatctatatatacatttttgcagtacttttttgagaaaatgtttgaaatctgagctttaattcatcaattaattcaaatgggtgggttttactcggtttaattacgttcggatcttggataacgttaattcttgaaataaattaccattttctaccaaaaaatagtgaaaaacgaaattaattaattatctaatttaatatatataatatttctacactaaccatatattttatttacctaaactaattttctaaaacatttctacctaattttaacataaatatatgattcttctttcatttttatttgatctaatatttaatttattttgaatttatataaaatacatatagttaataaaatattatatttttctgtatataatatgattcaaattttttaaaatggacatatattattcatctatgaaaaataatatgtgtataatatcccacatcgctttaaaaaattagacaatagtttagagtcatactataaaaaaggccaaaatgattatgcctacgaatgaacaagaaacttgagttctcaaacgtccaaactaaaagtgttcggtttaatccggttctttatttcaaagaatggaaacttttaaaaagtttcaaaatattataaatatttaacctttattaaagtgaaatattctaactatttcaaatattatttttttaataaagtttcaaagattataatatctaaaatttataattgttaaataagaagtttaaacattataaatatttaaattatattacgggtgaactcctagaattgatgggtttaggtcgataataataagagactgtgtattgcgggtgaaaacctaaaattagtgatcaaaatataattatacaatctttaacactacacaaaacaaacaatattaccaaaacaaatacaacttttttaaaacgcatctcgattcttttatagaaagtttaaacattataaatatttaaaatttatattacaggtgaaatcttagaattaacggatttgggtcgataataatatggcatgttataatatgtgtacaaatttagaattaacaataaaaaaattcaaaatataaatatacaatcttaaacaataaacaaaacaaacaatattaacaaaacaaatacaacttaaatttgttttttaaagaaacacatctcgattttttgtaagaagtttatacattataatatttattttataatacgggtgaaatcctagaattgacggatttgggtcgatattaatacatgattgtatattacgggtgaaattaacaatcaaatacaattatacaattttaaacactaaacaaaacaaaaaaatattaataaaacaaatacaacttattatttcaaaattttagttaaaaaatatcgtctcgcggtataccatatacttaaattaaaccaaataaaaacatatatttataaatcatcttaataataaatattctattttttaataaaaatataggcccacggtataccgcgagttaatatctagttataaacaaaattgcacatttattttgtaaatcattttatcatacacgttgatatacccacttatacaattccaaaatatcgaatgtagcacttctgaaccacataaaaatattttaacaattgaaatacatttagactggttctcattgccaactgttggggtgttcttaagcctgtaagcccaaagagtgtatagagtcaatacatgaacctttctaaaaaggaattaatagagaatcgaactttttatttgtttcccaaaagtgttaccctctagagaatcgaacttataacatctgtacaatactaaaatgaaatacgtataccatgtttaggttgaaccagttggcgaattaatttcttggaaaaattacatataccgggtccaaaccgtattttgctataggtttaggcattcggttattcagtgtagttcggttcgaatttttactagtagtttcaaaaagtatattccaaatagaaccgaatttgatttgaattggtttggtttcggttagtcgaatgtctctcttgagtaaaagatatttttactagtagtttcaaaaagtatattccaaatagaatcgaatttgatttgaattggtttggtttcggttttttctttcagaagtattggagtgtgatcaaagatcaagtgatatctgaagttaataagttctttgattcggggattattcctgaggaatggaatcatacccacctttgtctaatccttaaggtccatccgcctcagagaatgattgacttaagaccaataagtctttgttctgttctttataagattgtggcaaagattctagtgaataggctaaagaagcatttgtctctgattgtgtctcctactcaagccgcttttgtctcagacagaatgatatctgataatgttttgatagcgcatgaagctatacacagtctgaaatctcatcctgttttttctaactcatcgatggttgttaaaactgacatgtcaaaggcctacgacagagttgaatggtcttttctcagagaaatgctacaactactagggttcaataatatatggatttcttggataatgggatgtgtgacatctgttacatactcaatcttgattaatggccaaccttttggttttatcagacctgaaagaggtattcgccaaggagatcctctctcccctttcttgtttgtgttatgcacagaagctttgattcatctgtttgatcaatctactagagcaggctccttatctggaattcagtttcatccttcagggccagtaattaacaatctgctgtttgctgatgacagcctctttatgtgtaatgctgataaagatcagagtttggagatgttgaactgtttagataagtatgagaaaatctctggtcaaaaaatcaacaaatcgaaatcagcaatcactttcggattaaaaattgatgaggctacaaagaagtggattaaagatacaactgagattcaaacagaaggaggaacagggaaatatctaggattcccagagtgttttagtggatctaagcaggaacttttggattatattaaagtcagattgaaggatagactaacaggatggtttgcaaaaaatctatctcaaggaggtaaagaagtccttattaaatccgtggctatggctctccctgtgtatgcaatgagctgtttcaaattaccaaagacttctatcaagaacttaacaagtgcaattatggagttctggtggagcaattcaaaggatcacaaaaaaattcactggttggggactgaaaaaatgactttacctaaaacacttggtggctttggatttaaagatctggaaattttcaatcaggctcttttggcaaagcaagcttggaggctattacatgagcccaattgtcttttttcaagattcttcaagagcaggtactttgtgaattctccatttatagatgcgtctgttggaagtaaaacatcctatgcgtggagaagtattttgtctggtagggatcttttaattaaaggactgaaaagaatcattgggaatggaaaagagacattggtatggattgataagtggatccatgatggaataaacaggagacccacaggaattcaatccctccaaaacattagacttcgagttgatgctctgattaatatggaaacgggatgttggaatacgaatctgttgagagctttatttcatcatactgatgttaggattattcaagcatcaaagccagtagttgggagatcagatttcttttgctggacagaaactaggaatgatatctattcgattagatcaggatatgatttagcttacaaatttcatcatttagatcagattacagaagctacaaatcgcccttcaaggaccacaattgtagaggcctgctggaagattcccactgttccaaaaattcaggtgtttctatggaaactactaagaggtgcactggctgttacagaacgtttgaagacaaaaggaattcagagttatgatggttgttggttttgtgatgcagatttggaaacaattaatcatatgttgtttctatgtccatatgcaagacaagtttgggctttgtctaatattccatcaccacagacaggtttttgcaagtcagattatgagaatttccattatttgatgagtttgcaatcacaacaaaaggatattgcagaaatttcaaaggtttttccttgggttttatggcgcttgtggaaaaataggaatcagctattgtttgaaggatctttttttccgccaaatgaattgattataaaagcaagggaggatgctactgaatggtttacagctcaagaagctcgagaatcacctatgagaaagcctaacctcagccatgatttccggaaacctccagttcagggagaatttaaatgcaacattggatattcttggtccaagttgcataggcttgcgggtgtatcttgggtacttagagattctctgagtaatgtagttctccacagtcgtcgatcttattctcaagttgtgtccttgtttgaagctaagatcaagagctaggaatgggcagttgagagtatgaagagtttacatgttcaaaaagtgatttttggagccactacaatggagataatcaaagccctgcataaacctaaggattggccatcaataataagtcacattctcccaatgctagttatggctgatggaatgactgattggttcattttatttgaacctaatgggtgcaacaaaggagcctataaaatagccaagagtgttacctctgacataagagtgaactcttatgtagctcaaagctatcctagatggatgaaagatttcttcattaaggagaaatgtattgtcgatagtattaggtcctaagttttttttagttttaagttaggagttgtaattatagagtgtattttattaggttctaggtccttctttttatttattccagtaattttctagttagatagatttttaaagagattacttcgcaatgatagaaaaaaaacaaaaagatttagtccttctagacttaagcggtggattaatgtttatagtcttttctggggtttgaatctttgactttagctttcttacaattaaggtttctccttctcgtaattgatcctagagtatataaattaggaagtctgctttctcttagtcctgtatctttaagctttcataattaggaaaaaaaaaaaaaaaaagagagaaggggtagcgatgagtgatgaattgtggaacgccatacaacatatggatttaggtcgtgaggagcctgaactttatatcccatatcatgcttatgttggagcgttggcttctaacagattaagtctccttggaagaattctaaatcctcaaactcaaagcgttgaaagagctatcttggagctaccttatcagtggggacttggaactcaggtacatggacgcatccttgacgacagatgttttcaagttcgttttcgctcggagatagatctacttaatgggctaagaagagcgccttgggtttttaatgaatggtttattgcacttcagagatgggaagactttcctacagaggatttccttacctttatagatgtttgggttcatattagaggaattcctttaccatatgtgtcagaaaggacagttgagatcattgctagtactttaggagaggttgtggctatggatttcaatgaagaaactacatcgcagataacctttattcgtgttaaggttagaatggatttcactgagccactacgtttctttcgaagagtacggtttgcatctagagaaagagccatgattggctttgagtatgagaagcttcagcgagtttgcaccaactgctgtcgagtgaatcatcaagtcagtcattgcccgtatgttgtgcatcaggaggagatggataatgaaccagatgttttggtctctccagagaggtatgatgatgaagacagtctcaatcaagaagatcacgggagacactcacaaagttctgttatctcatcgttttcatccttaactccaatatcactgaatgcgcctcctgttgtaaactggaatgataacatgataggcaacatacctcatagattcccatcaacttcagtctcatcttctcacactgtttcagatggttaccttgcagcttcggaatggagacctaaagatcaagttagctatgaggttggtgagagttcaaagagaaagaaagggaagcaagtattagaagtgcctgaacgcagcatccgacagagacgaatgggatccgggataaggttttacccggtgaatggtgaaaatccttaaactctaacatgaaggttaataagagagtagtatcgagtttctactctaaggacacttcttttgagaatcaagtttcagtttggtaccttaggtaataatgatccactttgaacaatagggtggagtgtgacataattttttgaagaacactgatagtaagaagctgacaaaggaagatgtggacaacatcttttgatcttccttgattactttttggatcttgtagtactaataatctactggaagaaaggctgggttttgaagattctggaatcaagaaatgaagatgaactgcggacaaatcagtttatgtctgaagactaagacacatccttaatttcattagttattagtaggtacaactgatgtaatatgaagtttttaaggttgcagtttgtttgtactaaatactctgtttctccaaaatggttctctattattggaagacgctgctaatgttatatataatatggttatgttggaaaaaaaaaagtaaaagatatttatgagtaggtgaataaggggtaaaagagtcatttagtcatatacggtgttatctctagtactagtctctacttatagcgtcgagacgaaactctctttttgacagcatagcctccttacttcatcttcctctcattttatctttcttcttcacactctctcggatacttttttgtgcttcgacaaaagctctcagatccacagagtcagaggctcgtctcttctttgatcttggtttatgaggtaacaagaatctccactctctctcgtaaatctcttcttctttggattttgggtaatggattatattctcgattctttctgaagaaatctttgaatttgttcgtagtaggaagattttgttcttattttcttcttgggctatgagattacgtttgatgtttgttacctttcatggcctcattgcgattgattgaattcgatttatgatgattagggatttgtgtaaaaaaattcggattcgccgatgtaacaatttcgggttcttcttataattggaattgaattagactgaattaagttagtttttttgccgttcaatattatttgcgaaatgtgtgttttcgatttctagggtttctcatgattgggactaacgaatgtatcaatttgctaaaattttttgtcttcgtttgttctgcagctcgaaggagaaacccactctcgggttagtgatacctcttctttttgagtttttactaggacaaattttgatgttgttagcatttctttgtatacttagaagctattcttatgtacgtgcagaggtacgcggattaagacccgcaaacggaatattgctgctcctctggaccctgcagccttttctgatgcagtggtccagatttaccatgataatgctggtgatctggtaggattggtgtctagaatttttatgtcatgctttgatctggagatgtgtttgcacttaacttatattacgcttgtttgcttggtttaggaacttgttgccaaaagtattgagtcatcagaccttaatttcacaagatatggtgacatcttctttgaggtgagtttacaactaaactttgtggacatgttcttggtgatcttttatttggacctttttcaggacctttttcttgcttatttctttcatgtttacattgatactgtactccgattcccttattcttagttaagcagaatttacttacagctgtgttgtttcaactgtcttgcaaagccttagaatcacttctttgtgtatttaatcacattgtgtatgcgtgggatacgacttcttttttctttgacaagaggggtttacgcttctagaattgtgcactgtcttctcctgtgatttctgatgtccacttgtatagaagaatacgtgttcaatctgttgaacctgtaatatctatttacctgtatattctgcagtgtaaatggttctgtagaaatattcctggatatttttcttcttcttgttattgtggttctgttttcttctattcaaggggtgtttgtgttataatttcttatgccttctactggttttgtttggtttgccctttttagttatgaattttgattgagagatcttgtgttttaaggttattttcataggaggacgcacacaacctggaacagtgaaatctgatgaaggagaacgtcatacttactctgtaattgattgtgaacccaagcgtgaagccattttgccatctgttgtctacatacagaaaattctgcgtaggaagcctttcctcataaagaaccttgaaaatgttactcggagattcctgcagtcactggagctttttgaggaaaatgaaaggaagaagcttgctatcttcacagcacttgccttttcccagaagctctcaggattacctccggaaactgtcttccagccattgctcaaggataatcttgttgccaaagggatagtgctctccttcgtaacagacttcttcaaggagtatttggttgagaacagtcttgaagacttgatttctattctgaggcgtgggaaaatggaagacaaccttatggatttcctaccaccagtaaggcgatctgctgaaagttttgcggaacatttcacgtgagtttctctttgcagttttttttggttatttgtctctatgaagttttttgcattcagttatatttctaccttgttagtaacatgtttttattgcatagaagaaaaagctgcatgaataatttaaatcggtgtcactgccgttgtccacattagtttagtataattgcatttaaaagtgtacagcattctgtttagctaacctaactgtaagaatgtatgaaagattttgcgcgtcagctattttaaagtatttcattcattattatttgacttctatatgtctataaggattttgtttgtcaactatcaaaattcatctcttcattaatcaatcataaagtacagattctgctgctaatgctattttcctctttcgtctgcctttgcattccatgtttgcattcttttttttctgtgtggtgcgtttgtaaattaattgaaaataacgtgtttacttctgggatttttaggaatgaaggattgactgatctagtagagtaccattcaaagaaaatgtttgaggtgaaactgagggaaatcaaaaccgttcttacaagcaaggtcacagaggaaagtaatgtagacgaagtcattgaatcggtgaagcaacagatcaaagatgctaagttacctgacattgaggttgtgcgtgttgtttgggatggtttaatggatgctgttcagtggtctggaaaaaaccagcagcaaaatgcaaattctgttctgcgccaggtaagattttatagatatgatgagccaaccattcaatttatatctgtcatgtcatataagagttccatatgtagtgtgttactccacaaactgcgaaagactttcgtgctaatattagttggtagtcatgatttgtgtagaatcaaaaaaagaagtgggagtcatgaataatgaatcactaatgcaaatcgcttttgatgtcatattagcgttgaaataatatgtgatccctcttatggtcactttatctcttgatgtttgatctgtgtaggtgaaaacatgggctccacttctgaacacgttctgtaccagcggaaagctagagctggaactgatgtacaaagtccaaatgcaatgctatgaggatgcaaagcttatgaaagttttcccagaagtagtgaggtcgctctatgaactcgatgtcctcgctgaagacaccattctccactggttccgtaaaggaaccaactcaaagggcaggtgtgcatttagttccatgacatattataacaacttcattacgaaagcttttcttttatatcatagctaaaaagtatgaaagcactctcttgatgttttcttgtggtgaatgtttgcaggcaaacctttgtgaaaagtttagagccatttgtgaattggcttgaagaggcggaggaagaagagtgagtgatctatgtttctaataaacaagccatgaagacgataataattcagggtttcttctatgtttcacttttgcttatgagctttactctgctttgtattttggcaataagtatttgatattgttgtgcttcttttttttttctttttggttttgatgactgtctctgtttccccagaacggttttggattcttttgcaaatggatttaggcaaatgcaaattctgctttatttattgttaattcgatttttacttttactcaacacttcaagttatcagtttagcatcatgcattgatgcaatgtgagaaaagtatcttctactatggacccatttggtttcctttggaccaagacactcctatatggcattttatccaggtataaggggggaggttttcactttttctgctcaagagccaacacatcgaaattagacttatcaacagatctatcttggacctgaaacaattgctgaacttcttccccaaccttgtttataagttcagaagctagctccactttttcttcaaatacaaatccattcaaagatttccaaacaatcagtgaaaaattctactaatctcaataggaatggaagggttcttggctacgtgaatataaggagaaagaactaaagccatttttgggactggaatcaaggacaaagcccaaacttgtctagccaaggtacacggatccgcataaatgtttataaacaattttgtagcttagaagttagaagctatatagtgttgcaaaaccaaatcagcaaaaaaagaaacttttcagaagattcatcgtaatatttggataaaagactccatttttggtcaactgatggattttatattaacatcaaaagccattagaaaagagactgaagaaaaactacagagccaagaaaagctacagcaacaaaccaagaaaatacatacaactaagacaaggttaactactagacagagttgagagaaagaaaccataaacaaaatccgaaacagatagccaaaaatctaacccaagagctgttccagatgctattccacctgcaactagagaatgcagaatcccaaaaattgttgacagaagtctatagattgatactatctaaattggaaaaagacttaaaagtcaataaaattaatggcttagtaattagtcaatgcacatgcactgcaataattgaaggatccttgttagatgccatatttatcctgaaaaaaacaaagaaaatttatacgtgaataataacatgatagaaaggaaagaactgaagagctcaaagcacaaaatgtagaaagagagatagagactacctgtgaggaattggggcaatcacgagcaatatgtccttttcctttacattcgtagcataaacggcgagtctctctgccctttgaagtgcttttgctcgatgaattcagtgagataaacccttcttccctactgatttcttgaaagcatacactggaagaatcagggcactgatgctcaaaatgcccttcttcttcttccctagtgttttcttgaaagcgtacgctcgaagaatcagggccttgacactcatcttcactactgtcttctggaaagcatacactgaaagaattatggcactgatgctcaaaatgcccttctctcccacagataaagcatgatggactaaccgaatcatcgtagtgtctaccacatgcctaaagagaaaatatattataaattctgcatcttttttcagagactcgaactcaatcaacagtgtagagtaattccaaatcaaaatctttaacaacttaccagtccagtatgacctagttgaccacatctgtagcaagatacagtccatgactgtgtatgaccaggttcaatacaacataaatgccctaagctattacagacatagcatttgatattctggtcaaagtaaatttgttcatgatcaatgataaaacaacaccacaagcaaagtactgaatttcaggaggagacaagagagagttaccttcaaatcttcatgagagtactcatacttgcacaaggtcatgtcatgtccaaatcctccacatcttaaacatacttctgcttcatcatcattatgtctcggcatgattaagggatcacaaaccctagaaatcggattgggtagcttaatcatgtcaaggtttcgaatgatttggttctgaagtttcgaatacggtgctaagatgagtgttagggttgtgataatttatttttatgtttttaattgcaatttttattaattaatgtgcatatatttcattagatttgaaaatactgattgcggatatttaaatttatgaattactgtttgttcataattatcatttttttggtgtaggaaaatattacattatattaactgttttcttaatttttgtgaaactccaaaagattaatcttttaagaacataagtagtatagtgcatgggaactttgtctgattgtgtttctttttttattttaaagttgtatgaagaatggaatatttctgtgaagttcatatatatttggtttcgatttgaggactaaattttttggtaataatatctttttacttcattgatatacgataatatctaatcttgtaacaaaaaacttaagaaacctcgattataaatcaaaccaatgcaaataagaaacatcatttacaagtttgaattactgatatgatgatcttacgtttcgttgagaagatttgttcagaattcactaaattataaattgtattgtagaagaaaatattttatgatttataacaacattatcaatatggtggtttataacgtataacatactacacttatgaaagcaggacgagacgagatgagatgagaacgggacttcccaaaaaaacactaaactctaaatatcttcaaatataatgaacttccggtgataactcaacaaaaaccggtgacaactcgacgaaaactagaaaaagatttatcaaaaatttgacgaaacttatgatagttatatttcaatttctaactgcaatacactattcacttgctttattcgacggtttgagatatggtggttgtaatttatgtttgatttgtagcgtgcataccgatatacaaatgttaataatgttctatacatgtttacatatatacaaaatatacatgtttacacatatatatatatatatatatatatatatgttaataacgttctatatatgtgtttacatgcatacaaatattaataacgatatatgtgtttacatgtatacaaatattaataacattatctatatgtgtatttagatccaataatttaacactataattatttttagtgcttcatatatgtgtttacatgtgtacaaatgttaaaatcgtataatatatgccggaagtgttttaaaatttctcaaatttgagaaaacaataattaatgttaagtctcgccgttactagtcaactcgttctttctcactgcatgtacgccattcatctgtcgaacattaaatgcccgtcaacacgtttcttctctcaccaaagaaatcacatgaacatatttcacgggcaagatagaagcaaaatcttgttttatacacgtttcttttttcaccaaagaagtcacatgaacatatttcacgcgtaagacagaagcaaaagcttgttttatagtaactattttgaaacccaagtctgtatgtaacgtttatttttctttctttttcgacaaatctcctattgtcttttacctgaatacatatcctaattttgtttctaagcaaaacgttccaaaaaataactaaaactcttcgaatctaataaaagctaagtaacccaacaaaaccaaaagaacaattaaataaacaattaggctaaagaataccgctaaagaataccattgcttcattgcacgctcaaatttttaatgtaaactaacgatttttctatgaaatgatgacttcaattatatttttagaattttcaaaaacaaatgtatgtgatcgtgaaaacgattataatatatgtaaagttgcaaatatgggttatattgcgtattattttatacttcataggataattttgcattttttgaatgtggagagtaaaattgcaaaaataggcaactttaaaggtttttatttttttgcacaaaatcatattttcaaatttattaatttctggtgacaactcaacaaaaactaatcacaactcgacaaaattagtaaaaatccatcgaaaatttgacgaaccttatgataatgatatttcaatttctcactgcaatgcattgttcactagctctattcgacggtttgagatatagtggttgtaatttatgtttgatttgtagcatgcatacaaatatacaaatgttgataacgttctatatacatgtttacataataaagtgctatatacatgtttacattacatatatacaaatgctaataacgctcaatatatttacatatattatatatatccaaatgtaataactttctacatatctgtttatatacatacaaatgttaataaccctctatgtgtagttacatgtatacaaatcttaataatgttatctatatgtgtatatacatatatatatatatagtttaatgctttttatatgtgtttatatgtgtacaaatgttaaaatcgtgtagtatatgtcggaagtgtgttaaaaatttctcaaatttgagaaaacaataattaatgttaagtttcaccgttactaagtcaactcaatctttcttgctgtatgagcatcattcatttgtcgagcattaaatgcccgtcaacacgtttcttctctcacccatgaaatcacgtgaacatatttcacgcgcaagacagaagaaaaacttgttttatagtaactatttcgaaaccccaatctgtatgtaacgtctgtttttcttttttcttcgacaaatctcctattgtcttttacctgaatacatattgtaattttgtctcgaagcaaaacgttctaaaaaataactgaaacttttcaaatctaataaaagctaagtaacccaacaaaccaagtgaacaatcaaataatcaattaggctaaagagtactattgctttattgcaccctcaaaaattattaggatgatgagaatgtaatatatcctatatatgctaaatcaccaagtgcatgtttaagtttattaaacataatctactaatataaacttctattaagaataaaatatttagttgatcaaataataagtatctccatacaaattccagctgtaaaaaataaaattaggaaaacgaaatactaaaataataaagtttggagatatatagaagaaaaagaaaacagagcgccattatcggtgaaagctgtggttgttccttgaaatccgattctgattccttccttttggatccgattctatctccaccttcaagcacaatattcgactcggtactctctctttcttcttcttattgcaaaaagattctctttttatctgttttgtggatatagagattctggataaaaacaatcatcttttttctctcaaaaatctctgcttaagaactgggattcttcaaaagctcttctcttgtctgatttcttctgaatttcccctctaagtctctccaattcttctccattagctataaagtcgattcctttatcaccgttctgaagaatttggtcgaaagttttggcctttagtacccaattttcaatcctggcgataactgaattgaaaagggttccaaaagttacatcacctgaaaacaacagtgcttttgattgtgttggtggtttggagtgcttgataagtttaatcagggcccttgatatggggtcctgcttatcatcatctggaggtggaggaagcaggagatctctccatggctctcctcatgttcctggtcctgggaggaggaagaggcctcccaagaggagacctgggtcttgtagttcttcgtttgataacaccgaggagccacttcttcataggatccctggaaggatgtttttgaatggctctacagacaccgtgtctctcttctctcaacagggcaagaaaggacctaatcaggacgctatgattgtttgggaggttagtttggaaattataccacatttgttgcttaggctacctatagtttagagatggattacaccaagtatagatctttagtaatcttggttgttatatgtttttcaacgtttcagaattttgggtctatggaggacactgtgttttgtggtgtttttgatggtcatggtccgtatggtcacattgttgcaaagagagtgagggatttgcttccactcaagttaggttctcatttggagtcctatgtgtcccctgaggaggttcttaaagagattagccttaacactgatgatagaaagatctcagaagaccttgtacatatatctgccaatggagaatcacgagtctacaataaggattatgtgaaggatcaagatatgattcaaatgctaataggctcaattgttaaagcctacagattcatggataaggaattgaagatgcaagttgatgttgattgtttttgcagtggaacaactgcagttaccatggttaagcaggtacttgaaccaaaatgttctgatgttgtttctcactttgttgcaataaatcatatgtgtttgttttgattgtttgtttgttttcgggttttcggtagggtcaacatcttgttatcgggaatatcggggattcaagagcagtattgggtgtgaggaacaaagacaataaacttgttccttttcaattaactgaagatctcaaaccagatgttccaggtaatctacttggcctctacaagccttttttggttataccatctgatttatcaattaaagattgagttttgttgtttccagctgaagcagaaaggataaagagatgcagaggacgtatatttgctcttcgagatgaaccgggagttgcccgtctgtggcttcctaaccacaactcacctggtctagccatggcacgtgcttttggagatttttgcctcaaagacttcggtctaatttctgtacctgacgtctcctaccgacgcctcactgagaaggatgaatttgttgtcttggcaactgatggggtaagaaacatccaagctcaatgtcagaataagtgtggactagtgagctcattctcttaagaactttggatatatgtgttatggacgtagcaacctatactcttctagctgttaagtacatttttctctcttaaaaatttgctagatttgggatgcattgacgaatgaagaggttgtaaagatagtagcgaaagctccaacgcgttcctcagcaggtcgagcattggtggaggctgcagtgcgtaactggagatggaagttcccgacttcaaaagtcgatgactgtgccgtagtttgcctattccttgactccgaaccaaacagattgtcaactgcttctttctcaaaagaaaaacacatcaacaatggcgttactgaacctgaaccagacacagcatcatcatcaactccagactcaggaaccggatcgcctgagctcaatggagtcaacagaatcgatacacttgtgaatctcccagtatatgtcccaaccaaagagtaggaagatagaacagagccaggagctcaatgtctcctatgctctatgtttctatcaacagttactgttttggtcatttacctcgggtaaaattactgttacacgcccgtgctcgtgtgtgactcattgtatatatcttctttttcaaatcattgtaatacttttgctacagactctctttactttgttaataaatttctgatgctccaattgagtttttcgtagcacttgtttgagcaaattttgtttgttggaaaaagaacacatcaagccttttgagtaacgccattatggtttgagtaaacactcattagtatttgtagttagtgttacattatatggcaatgttagtgttagtacactgagtatggacataacagtttgtcatttttggcattttactttacttttgtcaaatttcagttacattacaataacattgcaaaactagttagtacttcttttctggttgccaaacataacatcacaaaatagttacgtagatgtttttagtccttacgtaaattacaaagacttaagagttaagaccaaaagagtacatatatatatctttgggagtatacaacaaagaatgagtaagttgtctatgtaaagttacatgacccaaaaagccaaaccacacccacaaaggatcaaatgaatcaaaacccaaaccatctccttgttagcaaaactatgaagtaaaagaatggaaaacccaaattagtatggacaataacgttacaagtgttccgttcataaccgaagaagccgccgatatgagattttctgctccgagttggtaagccgctcctgatccatctttgactttgatgcttgacgaacctaacgaaacaaaacatttttggtgtgtttgacttcttctttgatcatccatcgtcatttaactagttcttgagttttagagacttacagttgtggtcagcccatccaatgacctcattctccaaatcgtatactactaacttgtttgaaagcaccaaatctatagatgaagaaaccaaatctcaagtcagacacatgaagtgtaatacatggtttagtagtatgatatgaattttacctcccaaaaggattacatcagctccgtcctgagtcgtcattccaccagattgccaaccaaagcaatacatgtcttcctgtttaagaaaatcattacattgtgcatgagacaattcatgaaggttgacaataacaccatctataactatgttgttcaaatctattgatcaaaactcagttaaagtaggaatattctgttgaactaaacacatcaaagtaggaagcgactgacttacacgaagtgagaaaagatagtcatgcggatacacactcagtttcagtgagtcttcgaaatgaagattgaccacgggaaacgctttatctgtgctgcaagtacaagaaagatagtttagcatcgcacatagtacaacaaaaaaactcacaacatgtaatgatccagatccatgtactcaagcttctttgcactagtatgtcagacttttgcgcgatttgcgttatccgcgatgaagtaatatatagcgacccttggtatcgagaaacgaagaatgattgagatatagaggctaggaaaaggaagcaagtcatcttactttgaagtgaaactgaaacaggcaaaagtttcctgtaccatgtgtagtttcacctgttgtttagcagtaatctatatacagaaaaattaccatgtcagggttttgagaataaacaagaaagccaagtaatgaaaaagagtttcaccttttcgattagtgagttatacaaattctgtggtaagtatgctaaagttgtaccactatcgattatcgttcctccatcaccgttagtactagctagacttggtggaaggtcaatagggtcaccatccacatccattccctttaaaatgacattgtaatgtaccctaaaaaacattggagaaagttattacaagaaacaatatataattatatgaatgactagagatggtctcacttactgattaggaactataggagttgttttcactactggtgattccacttcaccaacagcaaaaatcccacctccattcatattatccaaacaatgtgaaaatattctctttgtactccccccggcagctagttgcgaaatgatcgaggtatttgattgtccgaagcccataataccgtcaaccgctgagtcggtttgtccaagctgccctgactgattttttccacacctgtctcaaagagggatccttatgatgaagcagcattcactacccgaatacatcaaaagtgtaccgctatactacttacccgaatacaacttcctgcgcaagtggcgcggttcgaagatttccagtcacttgttctaaagtaatgttatcctttataaaatctccatcacttgtacttccatctccatacactacatgataactacatggcttctttgccccacaagtctcggattgcataatgaacgaacagaaatcatcttcacagccaacattcttcgatgtcgaagaagttttagagtcatataatgataacggtatctacacagcaaccaaacatacatctaagattccaaaatgtaacacttcttaacacaaagtttcggtaaacacgggttataaagaagcatacaccgagatcagttttcacaggacacttgggacatggtgcacaattaacccaaagtatatcacttcctgtatcaacttgaacataatattcctttggtggtgacccaagcttgattttggtgaagtataaactgcaaacaaatcaatcaaatgaaagtctcattagtacatacattaaatgttttggaaccaaattttgacaagtggcatttaatcgctaaattacagcgattttagaaaaagatatcatatctcgcctccgcaaattagtttcatgtttaattccgcttaacatagcgttttataacgccgttttactcgcaatttctaatcctatttttcgaaatatttgattctacaaattttgaaaaatgacttttaatcgccttaattacagtgattttagaaatcatatctcgcctccgcgaattcttttccggtttaattccgcttatcaaaacgtttgataacaccattttactcgcaatttctaatcctattttttcgaaatttttgattgtacaaattttgacaagtgagttttaattgctgaactacagtgattatagaaatcatatctcgcctccgcgaattcatttcgtgtttaattccgcttatcaaaatgttttataacaccgttttactcgcaatttctgatcctattttttttgaaatttatgattctacaaattttgacaagtgacttttaattgctaaattacaacgattttaaaaatcatacctcgcctccgcgaattcatttccggtttaattccgcttataaaaaattttcttatcccatgattttttcaaaattttcaatcctacaaaatgtaactattgcattctcctagtttcaacgactaaaataagcaacacgatccaatctagaaatagcaaatgaagagggatctaaagagacaaacccgatggagtcggcgcgactatcgccaccgagaggaagatcgatattcgcaagcatacgagcgtgacggaagctgtcgtgagatttgagctcagacaattgtttctcttttccggcgaacttatgcgtcacattaaacacgaaattcccagaaacaacttggatcaccaaaacgaaaaccaccgcaacaatgcgtgaaattctactcggatccatcgtcgtcaccatcaatgtcttcactgtcaagaaattatattatctctccgatccaaatctccgggaaaatcaaaattgagatttgtttgaaatggtgaatcgaattgaattgaaattcatttggaattttaaaaaagagttttatgtatttctgatgatgagaattgagtttgaaagataaaccaaagaaagcaacagaggaagagagggagacatgggaacgagaagagagggaaacgcaagagaaagcgacgcgttttcaacggtgattttttagcttttttgttttgttttttgttttttttgtcttttgttggtattttttaattgtttattcattatttgaccaataggaaaaagaggtaataacaaaattaacttttaaactacagtaaaatttctataaatcaataatattggaatccaacaagatattttatgactttatagtggtaaatattacttttagataaattgatatttattagcttgcaaatagctttatttagttgttaatttttttttgtttttttttttgttttatataaaaactatcggttgatccggtaaacttcgatagagacgcaccgaagtgcttcacagtaaacatcttcctgaaagcccaccacactgtatgtcccaagtttagagtgtttttcaagttatttcaaggagtagttagaccgcctgcattctaactaccatataaactaattaaatcaaatcacaaatgacagacttctgaaacaaatgtgtttttgtttccaaagataatcgaatttggtttaggaatttcaccatttactaaaacttcccctactactagactacaaatgcttgagtgttaattttttttttcttcaaaatatgtattaaacaaatttaatataaacaaaattaataattataatgttatgatttttttggttttagacttgaacatgtgatgtttagaagaagaaaactatgtttcctacaataaataacaaagattatatatgaaattgcatattttaattgtaattttttatataattaattgagtgaaatatgtgtgagtaacactaatgataaatctgtaaatattcgacgaaatccatattctttctatgtagaggacaatttgggtctcgtttgatgatataggaggtatgagatcatctcccgagttagatagaacgaatgatggagtcttattcggacacttgccattgggatctatagaatactagtaggcagcccgtgctttgcacgggaaaataacaatatccatagtatagtattttgtttctttgaaatctacaactattacactaatgatgaatgtcacagcctcacaaaatacaatttgtttagttttattttatcgaaatacattgattggatgtattacacattgctctgtaactctcaatagaagtccttctcaacttcacccaaatcgtgatatatatatatatatgtatgtgtgtgtcaaaatcaaagaaactttcattagaaacaacaaagtatcttacataaatacactaactgtctcaggcatagaaaaaaaaagagaaagagtagatgaagaaaacaaaagatatacggagctattttttcttctccaaaagcttaacaataataatgatggagaaatgaataaccttcgaatcaaaacgcttttaaaacttgaacatataagaaggtttcacattaaaatcattttgcagactacatcgtggaagaagatgtcaaatcatgccacccatctctcaaattggttttcttcttttgaattgaaacccccaaaacatttgcatccattttgtttctatacgattctcgcaaactcatgtggtcattttgtcgagcagggtgcatagaaaatgtaaaaagataagaccaagtaaatcgcaacaaatagccaaagttttaatgatattcatatcagcgattaggtggaccaaactcaacgtgtcgtggggagttaacatcgtccatcacattaggcatcacaaaagtctcaactttcattgtttatgtcatctttttgtttctctgttatacaaattttgaagaaagaatggacgatctaaagttataagaaaggagagaagaagaagaacatgaacctgtttttatttttgtaaaagaggcttatacggttgccatttagatcgtaatttaactggcaaagggattgaaagatgggagagaaagtgaagaatcttaagatcgtggaaggagcagttgctaaaaaagtggtcagacttttatttattttttgtcaaaaaaaattgtgttgaaaaataatagtagaaagcagtgaattgttttacgaatgtgaaagaccaaaattttaaacttaatcatacgtggcaaaaggagagacttgcagttttgggaaaagtgactgttgatttagtataactagattagatatcatgcaataaggcaataagacatatctgctgatagcatggtatgttgggattcaaaggtgttattgggattggtctatatcttgatggggacaactagggctaccggcttgtaaacgggccatgttaatgattgaagacatgttgcaaattagttgagacatcaagccgtccctgaatttgacaaggctacaagcaagaagaaaaaaataggctgcataactattattttttgaatgactgttctttgtaattaaaataaaagaaaacttgtctaagctgctcccaagtctcaaacccgtgaactggtgactttcacagagaagcattaaccattaatcaatgattatttttttgaaaaacagccgaacattatgtcatattagatttgatgttttagtgttttgagtttgttccacaaagattgattttttaggtttttattttattttttaaattttttattgataaattatagatttcaagatgtaatggttaactgttttatactactattggttcaaacttattaaaaaaatgattggcaaataattaaacaataattgtttcttaatatatgtgaaaactagaacattaaacttttcggaacataggcagtattatttaacggccgcaagctattgctttgcttgcttggcctcttcaacggctatggagacaataattaatctttatcattgaacacactgtttttcatatttttctttttttttgactttggttatagaaagtttctagaagttaagatgaagaaaaatatgtgaatcgaatctatcggtttcgaaaatgcatcatcactcaaggaagagaagtcagaatagaaatagagtaaaacgtctataaattaataatgttgggtcatgatattctattaatattatagtgatattaatattattaattaatattgtatattaatatttattaatttaagagagtttttttagttgtgaaacctttttaaaaaaatatgagttaaaacaagttgatctaaataaaatgaatggtttatatgttataaattttgtagttttagacttaaacatttaatatttagaagagaaaacattttttataatgaataaaaaaagattatagaattcacatttacaaatgatatacataaattcaaaatttataaatagtgacatcaattgtttaaaatttgaaaacttacagaaaagtttggctatttttataaaaaaacttaaaatatataatttacatgattattaatttaggatattattgggaccatattttacatatgagctaagaaaatattatcttattgaatttggttaatgtttatattggcccgtcttatttattttatcgttttttttttgagtgtatatattatctaactatccattttttttaccgcttggtttttatttgttgactactattctgagtattgtaaacttgatttggagggcggatatcttgggtccttacaatcaaggcgaatcctcgtgtaattttcttttcttgctttgaataaaaaatgggacacaaatgtctcccgatcacttaccaaaaaaggtgttaacgtacacgaaggaaattgaacacattctgaaagagaagtttgattaatgattacatatttgtctaaatcttatgaacgtatgatcgtaacattaaatatgtggaggccaaccagttggagcttttgggttacttgtaggataagttaatttcaaaatggtcattatgagtttacagtaccatttttactcaactcattcaatattcgaactataaaaaatatcatatagtttagtggtttgatctaaatgaacaaattctatcataaaaagaaaatgaatttagtggttttaaaacaagaggcaagagacagagagaaaaatgattaaaagaaaatacaaaaacaaaataaagtttcaacttttaagtttatgtctaacaaaaacaaaataaatcctcaatttttgtggtattctaagagtggtgtttttggagtattttgaaaaactcgttactaaagggtcatttaactcctagaattagtcagaggcttctgcgaaatctcaatacgtacgtgatgcttaatctaaaaataaataaatcaggaataaatactcaattaggagtaaatactctattagggcacatatagtaaaaagaaaaagtgaaaaaaaaaatcaagaatgttgggaggcacgtaaactagagattgaattatttataagctcatacataaaatgttgtcgtatgcacgttatgcatttcctctataaaaatgatatatagtcgttatggcaatttatgtggaaaacaaaaacaacagaaatgggcatcgaagtctgcgtgaaggccgcatcaggtgcacctgatgttctcggtgactgccctttcggtcaaaggatacttctcactctcgaggataagaaacttccttacaaaactcatctcatcgacgtttctctcaaaccggattggttcttggctattagtcccaagggaaaacttccattggtgaagttcgatgaagacgaaaattgggtggctgattccgaccttatagtgggaatcatcgaggagaaatatccggagccttctctcgtgacgtttcctcctgagtttgcatctgtgggctccaagatcattggtgcttttgtgatgtttttgacgagcaaagatcatgccaatgacgggtccgacatggctttgttggatgaacttgaggcgttagaccatcacctcaagactcacgttggtcctttcgtggcgggagataaagtaacggtcgtggatttgagcctagcaccaaagctttaccatctagagactacgttaggacatttcatggattggtgtgtccctgagagtctaactaatgtccgtgactacatgaaggtgttgttctctcttgagtcttttgagaaaactaaggctgccaaagaatatctgattgcaagttgggctcctaagctcgacgtgtgatgcattattgtcttgggttagaaaatatatgatcttgtgtttatttccctcatctattaaacaacgcgccaaaaatgttctcagttgttgtcttcgttatctttcaaaatttatgtgttttagttggtgaaattagatctgtctgcatatgttatcttgatgtaccatatgatagactacaacttaattacatcatatatatatatgaaaaccatattatgaacgttatgaaaaaattgaaagatatgttttattggaatttgcaatttgattctccatatgttctatccattttttttgctcataagagtgattgtgacatgattttattatgaatcctatttacattggtattgttgaaaacacgttaaaggttattgtgtgtgttagtttggtttttgtgtacgtttttattttcatattcattcaaaaatcccatgcatattttttgagtaatgttaccttcagttaatcaattttggctatactttcattaaaaatattttcttctattaagtcattctaagaaaatattatcctatactattatttggggagtatacttataagttgtaacattgaaaatgtaacaaatacattaatatattattatagaaatataatcatagaatttaatttatttagtaatatcgtgaatccacagattataaaataggtctaataatatatactaaatttaatttatttagtaatctcgtgggtccatggattatttactaaataaattaaatttaatatatatttagtatatagtatataaggaagctgataagatacaacttcacattgtatatatattaatatatacattaatatattatttgaaaaatataatcatagatttttttttctatttctttaaaaaaaaaaagaaaaacccatcaaaatgattatataaagatttgatatctaacttgccgtattaatttgttattaattattgtactccacctcacatccttatatgatactccacttcacataattattgtactccacctcacatctttatattatactctgtttgtgaaaaagaacaaaatcgtcatatcatccatatatattgttatatgttcgtaaggaaagcatgttggcctctcacttgatgagataaaatttgcatgcatttatgatttcaatattcaatacctgaaagagtggcatcaaattgacacaaaccaagatcacacaagcattgcgcaaaactctcggtaaggataccgcaattgagaacaaagctacctggatctggaaggtttttttttttttttttgaaatccaagaggttttgggccgaaacccgtattcccccaagcccgaaaccacaacatgtaatattagtttcgtcccaagcgtcactcgaaacggcgacttctaagtttcgcctagagtctttagcaattgagctaacgacacttggttctttttttttctaaaattggtggtccagctgggaacgagcgagcaagccatagtgaatctgagtggtgtcgagctgtgatccgtccactgccgagagcgggaggtgatcgctgctctatgaaaccagcctcacgcattgcccaccaatgtaagaaccgcctgagccaagccttcgctcaacacacacagatcactcacagcttggactgggcagcccagaacaatgccacaacagatctgacccgtggaccgagtcagtgttccaccaacttattgtccccacttggttaacaagccctcgttactgatttggaagtttctatttaatcttattctgaataatgtagctaacatgtgtagaaatcgtcatcacaccttgctcagtattcaaatccttagtaaccatcctcttcacatattgtgtgaccataggagaagacttcacaacatctataagtggcatctgtacaatcagcttatccatcataactttgcatctagcatcatctagcttatgtttggacttcctaggactcttggggaaaagaaccttgtgtttggttgccttttctacagctgaaattgggttctggtgaaatcgcaggtctggactggtttggtgtcgatcgacacattattggtgtcggtcgatactgtctgtttctgcagtatctgtgttcactggtatcgatcgacaccaagtagtgtcggtcgacactgatatctggtcagcaaaaactgcatcatcattctcttccaaattgacgattttggctataggaagctcctgttaaagcactggatttaattgttttccactccttaactgaatagcactaacatcttctatatttgtactcaattgctatatttgattgttcaatacttgaatcttcccattcaaatctttggatacaacacccaatttgtgatcaaaatctgtcgttagcttctcttgacctttgagaatctgtttgaacatcgattcgaccatcttagtaatctcgggtggagggtgggcttgggttgaagaagcataattcatagtgaagcttgtagtttgctgaaccgatgtctgagatgtagacttctgattgtagttcttgtatccatgttgatccatcatctctgaagtggctacactgttaacctgtgcagcatactgaacctgttgattaccaagaagaaaatcaactttggaacttaacaaggcaacttggttgttatcggatatctcagcttgcgttttccttgcaatgtcaacgcttttggtactaatgctggaagtcaagctttcaatcaacattgttgaatcctctggatatcttgacatgaaattaccattactagcttcatccaaagccatctattaacgccaatcaactcctctgaagaagatacctaacagctgaacctcattaaaaccatgatgcgggtagtctctctcatattctctgaatttgatccaagcggctttaaatgcttctccggctttttgagagaaggtggagatcttcattctcagctcctcggaccttgcatcgtataaaagttgttcagaaaaaacaacttttatttctttccaagttgtaagagatccaagcttcaactgcttaagccaagaagctgcttccctagcaagagaatatgggaagagcttgtagagaaggtagtcacaagaaataccttctgctttaatactcgaaaccaagtcttcaaacagatcaatatgatccatcgggtgttagaccatgaaaagggtgcatactcacaagagtaaagtatgcatgttttatctcgaaatctcttctttcaaatgtaggtggtcggattgcagactgattggaatagaagagatcttgtctgttgtagtcatcaagagtcatcctacgaccatctgctctgatttcttcttatgtcgatcaacaaccagctggtgccgatcgacatcctctgcgatttctggtatcacgtttccctcttcatcaagtttctggccctcttcgttgtatgcctgaccatctctgtctcgtaagactccagcagcatcaggtctgataatcaatctcaacatatccactgattgctaactttccggttgttgcgttcaaattcctattagctcttgtcacaagaaaaagaacgcgtgagtaacaaagtaaaataaaaattaagactaaattctacacctaatctaatggtgaatcgaagagaacttggcaacgacgccaaattgatatgagtcaaattaccgtattgattactctctcaaataaagaggttgttatagcacttagggatcgaattccacaaagttctcagattacacaatagactaacagtttcaaatgaagctaaactgaaaatattataagaataaaagacagaaaatcaattaaaattggttgtagattcagatgattaaaacgttgggtttagggaaattctcaggaaatatcagaatagtagatctagcaataaattagaattacgatcgaaccattctagaactctaatcactattatagagtaaccgatggttcgccgcattactcactatgcttagtagtattgattctaactcttttgtaaatccctagaactaagcaagcattataatcatgtttgataagttcacctaagtatctaaatcgacgctagtccgcatctaaatactaggctcatctaagatagttctagtaatagaagtctttttgagtactacctattaacctaaaatcaagttctagtaattctagaactagcactaagaacaatcaaagatgaagaattctaaatatattatcctaacaggattttcggtatactaattcatctaaatccctattgagagtccctaaacccaacaagagaactattcatacatgattatcaaagaccaaaacatgtttaaggtagaaatcaatgtaagaaacaagaagagaatatagtttagaaagatcttctctagagagagcttcatatggttttggctctagagggttttggctctagagaacaaagtgaaataaagggtaaagaaaagttatcaaaagttagatctaaacaatgaccttaaaatctttgtacagtagaaactctataaattaatactcgataaattaataaacacgatatattaatatattttgccggtcccaagtcaggccaatgtaaaaattaactaaaatcgataagataataagataatattttttttgaaatccctatataaatttatagtcccaataatattataaattaataatcatagatcttaagtatacattttaagactaatatttatatgaaaattttgttcaaactataattacaactctttttaaaatacaactggtatgatctctattgtactcacataactttttgagtatttgatccgtcatagttaattttgtatttgagaaggtattgctaagatttatgtaaaaaaaattggattaaaattcatgtttactttacttcacgttaatatcttagatatacaaacacaatatcttacagaaaaataaattaaagaagtcaaagaaaaataaaaaacctaacataattatatatctaaacaacaaaatatatggaaaattaaattaagaaacattttaagaagaatataatattatattttatgtataatatttctataaattaatatttattaattaataggataaattaatatttattaatttataggataaattaatatcactataaattaataaaattcatggtcccaacattattaatttatagagtttctattgtataaattcctaaaattgtgtagggacttctttgaaaataaggaaaagttctgaagcgaatttggaaatcttcaaaacttcaataagttgcgcaattgaattggcgtcggatattggtgtcgagcgacaccaagggtggtgtcgattgacacctacgtgaagtttggtcttcggattgcttttgtagcataagttttatgtttttctccagaatactctatattctccaaatgcatcccaaacatgtaaagacctgaataaactatacaagactctaaaaataacaaaagaactctaaaaactatacctaaatcatagttaaaatgagtgaaaatcgaggtatatcaatgttcaagaaacaacataactctagcttctataatcaaatcaaatgtctatctatcataactgaattcaccaaatcagaggtaagaatctgaaaatactttagaaggctcaaatttttggaagtttttgacgatagagagaaagcgatatgtgacttcagatgtgtagaggaatgctctaacttctttagagaaacgccgaagaagaacatacaaaggaggggaagtgatacggcttgagatttgaagagaaggtgtgacattgacaatgagatatttaagcagagcacctctcgccgccattgctgtagaaaagcacccagaaaaaccttgctcaaagaaggagctctggtcagatcgatggtgatgattttgttattaaacgatgtcgttttattgtaagtattaagctctcgattctgagcctattaacgaaatgccacgcaccacacatagccacaaaggaaccaatcaaatttttgcacaaaaaaaaagaataggaactaataaaatcagggaaaaaaacaaatttggttagaatttgtttaatttgcatttacatgaaaactaaatcaatcgagtattttttaagcaatttaacaacggaattttgagattttaatacctaaatagtattaaaaaatgccaacgatttaactatgtgttgctttcacaacgaagatcagagatgttttatcaatatgaagggcacagaactggtaggtctatttcaggtcttgctttggtggttatgaagaaacattcatcgctagtgggagtcatgattgtgaggtaaaaatctctaactcgcctacattacagaaacatagaatgaagaaaaaaagaataaaaaagagagacaaataaagaagaagagattgtcatttttgtttagcctcacccccaaatagtttgacattgtcttatcttccaatacatacaaataaaaaacagctatgtgttgtgctctatttcacatgaagaaatgaatgtcatgagtatcgaatctatcatcagttaaatctcggctaaatcgtgaaccttggtagtgatacaacttacaacatacatcttaaccaatttcacgttcgaagagaaaactcgtgatcattttttgtattctctttcaaatcttattaataaaagttgactgaataataaagagaaataaggtaagttacaaagttattaatatattagcattgcgatatatttttcgcatcaaatttgttggactccatatgtagtagttaaattcaaagaagtgtttaagtgtaagaaaaatattcaaattaccactaagataagtgtttattccaatttaccatcattagtttttattttattttattttaagtaccattacaaaattgttttgtccaaaaataccacacacattaaaagtaatttttaatggtttatatgtgggtttgggtttaatattttaggtttagggtttagttttcaggggattaggacttatttttagggtttgtgatttagttttgaaggttaaaattttagttttacttttatagtatatcaatggtaggcctgacaataattggggtagagcaaaagaaaaagtgggggccaaaattttccattgccttactatacaaaaatacaaaaccaataaaaaaggtaggtttgtttactaattagacagctcatataaaaatcagtccatataaaaatctgttagcctttgggctttatatttatttcttatgaaattctttctatgaattatacatataattttttttattctaaaatgggctacttaaatattgggccataacaaatgttttactttgctgtggtcaaggccagccataggtcatgttcgtttgcttgtcgctggcgactgaaaccagcgacagcgaccaaaagttgttcgtttgcctgtcgctggttcagcgaccaaaactagtgacagtcgccagcgaccagcgaccgcaatttttattcgctgaaattttatcgatcagtcgctggtttcggccctgttcgtttgcctgtcgctggcgactgaaaccagcgacagcgaccaaaagttgttcgtttgcctgtcgctggttcaacgaccaaaagtagcgagagtcgccagcgaccagcgatcgcaatttttgatcgctaaaatttttagcgatcagtcgctagtttcagcgattagtcgctgaatccagcgacatgcaaacgaacaacttagcgatcaaaataaataaattaaagaataattaaaaataattaaattaaacaggattaaattaaattaaatttaaataaatgttttttgcactctgaacggttgtgtcttttaatcgcaactttccgtaataaatattgacggttgtttttctcgcttgtgtcttttattgcaactttcctatattgtaattttctgtcaaaatatttacggttattttttctggttagttatatatatactattgaataactacgaaatttataatatgcatcacttggagttagatttgttttaaagaaattattatataaacaaatttataatatttttttctgcgatatcacgaagggtttgagttctagtttaattaaaataattcttattaaattaaattaaaataaattaaattcaaataacataaactaattatagtcaaattatatttgataaaactaaaataaataaatatattaatttatttttctcatgatgtatgatatatatgatttacattttgattttaaaatataaattagcaccaaaaataattaatttttaaaaaaatatagcgactgtttatagcgacattcaaactaacaacacagcgacaattattagtgattatcgctgtaattggtcgctgagtccagcgacagacaaacgaacaatatatgttgtcgctggttgttgtcgctggtcgctgactaagtttgagaaaatatattttaatgaaaaagatatattttagtggtatttttgagaaaatatatattctagttttgactaagtttgatgcaaatactgagttagaagtcgtgataagatttgagggaatgcttagcaaacaatcgatattgataaaaacaaaaattgcttcaaacatttttatttccctcttgatgtcatgacattcctcctaaagaacctccaaaatagagtctaaaaatcttctctttttgctttggatccacttcgtctaataaaaaaacaacaagtatggagtctcaatcgttgaacctccacgagattcctctcactcgacatccttatttgctattgttcatggtttaattacctgaatactttacaaaaaactgaaaatatcgaaccggaatcaaaacaaatcgagaaacccaaaaccaacacaagtagtattttttttttttttttaaagtagtcttttgtaaaaatttataatattgatgttaaaatagtattttgtaaaaatttataatattgatgttcacgataaaaaaattagtttttcaaatctttttttagtatatagtgcaatttcttaaaatatagtagcaactagtaaaatctggaatatataataagatttaaaaatatttttgtaaaccgtgttaatttgattaattccattacatcttcaaaaccgtacagatctctgtttcggagcagcttcttcacacgctcaagctcaccgatcgattcttccaatgctcttctaattcgtaagtaattttccagatccaacctttctcagattcgctctttcccgagaaaatttgaagaaacagagattcatcattttctcttcctctcaaaaatcagatctgcaaaactctcagatcactcatgggtttgatttcaaaccctacccgtttgattctcgtcgccaccatcttcttcctcgtttcttcaatctccggtcaggtataacgcctttttctcctccattgattagtatttgtgaaaattcaattacgtataacgccttttttctcttctttactaggattctgtcgttgagaacaatgagagacaagaatctgaaggatctggtaaagagcttggtcgtcgtggaatggtaattttgaatctcgatctacttttttgcctttttcgaatctgaatatcttttgatagattctttatttgtttgatttcaggttggtactgaacgaattggagttgatactgttgtagacaatattggtgctcttggtttgaatctagaccttgatgctactgctcctagtgtatttgatgctttgttttcgagtttctcgatgatacttgtcaccgaggttcgtgtgtgttgatatgattcaagcttagggtcaatttttagttttagtggttagagcttaatctttgtttcgtattatatgttagattggggatgaaacttttataatagcggcattgatggctatgcgacatcctaaagctactgttttatctggtgcactctcagctttgtttgttatgactgtaagttgaaaattacttgtatgtatattcattgtgggaaaaatcatcgtactacagagggtattgtctaactgttgtgatttttctgaattgagtttagatactttctactggacttggtaggatagtgccaaacttgatatcgaggaagcacaccaatagtgctgctacaggtatgtagttctctcatatggtgtgagtgtgacattgccaatactatagttttgggtttttaaagaatttgctagcttaaatgaattgagagtgctatgcaactatacgatcatgaatttttgtcttatggaaaatgttctgtccgaggcttaaaccttgtccaccaatcttttagtgtgtcttgtgattatgattttgcagctccggtttacttgaactgtatatcttagtatctaagtttatttgacatggtgaaatggtaggataattgattcatttagtagaaaagtagctatccaaactgatttcttcatgtctttttttgtgaatatgtaaaacacttaaatgttaagagtagatatctgtattatcattggaattggtgcacttacttgtaagttttggtggctctttctttttaatctgaatctcacttgaaggatcttacatctttgaaaatgcagtgctctatgcattttttggtttgcgactactctacattgcttggaggtctactgattcaaagtcaaatcagaagaaagaaatggaggaagtaagttgttctcatgctacctgtgttgccagttgtttgcctatttataattaaaagagattctgcctgacattcttatttgctattaacattcaaacttgtctgacttcccatcatctttggtaaaggttgaagagaagctcgagtcaggtcaagggaagacacccttccgtcgtttattctcaagattttgtaccccaatatttctggaggtatttttctagggcatattgatgctttcggttgtatgatttttgcggtaaactgtttaaaaagttgctataaccccttctcttgtatttttttgcagtccttcatcttaacctttctagctgaatggggtgaccgtagccagatcgctacaatagctgtaagagtcatctctcatatctagcttcttactaaaattgaccagtgactgacttttatctttttttgaagttggcgactcacaagaacgccataggagtggccattggggcaagtattggacacactgtgtgtacttcactagcagttgttggaggaagcatgctggcttcaaggatctcgcaacgtacggtcgcaactgttggaggcttactcttcctcggcttttcagtctcctcctatttctatcctccattgtagtaaatgtgcttctttcgaaaatgggtgttagagacaatttctaagtaaagtttcaattttttttttgattttaatttaagtttgatattttgtttaatatcaatggccaaaatggccaaaccaaagaatccaacgcctatgcttttacaatttactttcttgaagtgtaacaaatctaattaaataaaattttgcagtatccaatttttcatgtagttggctgatcatgtttatgaggtttctcccaagcctcgatctgaaactataacagtttcaacatctcgtttctgtctaagtaatgaatctcgagaaggtttggtagcaatcgaacacaaaccaaacttcacaaagagtaaggattgcataataatagtagagtaaacaacatggtaaagagatgttctttgtgagacaaagttaatgaatcttgtcctaggtggcttaagacaatgtattaatgtttctatggctatgagagatgagagatgtcgtgaggtgttgtgtgtgttgggcatgtgtgtgtacccctaggggcttaagacaatgtattattgggtttgagatatcttcaaagttcttttagtctagaagggagaagtgttgtcgtttaggccaaagggatggacatgtgagcttgcaacgggctcgttgtggatacccgtgatgatgtggcttttggccgcggctccagaacgaggagcatttgccaatatttcgttctcagcttgctactttcgcgagactgtaagacacgtcacacgttacacgtgcgtcgttagtatatcggcataactatagaaccgctgaaggaaatgagttgattccacctctcgatgaaagctaactcagttggatttcttgtgtccaaaattcacttaaattggtggtcgtgatgttcttcaactagtgacaaacttctgatgcccataatctgtctaatttcttgtttttcaacaccttgtgtttattttttccaaagacagataaaataccttaaaattacaaatacttgaaaaacaccttaaaaacaccataaccatatagaccacttattaaaaacctatgaaaactataaaacaaataggtagaaataaaagtatatcaattagatagaattgcttattcaattagtatgtgaattggtgttgtgactgaaatcctgcaagactctagggttgagaatcaagaactagaacctagttctatatatgtgttcttgataaggcaaaaaaggatttgtggttatgttattatcatatgtgcgcatacatatgacatgaatgtttccgaatgtgatattatagcacaaatatctctcataggtaataagtcacccatattgcaaaacaacacttgaaatatacagattgagagctttttgaatcttcttttaccaaaagtaagtgagttctattttaaattggacaaacactagactaaatatggaataacataactagtgaatggttttaaccggaacatatctaagaattttcatgtaaacgatgatcgtcccataactagtgggagctcaaaatgccgtttacgcaagccttaaggcaacttcgacctcgatattatgtgtcaaattcgcttagctctaccgtccattttgccacctaattggttctggttatgaaggactgttcgaagcggttgactggttaggacaattacaatttgtgactgaaaataaggcagaagttttattgcagatgcgattatgactacagtgagcttatccatcaacagataccgattttttggatacgtcaaagacttgcgtatgtaagagataggtttctgttagccctgcacaaagatcacgtaaggatcccgctgatggagtattgtgagacggagcataaaagtattgaggttctccgggtaccagctttgccaataatggcagactggacatatatgcttttagtaggttgcatacttctcatcccattcgaagtctctttttacttttaacaattgatagaattgtaggcatttgttggttgatctcacgatgaacatatttaagactgcaattcgactagtcaatttttgcacctaaaacatggatgtcatatatagtcagtaacacactgaccttctggtgtgaatgaggaggattcatgagacttcaaaatttaaataatatccaagataagaacaagtgcatcgtcgtgaggtttggacaaacaaactgtttctctttccttaaaagaaatgacattgttgacattattggattaattgtgaaaatctaactatgtttgctagtattacctaatttgttgtcgtagatcagcggtggagagtccttattagtcataaaggtccacattttgagtacccatggaagcaatttttttaccattattttctaataaaacgacattgttttgaaactttaaaacgatgtaattttgattaaacataaacttctcacggaaaattaactcctttaacagaaaatcaacggcatgctgcccaaaatggccaagtaaacaaaagttgaccattttatccaaaaatcaaacaagactttgtgatttagatgatagttcaaaatttcatgtttttttgtctcaaatttgaaagttcgcgtattttttgacattttacccaatcttgtacatacactatcgttaaaaacaatattttatctttacctttttctctaagtcctcctccttgcatatcaaaaagttcttgaaattttgcacaaaacaagttagtaaatatgtagtagacaaaagaaatccatactgggatcttaccataagtgaatatgtaccctctgtgaaagtgacatgaattttcaatagaaacaaagaactctaaaaaaaatttatttccctttcacgaatgaaacttcatgacaaaatgtagaattcacttccccaatactttgtgaaactaataataatatcctgaatttagttagagaatttataaaattatgcgaacgtttctcctaagctcgtgacttgcgagaagataatattacaagacttcgaagtattaattttatggtaaattttaaatgactaaatttttcatttttagtttaacaaacactcaaaatcagaaaatctcctaccacatagttacttttcaaaacaaattctaaacacaagatatttttcaaatttataaacctaaatagtaaatacaatattttcaaaaacttttgtggcacatccgttttttcaattgttacatctaatactctgtatataaatttcaattttaagtttataaccaacagatgatctcgactattacagtgttgcattgaggcatggtgaaaatatgattaacaaaatagcggaggatctttgtgtggaggagagtgaaatgcaaagggaggctaacaagttgaggaacgacacaaagatgaagaagaagaacaaagcaaaggggaacataagcaaaaaaagtgagtagcttggagaacaagaaagatatgtgctccgctggagggtttgagttttatgagctgatatatgatctaaactagcatatatatatatactagataagaccctatataggggtgtaagatataaatgttaattcattgatagtaattgacttttgaatagtaaaatattaatttacacatttttctatatttaatttagtatttataaagaaaaaaaatcatctttacaacattcaattttgcaatacagtttaacatctatttcatcataataaactcgagtttaattctacacacttcatcttaagtgataaaaaatatatatcttagttaatacaaaataatcaataattaacaaaacaaaactaatagaaaaacagaaatccacaaaatattaggaaaacaaacattgtttgaaatatatttttatatatggcgtaatctcggtagttaattttacctcatgcaaactaattttgaacgagttaaaattcataaataaaaatatactaaatttttttgtttgcttaaatgtgtaattgatatactaacttcttattaagtaattgaaaagttaatcctataagcttattttccctaatttttgtgttttcacttaatgtgttaaaattcttagaataacacatcaaaggatgcaagcctctccatcaaaagatgcattaaaattcttaaaataaaacataagtattgaaaagattattcttataagctcgttatatttataaaattttgttcaatgaatgaaaagactttattccaatgataaagataattttatcaaattatattaatgttaaaaaaaaatatttttttaattgaaacttcaatggcctttataattagttattgtatgtactaacaaattatccatactaatttaaaaaacaaaatgcatgctaaatttaattaactaacatcatatgtaaaaacaaatttgttctgaagacaaagatattcaaaatatagcagtttcatattttaagaatttgttctctacaactaatcctaaggtttttgaggattctcttgtagaggtccaagaaaaaattacagatcagatttatgattttctaacggcacccgcaacggaatgtgaggtgagaatggctttatttaggatgcacctggaccagatggtatgacaactttattctttcagaaagcatggtccaccattaaaaacgatttgctacttttggttaattctcttttacaagatggtatttttgataaacagttaaatacgactaatatatgtctgatcccagagacggagagaccaacacggatgacggaattacgacatattagtctttgcaatgtcggttataaagttatctaaaaaattataagccaaagacttaagacagttctgccaagtcttatttcggaaacataatcggcattcgtggagggacgtcttattttagacaatattctcattgcccaggagatgtttcatgggttaagaactaatccggcatgtaagggatattttttggcaataaaaaaggatatgagcaaagcttatgatcgggtttaatgggggttcattgaaatattattaagaaagatgggattctgcgaaaaatggattttgtggataatgtggtgtattacaacaatctagtatagagtactccttaatggacaacctagaggattaatcataccagaaaggggtttaagaaaaggaaatccgctatctccttacttaattattctatgcacaaaggtacttattgtgaatatacgaaaggcagaacggggcaaaactgataacgggtcttaaaatagcaatagcaagcccgtcggtgtcacagtttttatttgcggatgataatttatattttgtaaagttaacaaagaacaatgtagtgtaattttggagattttaaagcaatatgaagccgtctcagggcaacaaataaatatttcaaaatcgtcggtacagtttggccataagattgatgattctattaaggtagaaatcaaatatacattgggtattaacaccattggtggtatgggttcttatctaggattaccagagggtctaggtggatctaagccaacaaatattttcttttgttatagatagattacagactagaattaatggacggtcggccaaatttttatcaaaggatgggaaagaagtgatgattgaatcggtaggtgcagcattacaaccttatgttatgtcttgttttaggctaccaaaaaccatgacttataagcttacaagtgcggtcgctaaattttggtggatcaaatgttgattccaaaggcatgcattggatggcttagaataaattatgtgatagtaaggtagatggtggactaggttttcgacatgaagaatatttagttttgcgctcctaacaaaacaattatggcggttgattactatactagattcactttttgcgaaggttttctaaggaaggtattttcggaaatctaacccctaggaaaatattaaatcatactctccatcttatggatggagaaatatttgctcagctagatttctggttaaaaaaggactaattaaaagagtcggatctgaggcatcgatctctgtttgggaggatccttggattctagctcaattctcgagaccaacaaaaagtaatgggtttgttattgatccagctttaagagtaagtaaccttattgacataaggtcaaaattttggaatatggatctgttacaggagatcctaacgatatccagttaataagtttcatgcatgtgggtgcgcccaacaagaggatactctaggtttgcattttacaaaatcctgaaaatatactgtcaaattcggatatcatacttcttggatagaacatatggatacaaatttatcttttatttgtccggagatcaaaatccttaaagcatattcttggaaagtgcaatgtctgcctaaggtactccactttttgtggcaaattttagcctgttgcgtgccggtcatagaaaatttacggaaaagaggcataaaatgtgatacaagctatgcaagatgtggcaccacgaaggaaacaattaatcatatactctttcaatgtcacccagctcgacaggtttgggcattttcacatattcccacggttatagaatttttctctcatattttatttatatgaatttagatcatttattttggagagtaccctcagcagttgattcattttcatacccatggattatctggtacatttggaaagtacaaaatgaaaagaattttgataatgtggataaagatccactcgatatattatgtttagcagaaaaagaggcaaaatcgtggaaattagctcaagttgagctacataatgaaaacttggtttcttttttggaaacacgaacttgtgtgagagatatctcagaggataatatgtatgcatgactttgttgttttgtagacggatcctggaaagagagtgataagttttcaggattaggatgattttgtacttcattaaatgaagaaacatcaagcatgggcgctgctaatctccgtagaagtctcttcccactccatacagaagtcgaagctcttctttaggcaatgaagtatatgattggttcagataaccaagatgtagcgttctttacagacatggtgaagatggtgtcttttccaaccgaatgaccagcattttcaggatatttagaggaatttcagagcgacaaggatgagtttcaaatttctctttaactttaatttctcgatgcacaaatgtaaaagcggataatttggcacgaaaagtacgttccgaaccacatcacatcacctatgtaaacaacattccccaagaatcgctcttttgagctctaattaagagtagacggcaaaaaaataaacaaatttgttcaattaccttttagttaagaaaaataatatttgttgagaaattggtaagaatgccctttcaaaaatacatttttttaattatgtccctttctgttggttattttcatttatacctcttttaatttttaatgaccattttatccttattttgaaatgttttaggttaacaaaatgaaatatcgtttgacaataattatccttattgtgtaaaagtttctgttactttgaaaatatcgtttactattttgagataagaggatttcaattttcaaaattatgtgagtgtataattacttgtattcaatatatttgatatgaagatgtgtatacttaaagtttgtatactatattgggtgttaaataaattgtattatttacatctattgtgttgatgtgtgcctatatagaaaagaaaatgctaaagatgcatataatcttgtacacatgataaaacatctaaatattatggtaaacaattatgtcacgtatgtatattaagtcttttatgtaatgtactaattttattcatatatatatatatatatatatatatatatatatatatagaatcttatttaaattaatagatgaagtaaaagtaaattacagtattgtgttttaatagaaattttgtttataataaatttattttatcggatcaactagagagacgatgggagaaccaatgttttgtcattagaaactttttttaattttgttattggaaccaccattattgcaaattgaataaaaaagcttttacaatatgtatatgagaaattataaatttgtttttagaagcatttcaatatttatttatcatagttattcatttaaccaaaaattaaatttgttgttttaaataataataataatagcaaaaatgacgaaaaatcaaagtttaataaaagttgatgtgcaatataactcaataattttttatttgattagaaccttaattttagaattactcatatatagatagttgtgttttcatatcaacattacaacacaagtttccttgtattcttatctgccagaacctaacatagtatatctagtaatgatgatcattttttactcaactattgccatattagttttagacatattttagttgttggtaaaagaacaaactctcatatgaaaaccacaaaattaaaggtttcttttatgcgcattatttaagagtttttgtgggtgattttcccaaataatgagtatcatggtctgaataattatgttacaacttgatcgttaaaaagttaaaaaaataaaatcacaaaggaaaagaagttgtgaggtaaaagaaataaaaaagatttgctaatttatatccccaacttttcatgatttgctggaaaaacccctcaactctctcataaagaaaaagcataagaaacttaggttgaagatgcaaaattaaatccaaaataccaaatttagttatttagtaattcaaaaacacttttagccctttgtatctactctaaaattaagaaactcttaaatcacaattttcataatgaaatccagcacattgatttcaatattctaatcgatcctactttaatattattttgcgtatcaggtaattacttcttgttctttctcatcaacactttaaaacaaaattgatgtagagaggaaacataactccaacgtaaacaaaaattctttgttttctttttgtttgtatgtttcacgaataatcgtgtcatgaataattggtttgtttatgcgcattaattagataccatgaagtaattgtgtcacacaacttgagagttagaaagtgatatttctttcccaaaacaaaaaagctgtgaggtaaagaaatgaaaaggattctcaccttctttttctgtttcttattttatcatctttaacatgtgtgattggttggtcaaatgcaggaaatctaacaggataggaagcttcacaacaacattgtaagagaaacaccaagtagtaaaacagctaaacatgatcattcttttacttgacttttgttaggttagtttcagacatgtgtttgtgtgtttattcacattagtttcagattacttagtttgtttatgtgcattaatttgatttcatggtttgaatgtaatatttgagagatatttcttcacaaaaaaaaatgttgtgaggtaaagaaataaaaaatatttgcgcttgttacatcccaattcttcataatttgaatgaaatcccctaaacttcctagtaaagaaaaaaaccataagaaacttatgttgaccatgtaaattaaacccaaaaagtcaacttcaatcatttccgccttgatatagttttgaatattaggtaattacttctcatcaacattttaaaacagaggaggtagagaggaatcataactcaaacttaaaacataattctttgttagctttttgtgtatgtttcataaatcatcgtttttatgtttgtttgtattttgattaactgattttttgatcctaacttgagattattttcttaattttagattttcttagtttattactttgtttgaggttaaagataatgcttttgttactctttcgattttgttttatggttttatttactgcttcaatcatgctagttttatcttcttttttgtatttgtttttctatgttgtttcggggagataatcatgattcttctcttgctttcctgtcaatattatttaaaatatgagaaaaatactctgttttttccaaggaagttcattgacatcattacttttgatgttttagttagttatttattaccttggatgttaattaactaacacaattgcttaatgtctgtcctaggatccttgtgttgttcttgttggactactggtagttttgtctacatttcaacataaccatgaggcaaggtattatgaggtatggattttctcacggtcttttagtctctctgttgcctagtgtgtttttgtgatgcatgccaaactaattatattttaactcacactaagcatcaaaaccattcttggaaccaagttcgtgctgaagtcccgaatccgaactcactagattctgttcttcaaccttctaaaagtcaatcctaagttttttcagcatacttttgattccactatgtcacaaaacaacaataagtattagtattaggataagatattcttccgattatgataaaagacatgggatttgtttagtttccattgaacttatcttttcttattctttagtttgagctttctctatataagcatgaattaccatcgaaacatgttcaataagaaaaagcagagcaattcattactttaggaattagcaagaaataagtttcattacgttgaatttatggacatgtgacttcttgaatgtgattgatatacttttgtgcttgcaaatatgagaactctattttgtagcgtaaaatcttaaagcgtatcactagagacccatacaaaatactttcttaacgagacaactcttcgtatttgtttgtttttaggttgattatcgctgccatctttgtcatggtatgcggctacgaggcgacggttctttcgcttaagaggatgattctgccgagccatgaactcgacctcactcagcttatggcatttgattctgctcggcatggaaggttgttacagtctcctgtacacggatctttcaactttccggttgaaagagacatagtttagttgatttgttaactttaccatgtccctattttgttagctttgtcatgtccatgtttcatgtcaatatattcctttatacttgattatgatttgcttatattttccttctaaactatgaaattctgacaatgcttcattttcactcgaatagtcgaataggctattgacatccattatcttccgaaagaatatatgtagtattgtctgggtaattatttctataaatattaatttataggataaattataaattaataaattcatttttccaatattattaatttatagagtttctattgtatgtaattgttcatatattatctcacgagatatttagagttgaattccagactagtttgagatgatcaggaactaatccacgatatcttatgatgtttatgaatcaagataaatgcaataatgaagactcgaatttgagtactaaaaagttcatctactcagttttatggtttagtttccgagcacaatcatacaacatacaatcaaaaacaataactgatgttcaaagtctaaagcatgactcttccgggttatattacataaacctcttatacaccatcagataatataaccggaaactcaatgagagaacaagaatttgagaaggagatatatatcataacagccaagtaacttccctccttagtatggttccccgccgagtgccttatgtttataatgtttttattttactctcctcttgtcccatccgacaagccattaataccatattttcttgataatcaagatcaaacaaaatcaaaacgaaaaattctatcaaaacacattcacactcacaattgtatgcaattcgttgatgatcaagatcatacaagaacatttgttcctaaaggccacttctacaagacaaaatcaagcaaaatttttattaatatgaattgctttactttcatctaatcaaaatacaaaaaaaaaaatgacattaccacccacagttgttatacaacgactcgtcaaacttgggaaaccaaggcaccatatcgcatttacttattgaaaatataagaaaataaacagagataaatatcatccttcttggcaatagtaattataggtagcataagaattaacttacataatcgtgaacaatctgagaaagataattcttgggttttatgaccatggatgcaccaccagcgaagcccaagttaacttcaggaaacctgtccgcaacactgccatatggatcatatttttagcagttaaatattatagacttgagaattaatagacacacaatatgtattattatgtagactcgcttgttgggaacttatcccatatgtgatattatagcagtagagattctcatagggaatgggaaacccatacagggaaacatcatttgaaatctgcagattgaaatgctttatgaatcttctatttctgtaaagatctatcttaaattgtatgaatagagaaactcataggttggatgagtgtatcataagcttcagctggaaagcaaacaagtattgtccatgaatcaattatcgtcccataaccactagttacttagaaagccgagggatcaatccgtaggatcttatgattatacactttatcttattgatgatatttgaatttcaaaaagtagtcaacttacttttctgtatttaatttggtaattttattaaaaccaaattttaatcttacacattccaatttgctatacaatttaactatctatttcatcataataaatccaattttgattcttctcacattattttaatggatcagtgttaaactttaaaccaatatatatatatatatatatatatttataacatattaaatctattagttcatatcaaaataattaacaaataacaaaacataataaacacaaaaaaatcaacaattcacaaaatattttggaaaagacaaattgtttaagatatagtttttttatatgtcatagtctcataagttagttttacctaatgaaaaactaattttaaatgacttgaaattaacaaagaaaatattaaaattttatattaacattttcattaaataatcaaaaatcaatccctctaagccatattttcctaatttttagtgtttatactaatgaatacatgcgttaaaattcttagattaaaacataagtataactatactaatattctcactaagtattcaaataaaaatactatattacattgataaatatagttttaaccaattaatttaatgtttactaaattattttattatttttaacttcaatggtctttttaattatttaatatccatactaaatgatgattgtctttatatttaataaatgctaaaattctttaattgaccaataacacatgtaaaaataaatttgttaattttcctttttgttaataaaataatgtttttgttattttaaacttgagtggtcttttttaattatttaatatgataatatccatactaaatgattttttgtttatatttaatacatgctaaatttattttattgactaatacacatgtaaaaataaatttgttaattttccttttgaataagaaaataatttatttattttattatagacatagaaattagtatatgttaatttgtttcttttttttaaggttttctatcttttgaagagactaaaaaagttaatctttaattatacatgtaaagatctgatcgatagatttgacacgtgtcacgatcttatgagttactaactttgaaatcatactttatataataagatataccttttactaaaataatatttaaatatatctgaaacataaaaataagtctagaactaatcctcaattaatatttttttaactgattgaccaaaacaaaaactgatttaactgatatgagtcaaattagacctaagcactctctcaaaaaaatatcaattgtagtattttagggtcgatttccacgaagttatagtctcaaaattaagctaaatcaaatagtaataaaagtaaaaagaaacaagaaagcagatagcagatttgatttgtactaaattaagatgattaaagtgtcgtatttaggaaatttctcagaaaatagatgaataatagatctagtagttaattaggattgttatcgaaccattatagaactcaaatcactaacctatgatcaaccaactctcgtcttaataaatagggatcccaactctcgtctataaatcagtatatagtaaacatgcattaaaatcaggtttaataagttcatataagtatctaaaccaaacctatccttattttaatattcaagctcatctatgatagttcaggtaataagcggcatctatgatcttgcctattagcctaagatcaagttctagttagctactctagaactagcattaagaataatcaaactgaagaactctaaagataatcctaacatgttatcgatccactataccatctaaatctctaatgcgaaatcctaaacccaacaagtagattactcagacataatcatagaaacataaaaaacatgtttgaagaagattgcgtaaagaaattaaaagaagaatagagttaagaaaatatcttctctctacagggtttgaaatctctgatgaactctccaaagtctcagggaatttcagagcaaaaagataaaaattagaataattgtgtttgtaaaagtttaggtctaaacaatgttcaggaaagcggaataggcggtcgtctaggcgttcatgtaccgcttcgactttcttaaaatcggttttattaggcggtagggtagatttggcggactatgcggacattaagcggattaaacggtcattaggcgggtttaggcggatctaaatgtgtttcaataatattggaattttgaaaaatatatttaaaattgtatataaagacacatttacttttattattttatttatcttactttaaaatgttaaatatatattctttttaaattttttgctaactttcagctttttaataagttttttccaacatttcatttagtagtatataaatatatatcgttttattgtaaaaccgtttaaaccgcctaaaattgtctaggccccgactaataaaaccgcctaaaatgtctaggccccgcctaataaaaccgtctaaacaataaatttataatgtgtatttataatgttaaacagattttaaaaatatatttactgacattataaattattgtttaaaaatttatttataatgtctagacattgtttaaaaatctatttataattgtctatctaaacaataaaatattcaaaaagaaaatatttggattcactccttggcgaatatttgtatgaatcataaaacgagttttaaatatgtgcgattttgtagcaaatgctaaaaaagttatttaaagaggacaacattatttttattgaacaaatgaaaaataagtccatgatccttagcaaagagttgttacatcgtttaaacacactcaagtggcaaacaaaacaattgtagtatcttctattacttttgatgatggtgtttactctcatctttctacccatgaagatggcgccaattagtcacacaagaatctccttatctatgtacaatagctggattcgatatttctgtagaacaggcgaaacaaacgaagcaatgtctctcctcgccgaaatccattctctaggttcacgtcctgatcctctttcctacgttagttttattgaaacactcgctagtctcagaaggactctcgaagctgatgctttgtttcatgaagtagttagattcatgatttatggaagctattcggtgagattgtacaatgctttggttagtcgatatttgagaaaaggtcaattagagttagctcttagggttttgaatcatatgaaaaggggaaatattgataaggatcaggaaacttgtgaaattctgttgaactattacgttagtgctggtagataagaggtatcgtggcgtgtggttaacgaaatgaagaagaggaagtttcgtttgaattcgtttgtttatgggaagattattcgtatttatagagataatggtatgtggaagaaagctttagggattgtagaagagattagggagattggtttgcctatggatgtggagatatacaatagtgttattgatacgtttggtaagtatggagagttggatgaagagttacaggtgttagagaaactacagagatcgagtgattcgaggcctaatattaggacatggaattcgttaatacggtggcattgtcatcacggtgcggttgatatggcgcttgagttgtttacaatgatgtaggatcagtggctttatcctaaccctaggatgtttgtgaatcttataactcggttgggagagaatgggaactggaacatgatagatacacattttgagtctataaagtgtaaggaacataaagatacaagagctatttatgcagtaaattattggacagtttgggagtttcgaggatattggggaacttgtgggtaagctaaagtctcaaggtgttgctccttctgctaatttattttgcactttggcaaatgcatatgctcagcaggttgatttcctatctttctatgtttcatgttctcggtttttgtttatgatctgaacttggtagactctatataggttgtttcagccgttttcatttggtatatatagaagagtattgaatgtcaacaactgtagaaggttcatagattctgctaacaagatttggcttgttgttttaatttcccttgtaaattattacatgttagagtaagtagtgctatgaattttcaaatctaactaaagtcattgtcaaattttaacacagggactatgcaaacagacagtaaaggtgctcaagatgatggagaatgaggggattgaaccaaacttgattatgctgaatgttttgattaatgcttttggaactgctgggaagcacatggaagctctatctatttatcatcatattaaagaaaccgtatgtatatcttattcgtgcgattaaacttctagtacttccctatagtaatcggtgaattataatgcttaactgcttgagtttgtcttctgaagggattcaccccgatgtggttacctatagtacacttatgaaagcattcactcgagcaaagaagtatgaaatggtatgtagcttctatctggtgaccttgtaatcccatgttccttcacctcaaaggtttcattgagtatatatgttatgtgtgatcttgataaattgggtgtttaatttaaattgttggctgctccacaggttccagaaatattcagggaaatggaagctt

SEQ ID NO: 774 - DNA, 70098 bp, Arabidopsis thaliana
gaattcaatacgagatggatgaacttgaagtttcatcatctcgaggaggagaagtaatgaatggataataagtgacatatccagaagattatgttcaatctttgactactaaagatctaaaagttatataaagcaattcttatatgaatgtgttattagataaaataagttataattagttattactaaaacttcaagacttgaagtctctttttgaatataactcacattgttaagagaatatctctgatgcggagatggtaaaacagacgcttaaacttttacgcaagtatcgttgtcctgtagacacaatattttgaaagaaatttaagaactattatgaacttaaatcgagtgtttttcaaaggctaagaaaatatatgagttattgatgataagtaatactcatattctgaagtgaatataagatcttacatagctagtcaaattaaatttaatatcgtttatattagaatataaaatttcaattattgtctcgtttattgctatattaacatatgattgattattaaaatacatggaagtaattttgattataagatcccattaagggagtaactcataagcaatgaaaagtaaatcagaagttttcaaaaaaaaaaacaaactagaaactagaagtttcaagagtatatttggcttaaccggattggtcatcctggtttaatgatgatgcgaaagtattgagaattatgtggacattaggtgaaaaaacagaagattctccctaatgatttatcaattgttacttgctcagaaagcaatatgataatgtgatttttaccagtcaaaataatttggactttatctattcgtaagtatatacaaggagatgattatgggttgatcacccactgtacgacatttagatacctaatggctataaaagatgcatcaattcaatagacgcattgactcgattgttgcatcgactagaaggtcatatttatccttgttataaacccgcaacatagagtttgcgaggttactttcttgattaaagtacaagagtatttcagtgtttatttattataaccattattggatatccgttgggataagtgtttaacattttgaaattcatgttcatacacaaaatggtttagtaatatcgatacgcatcaagccaatgaataattaatagtttttcccataattattggttttgggtaagaaaccaaatagttttcatctaaaatctttgaatgtgaaaagtgttccaccacagcacgctgagataaaccctcaaaggaggataaggatacatgttggatatgaatgataactaagccatcctagaaggatttatataccgctcgttttgaagagtatatagtcagctattccaacataagggggacaatgtatacagctggtgaaaaaaaaaagataaaaagaaatgaattatcaatgatcctcggagtaaataatgtatattaagagtctaaaagataattcaattacagaatttagcgttgtaattgccagacgcatttgctgacccaaataaagtgatgaagtcacctataccagttgtaaattaaatgctccagaatataatgaatgtcctgtaaagaccaatttcaaactgctattgagtcttaagatcgcatgaagcgtaacagaccttggttccaaatataaatatcctcgtaaaagtgaaggagcacaaaattaaaaatgaccaaattgaggaaataaatattttgatgatctcttgaagagagtgaatgatctctaaaagagacataaacatgacaaatgaaacattcaagtacttgacaatgaagagatctagctagctatgtcatgtcaaaatataatggaatcaaaagcaaatcgacgtcgtaatatatttgcatgctatgagtagttgatattatagacaaaaaggaggatcatgaaagaaagtctattgaaaagtgtacacaaagtagtgattagccaaaaatggaaaagaagaaatagacatataattataatctctagtagagatatttggactagtagtctatgcacatgatgtgtaaaaccagtggaagataaatgagtctttatgtgaaagaatagtgaaattaatgagattttcagaaagatacgaaatgtattatgaagagatatattctcttgtggtggatgtaatatttttaagtatctaaagtctggcaataagacacggaacactggatatcacatttatatgaaattcttgaaagatataatctctgaaggattaattatatgagaattatgttctctagaactctactcgatcgaataaaaagaaatatgtaacatgacatataatcctataaatgtctatttatgttgagtttgtcaaaatatattgatcaaactaatatttgttttgaaaatcattaaaactcctagagagttatcataagtaatacgatgacaataatctatgataaaatatcactagataatgatatttataagtctatatgaaaaccatataattttgatcattaagattatggttattaattccaacgagatattgtatttgattgaaaatcatctcttgaagaagatgtttctgagggggagattgaatgatatgcgtggatgtaccctttttccttatcatagtttttatcccacatgatttttctatgacaaggtttttaacgagacattaaagaacacgcaaataatacacttgatgaatattaggaaattctatcaatcatccaaatgaatattatacactaatgatatttagagaaataaattagatggtcaagatgaataatctaaaagattcatgagcagcagaagaatggcgttgtactttatccagaaatttgttcaagagaagatttggcagacttattctcaaatactgtttattctctgccacatcttctaatcatgcagagattttatcaattcatgaagctagccgcgaatgtgtatagctaagatccatagttcaccatatacaagaagactgtggtatgtatgcagggaaaaagactccaacaattatgtacgaagataatgcatcatgcatcgcacaactcaaagacggatacatcaaaggtgatagaacaaagcacatcctaccaaaattcttcttcacacacgatctacaaaagagcggcgatgtacaagttctacagatccgttcgaatgataatctggctgacttattcaccaaagcgctacctactgctacttattcatcgtatcggattacgccgtctcaaagatctcgatgaatatactcataagggggagtaattgtgtgttgcactctttttcccttaaccatatggtttttcccattgggttttcctgttaaggtttttaatgaggcaacattttaaatactttacgagttatgatactataatggtcatcaagggggagtgttatgaataatagatggatgcccattataaggccaatcatctagatgtctctagggttttacccttctcttgtactcctatataaatgatgttttattcaatggaataacacactcatttcttctatctctttctcttgttataacaaaaaaaaagttatctatatattttttaaaaatgggtaaacaaacttattttacaatcattcaagtaaaaaaatttgggatttatttcgttttttttttagattgattatgatctctagggaattaagctatgcaaatttgtaagttttattaagaatattacttttcttgtggatttattcgtttaaacatcaaagaagaatgaaatcataccctcaaattacaagtttcaaagtttgtggagatttatgtaacttatccaataatgtttgttttcaatttttgaagaaaaagttcaaaatgaaaatttcctacgggcttgacacacataaaccacagactcgccaaatttctagtagacttcacatatatgcggagtaacttaaaaactttctagaaacatgaggaggtcaagaagattatcgtaagccgggaggaagagtgacgagagtagaaacaaaagagcattggtgaatattctgaaattcctcaaggaagttcatataaagacaacatggagtctctatggactcttagaaaagctcctactaacaattaggatgtttctccttttaatttttttcgcaacactccctaaagagacagaaacatattaactaacatcgatctaaggttatgaaactaaaagctaactttgaaaatccagaagcagctctatctttccaattaggcagagtcaaaacctttctaatgtctctctttcatttccaagttttaccttagaagtaaaaccacaaggacgagcgagaccgcaagtgcagcagaagaaagtccccaaacccaatatcgacgagcctttctacggtttaggatggccttagggagagcttcggttccgcttccgcggtgtttgtacctaaaacttctctgctttggaaacaacaatctctccttttggtgtttctctttccctgaaactgctaatgtcctaaccttttcatcattgattacttggtctgattctgaaggagaagtagaatttgcagcagctttcttcttcgcctttttctcacactcctgaaaaccaaacaaagaaataagaaacaaactaatgatacattgaaaaaatgggaacaagataatataattgccttgagtttcttttcagcttccttttgagctcttatagcagctttagcagcagctttctcttgcagcttcctcttcctttccatcactaaccgagctttctctaactgctcttctcttttcctctccttcaaagcttcttcatcgatctcttcttctttcttctttggtttctcatacactataacatcactcttcgtttctttctttcgtttatctgtaattacatttccatcttcagaagagttagagcttgaatcttctctattcatcttatgaaccttctcgcttcgctttatagtcttaaccggcactttcttttcccaaaaaatctgaaggtcagcatcttttatccggccatcttcgttcagttctctttcacatagtgaatgcgagattcttcttacgtaatcttccctaaaagccttatcatcattccaaagagtcatgaatctatcaacctataaaaagacagaaccaagaacaaatgctcaaatctctctctatcaatgtttcgtttagaccaaacaaacaaactaacctcagagctagcaaacacttcaagctctctaacatttccagaagcagccaattctttagctttacacataacagaaaggctctggaaaaatgcagcattctacacaaacacgagaagcatataccgaaatgttattagatctttaagatcacccacaagcaaaaattaacagaaagacaaatatcttactcctttgtctcgttgtatcctcaacatcttaatccttgcataaaatctatccctcttctcaagtatgtgtgccttttccaaatccaaaaccctaatgttgttttgactcttccacaatttgtcacttaggtcgtttatcttccaagtaatcgcatcaagctcattctttacttcattcaattccaaagccatagactaatgatgaggcaaaagaaccatcacaacattagattcaacaatgttttagcaaatcacacaaagagttagagtttaccttgacacgatttatggaagcttctttctcacttagaatgatcccatcaggcttctcagtctccttaagcatccaatcttcttcctccaaaccaatgctaccatattcaatctgatactgagctatataactctgcatccaccacaccaaaacacttctacagtcaaaaacctaaccgaattttaacgaatggttagataaaacagttgtattacaagatgatcaagttcctcctttgtaaaacaaagttgatcactagtagtgcaccggagattccgtagagcttcaagtagagtatcaaactccttcttcttctcttcaataaccattctatatccttcagattgaggaaccaaactctccatttgagtatacaaagacgaaacctcagccagttcggatttcttggcgctcaagacattgattcggagttcattacaacgaaaaatctcctgattagcttcatcgatcttggctttaatctcgggattatcgtaaacaggttgcttaacaatgtagaaagagagaggtttatctccagacgaatcctcttcagctgcaagtcccgatgaactatcaccaccggaaaaaatagtgtcttcttcttcgtcggtggtgacctcgctatttgtcaaagattggtcgcattcgtaaagaattagatcgtttatctcgggcgaaggaaccacctcgaagccatcacagaatataatctgctcatccattttgattatttcccttgagtcaagaacaagacatgtcaaaatgaaactgaggtcaagacagaaacttaagtctactaaaaagtgcaaaagaaataaacaagagatgtgttcccaataggccaatatactacaagaaaataaaaaatggtagggatttaatggaaaaaaaactggtggagatttttgtagaaaaatggaaaaaaggttttgaccaaatttataccaaaatatccttataaaaaagtattttataccaaaagaagtttttgaccaaccttttattaaattatttatatgtttagtatttaatattttatatctaaaattaaattcgaaatttaatttaattttctcttttaacatttcgaaatattattattatttattaaaaaaataccaaattttatttatttattaaaaacaaaaatgatttttaattaaagaaaaagaaaacggagaaacattttgctctccgccaccaccgtctccggcaccttcttctttatctgcgtttacttctttgaagatttaccttttgagcatcggcgagtgatgacggaggaaggtgacgaaaatgagaagaaggagaggaaaataaagatttacctttgagagtgtgttgataccaagcaaagaaaaatccttggctgtcgaaagaaactactggtggcttggagagaagatcttcagtactaaatggtgagaactaaaaaatgcaaataggctgtgagaggttttgatgatgtcgaggacatcaagaggaaaaaggaaatcaaattacgattttacaccctttattataggaaaaatcctagaatcatattaagggtaatgtagattttcttgtattaataatcctctcttttttatattctttctttttatccaaatttgttatgttgtggaccttttcctattctttaaattttaatgatttctaagttttgacaaaatactaattattttgcattaagctaatatattcattgataaaaaaaaaatctttcatgtttaatgacaacaaaactacaaaagtccgtgatgtttaatgacaaagggaaaaaaatgagaatatgtacaaaatagtcaaagttttgaggataattaacgaactaaccatatcctacagtaacttgtcggaaaacacgtgtaattacgtaaatattttttggaacacgttttttctaaaattacatttgataacaaaatatctagtattacacgtgtgatctttttatcatgctattttttcgtattacacgttatttataaaaaacacatgatattccttaaaaaaaacattttatttaatttaataactctctttcatatattattttctagtactacatgtctttttttattaagatcacacgtgattttttttttaaaagattcttatttcttagtaataaaagaattatattaaaatctattcatattaaacatttccataacaatgtgatatcatttcatttaaaaagctattattttaaataccaacatatgttttcgcaacacactatattttttgaatatcatgctattgttttattcgacaaaataatttttcaaacaaatatagttttgtaattaccataacttagaaggatatagtttgatatttatttcactcccacaccaccataaaaagagttagtttgcaaagaaaactagcatatagttattttcttaattttgtgtagaatatgattatttttaatattacccaaaaaaaaatatgtccttaagcttaggatagtcaaagtcaactcctgtttatataagttgactattaacttatctgaatttgacttgttaattagtaaaatcctctctttttttcttgcatgaattcatatgtaataataacaatacttatagaagattttggcaagaaaaagaagaaataaaatctaattatctgactagataaaccttatttcttttattcaatagataaattactgaagttattgatcctaaatgctgaaagagcatggccattgacccattacttgacataatttgagatagttctgaaaaacaaaatgtctaactcactaacatgtttagatttctttacccatattgttttctaaaatccatttgtggaacaaattttaatcaatcaatatatttaattttcgtcgtataccaaaattagtatgcgttgtattagtgttgtcgttatgtcaatctatatatttaaaattctatatcactctttttaataatataaaaattcagtgaaatgagttttcaaatgcaacaattattgctttaaactagtttttttttatctttgaaattttttcaagctacattttgacgctaaatataacgttaataataaaaacaaatctctattgatggtttacagggcaatatttaaattttgggtgcagtattaattgccaaaagagatgtttattaaagtaattagctatgttagaggactaccccaaaacaaaatgtgttctagcatttctttatttttgctatcaaaaagtgttctagcatttaattatcggttacactatttcttactaatggacaaatatatacgttacattaaaaagttatgcaacggacaaacacacaaattatatgtcaactagttttattgcttgttcaattcaaagctgttaattatcgaataacttagttttcttttaataaaatgtaggatataatcacaaaacattttagatagctttcataatatatacgtatttgtttttaaattacttgaccatttgttacaccaatgtttatcacaatatcaccaaaatttcgacaaaccttaaaacgttatacatatgaaagtttttttctgtcaatgtaatcaaacaactgattatgaaaacatcggctctttaaactaaaataaaaataaatagtagatcacttaaagtattttctattgaaaattttatgttgaaagaaaatacgaaattattttaaaatttcagttcttattattgtatattagaatgttttcaatgctgaaaataaaatatcttgtttaaaataaatttacatgtcatgagttatatcgaaagtatatttcgaaaaagacaaaaccgtagcttcatatcttatcagatagatggtgtgtagttcgccgacatcacgacatgtacgattaaatggaaaacatctattatctgaatcggtctaatttatgagagtcggacaaagtcgatttttcactgtaaaaattataaaataaacacttttttataaaaatgacacatctatcttttgaatatagaacatacagtactttttgttaaggaccaatctaacattcaaagcctccgtttacgtatacctataatgatgtcacctgcatgtctgtatttttttcctctcataaatattagaattttcttgaaattgtaaatataaataaaatttatcatcattatgagttaagttcttaattttttttgtgcttgacatcatctatcttcattcactaaattttgtatcttattttttatttttatttttatgtaatgaatgtttaaattttatccatcaaaaaaaccgttgttataacagatttgtcatatccatgatgtagaaaaaactgtgaatcatgtactctttacttgttccttgttgcatcagttgtgggcactattaaatatcccatctcctctcctataggtggtttttctaagtccatgttctctaatatccattacctccttagtatgtcgaagttagccggatttccggaggagagtagacgagttgaagaaaaatgaatatgaataacttttctttgaaaggtttctttttcaggcaaacacgattattgcttaagcttttgaggatgtacggttgtagtttgtttactcaggaacacacatgacatgccgcatgcgggtcttgcaccgaggttagataaattttggtctcctcctttgtatcattttctaaagtactggatatgcttggtcaaaacagcacagttctggtgcttcttgggtcttgaggaatgctgctggtgtggtcctatttgtatagtcgccgagcctattttcaggttctctcttctggatgcaaagaaaacgtgctctttggggatgtctcctacgatattgtgaaggttcttcttaagccaaatgactggccggtcttacatgactgacactttgttattataacttttaaatagctgggatgttgtttctgaatctcaggttaataacaacggtgttttcgatattgcatgaactggtggatcttttggttggttgcaaggtttattcgattgcgaaagaatgtttataaattatgttaccgttatttaatgtgttatgcaaggtctttttatgtatacatgaccacaaacaaataatttaaaggcaatgaagagagaaacccttacagattagagcttggttcaattctgtaaactcttcctaaaaaaaaacacattggctccctaatttgctatgcacacaaaggcactgcaaataaaataagcttgccaaaaacaagcaagaaagttcttattattatacacatagtcacaaagaaaaatgaatagactgtagttgtatacccataaatagattcagtaccctgagttctacagagtgattgacgcggggcttactagattatacagttgcggctttcggagacagaaaatcggagatcttgctggtgtagaaatctggttgtatcttgttctcagggctttccaacatagagattgaagtaacaccttcaagtccacaaaaacaaaatgaataaaatgttgactgacatagatggttataaaccgagttagtgtcgatagaggaaccgtttacagattagttatacccgagaggacgagtagagtcttacaaccgccattctgcccgaataaaatgtcagtgtccaatctatcaccaaccatgcatatctgtgacttttggattccaaatctgcacatttttttagcagccaagtaccatgatcagtggtcaacacctcattaaacagaatgacaaaaaaaggagtagaaagaaggaatatgagaatctgcaagtcttacttgtctgctaaatagtccatcataaaagttgagggttttccaacaacaagaggctcacgttgagtggatccaacaagagcaccaaccatagagccaccacctgagaccgcgtaatcacatcttaattggtcaaggatgaaaaatatggtgaacatagacaacaaaataacggtccatgaccaaacttacttaggcactacttttttttttttttatcctagccttttctcttataggagaggaataaaatccaaatgctcaaactaaagctaaatgaaaacagttttaaaaatgcacataagaagccaacctgcccattcttgagcatcagtaaggtgagtgacagcatctcggtttgtagcgatgaaaagacaccccgggttttcacggatacagagtgttccataccttccattaaaaagaagctgttagatcaccaaacgcagaacaaaaacatctataacgtatagctcaaccataaactatcaagaatatcattcctgaagtgtggaaggaaacaaataattggagagacctactgaattttgtagtagttgaaatagcgatcaaatccaaccacaacagctccaacctgcaaagcattttcagtataactatgctcagtttcagtctcaagaacaacaatttcatgttttctatagaaggtataagaaggatgtcatacatcatgatcatgctccattagaaaacctggcttcaattcaatctgtcttttaccatcatcctgtatttgaagaaagatcacagagaacataaccaagaccgggaagttaagtatcagcccaaacacaaatccgggatgctactaagaaaggtcacaatacataccggacctccaaggtattgaaaaccagcaagctctagctctttcaagataccttcctcaccaatcacatagacctaaacaaatatgcatcagaacttgcaaagacataaagagatactcttgatatgacattgtaccaccaaaaactgaatcttgagcattttgaatgaagtttaccttcttatcttttgggaaattaatagactgcaagtatgcagcagcagcaaaagatgaagcaaatatctcctcctgtgaaaaaaaatgataactataatcaaaaacaggcttagtagcacctagagtagctagattgtgaattaagtcactaaacctcgttaacattcaggccaagagtctcgaacttttttccatactgtttcctagattttgttgagttgtttgtcacaaaaaccaatctctttccctgaaaaaaaatcagtaataccaagaacaacaattgatgtaatggaagaaacattcaaaaagaatttgacgcataaccatttcacactttaaaataaattgaacaagagattcgcttaccaaccttggcacgaagcatatcaagagtttcaggaactccctctatcaatttatctcccttccaaatcacaccttcaaacacacaagaataaagaagaaagcaaagagaaaattcagcacattttggctattttgacaacctaaactaatccatgagacctatagaaaacagagtatttttgctatttaaggcgtctacaatggccaaaaagagaccacagcaatcttcttattccaaaacttgtaacatatactgttgtaacctctcatttgtagtcaatgcaaatcaacaccacaacgcataatagtgaagaaaaaaaccaaagatctaatcaagaaactccatcattatatcaactcccactatctacacataatctaaactaagtgattatcagatttcattttgtggttttgttgatactgaccatcacaatcgaagataaaagtttcgacagaatcaatgagctgatcagcgttctcaagctgttgtgtggccatagctcttggtgtaatattggaactcgtcattcgaagaggcttatggttgattttacgaatacagccgccacagaaagaagaagaacgataaccggagagggttttcagacagaagataggctttgagtttggtaagagagaagaagatgagaccggtgtaacagcagaagcaactgatctactcagcatttttctctctttttctctgtttccgcttcttttggtattttttttttttaaagaaaaaataaaaaaatttgattctgtttctttaacgtgaatatggatggtgctgacgtggtgaattgggtggatgtggtaaagatatcatcctaatatttcttagccaacaaattggatgaagaattgttggacacacattgtggaaaacaaaaaattattgtacaaacattgaaatgtgacactttatcaggaaaaaaaacattgaaatgtgacatgacttgcactttacaagcaccaaccaaattaggtctggacgtttacttggttacgaaatcggttatatttcgttttggttctttcatttttttagaatttatgatctatgtaaggtacacaaaaaaacttggtttggttcaggtttgggtccggtgcttcggctcacgagtttatgatccatttggatatttttcaggtatttccggtatatataattgtatttcgggtatttttgagtatccaaaatagttaggattggttctagtgggttctttcggttatgaagtttataatttactttttggttccagtttggtacttttggttcgattattttgcccactaaatcaaacacatagaagaagagataagctcaaaggtcaggtgttttgagaacttccattggagtagggtttaggaaaaaactgtactaaattactgggattgtatccatggaatgattttaggttcattgttttacctttgatgtaattaaatttaagtcacacaatttcttactactagatggggtagagagaaactttgttacctcttagctgtagattcattaacattattgcatatattttggtcaaaattcaacaatatacattaaagtgcctaaaaacgatgttgacctttttatgtgtctaaacaaaaattcatataagaaaatacacactaagacgaattatttgtacaccatttaaagtgtgacattaatcacattacaagcaagaaccaacacacacacgtgtaaatgaatagaataaaatgacgaaattggaaattaaatcttgagttgaaatgggtaagaaggccaatccttgagatcttcttcttgcctcctcaccttaaaatcatcatcatctacaacactctcatccaaataatcactatacttcaacaaaaacgctaacacaagaacaatccactctaagcaaaacatcaatacacacaaaccaccagagagtttaagtatcacttcaccgtcttcttcccgaacataagatttcaagaacctaaggaaatcccctgttctcgtgaatatcagaacagagacagcgccttggaaaatggccgtgaggactgtggctaccatgtgtgaaccgtataatctatcgctcgcggtggcggatgtggaggaggcgaagatcgagcagccggataccgcggttgcgattgtgagagtgtagaggaagataagggagagaccggagagagatgggaagagacggagggagattgtgaggaagatgcaacttgaggctgagcctaagaggatgtagttgcagagaaggaagatgttgtgtgtgttgcctttcgatttcgacattcccattttctcgaattcaagaagagaactttggtttttttttggggttttgatgtttgtttttgtgtttcttgataagttcactttgatttggggtttatatgcatacataagaaacaaagttgaggtaagagaaagtagagattttgttgggattaacggtcgtttttgtttttgaaaatatgaccgttatgacttaaggacgaagacagaataattcaattaaggtgtaacggctcgataactttttaatcttgttttttaattggtttttaatagtatggttttgtaagttttaaggtcaactatgtgaatgtcggatgtcccactgaagacactaatttgtttcataaaatgagatttataaaaattagtttattgggtagacacaattgataagaaattgagtttgctaaatatattatgatgataaataatacactttatttgttaatcagtttattaataaagtccaacacgtaaagggaatatcaattttagaatggtcacattagtttaaatgttaagaatagcgggttaatattctaaaagagttgtagaaaacgccatttgaaattgaaattcaacaatacaaagttttacaaatgtgagatattattgccaatacaaatttcgacaaaaatgtcttgtttcatatgggaacggacacacatcgcatttggtaacggggacatctttaaaaatgtaaatgattatggatataaattgaatattttgtaacatcctcctaatgattttttaaaaatatctttatgtcttataattaaagatctaatatacaatcaaacgtaacaaacagtttttaataacagtaatttgtatataaattaaaaaaaaaaaaactatgctatgacttttaaaaaatggtatatcttgtagtgataaagtaattaaaaacatgttagtcaaataaaaccatttgatgcatgaattttgactaaattcacaaaatttaatttttcaagataaactaccaataaatccttaatattattataaaaatatatactagtcatacttatttcattattttaataaatatacaaatgtaatacacgaactaactaccaaatattaatttaaatcaattttgagatgttttaaaattatttagtataaattaaaactctttttaacacattaaaattcgtggttggacactatatatatccatatccccagaagggattaagttacaagcaaacatataaaaaaccatagctagctacaaagtgaacgtattaagtcgccattacctacaaggctacaaagaagataaaggtatgtaagctttatatgtagatttgttttgataagaatgtaaatatcatttcaagaaatgaatgattcagagattacaaagtaaatcctaaaaaggctaaaaaatatggaagcatacacatttgaggatcaaatcatcactaaatccttaagcggtgaaactttaggcaatgttatgaaattaacttgatatagaagactcccctaaactaaacatggctagaaacaagagcaataagggaaagagagatcttcaaactgactagaaagcgtagtggaagtcccttcacatcaataagctttatatatagtttgggaaaacatttattttgttatgaggattccaattcagattttgttatgaggattcaaacatctatttttttagaggattcgaagcccatttagggattgaaaaatattaaaaattaaattaatagaaaaaaactcagattttaataaatttaatttgactgacacttatatttctcttcaatatataatagatataagatatatatccgatatatcgtacccacacttttctgttatcaaattcatagtgaataataaatcattcacacaatcacatatttccttacaataactaaacaaaaatattcatcaaacactaccatgatccatcacacaccacaataatgatattttcttaaaatttctaaacaaatagatcaattggaaattttcttaagcatcaactatgcaaattgaaattaaaagtataacttaaaatttatgataacaattttaaaagaaaaaatgtgcacatcgttttgttaaagactaatatttaattttaaactagaaatattatcttattatataaatattaaatacctaataatcatattatttttacaagaatatatgaaacaacgatccttgattacttaattcctaagaagataaactatctattttattatgttttgttatcataactcaaaatttatataatagaaaaaagcgcgctcactattttgttaaagactcagattttttgtggttaaatattacatgtatttgtttcccaaaatttacagtcatcaaaatgaatataaatccaagttaagtcaaattgcagttgtaagtctcatatcaaaaaaaaaaaaagaaaaaagagtaacagtctcaaacgtcaaaaacaaattgtgccttgcataaatcaggagttcaaaacaataaacgagaattagtggctttactgtaatgcttaactgacgccattttgagtagcatattttctttaatattaaatacataaatgcagttaaatgtaaatgtctttgttatcctttaaaatggtagtttctaagtcttttatttcatggaaaaaagtccgatgttttcttcatattaaacgctcatttcattaataaagcaagattagcagcaactaaaaaagccaatggtgcatatgagcttgtttctttcgttgggtcaaacagttgtatgtatacacaataaaccatcttttgcttttcggttataatcatcacaacccatttgctaatttttccctcaaatctttcctcaaaatcatctagtatatgatgaagttttaagaatgaattcagtggaaaacactttgtatgtaaaaaagcgtgtgatccacataaatttacatcaatgaccatacttacaaatcaagtttcattttttgcatcattgacctaagtttacaaatatattcataaactaactaaataatatctttcttaaatatatacataatttttggctcactgggcaatacatcaactattaaattctattaaaaaacaaaagaaaacaaaaacaaaaaacaaaaaacaaaaacaagaaaaacaattttttttaaaaacaattcatcctctctaatactctaactaacaaatcctgaaattttgacattcgtagcacaaaaatgttattgttatgagcaagtgacaaaaacatttttagataactcgatattgctctactctttcacaatcatttctaatcatttatacggaattgtaaagagcaaacctataaattaatgattcggtagtgaacaaattggactagttttagcaagagattaaaaaaatgatctaaacattgatgtagagagatgatgagaacaatattcgattttatgattttttttttaattaggtgattatacttctcaccatttttccatgtcaatttgattagtataaataaaataatttcaggaaattagtatattgattaaagatacatacttacattatatattattttttcacatataagaaacacatatatattattttgcatatttattaagtttcaggtatcacatagaaaccagaataatccattgcagtaacttcgaggcacgacatattcctcatgtttgttttcattgcagagttttgtgcaagcagtctcacataatggaagagttgccttttgagaaactttcatgcattgattcgggacacaatgcttaacacatacttccaccgtactcgcgtatgttgaaacaatcatcgttaataaaactacaatcatcaaaacactgtatatcttttttattgtttgagttgccattatttgaagagataaatttatgagtgttcaaagttattaaaattttgcttaggttatatagcaaaaaaaaaatgtaacaagtggattattgttgagttgtttctatagtttttactttatatagcaaaactagttttgactacttaaaattatttattttggaagtatatccgtttgatttttatttttttcataagttagtttttttgtttatgttgttgactgtccaaacaatctatcattccaaattcttgttgtcaagaaacatagaaatatattaatctcgttccaaattcttgttgtttaaaattatatatttttttagattcgctaatgagtttcttaagaatggattatgttgtgaatgttcttgatttaatttggaagaacaaagctcagaatcatttaatcatttcaagaacaaaactcaaaatcacataattgtttagaaggacgaaggacatatattttagcagaggaaataactctaagtctaaatgccttcttaagccaacataatctacgtttggatagaataaataaccggaactataagaccaattttttattgatgtatttcatgtcctttttatatctcaaaataaataatctcaacacaaacaaaaaaaaatcaattacaggccgctctacaattgttctacgttctcaaataacaaaaccaactatcgttcctgcaaaaatgaataaatcagtttttaaattcacaacatttttgtttttttgttgaccaaagccaaacatttttttgtcgaggaaaataataagcccaatatatttttttgtcgacttaagcccaacattttaacgacatctaataatataagcccatttcttctcagtccaagatcataagataagtgttaaataacaaaattagagattctgactaactacagatgtcattgtcatcctagttcctagaggtcatagttttgtataacaaactactctataaagagtataccaaagatattcaatacttattttaaaaatattaatttaatttttttacttatattttttttccaaaaacaattttgaccgtactaaattattatttttttagttccaacccttaatatacatatataacaattttatgtacctatctttctgatgcatttcaatattaaggtctttgttaagtgcaatgtataccaagcaccactcgatcattgtttcaagagtccaaaaatcaattttatccaaatatttgatctaatcatctctctaaagactagaaagaactaatattgttttggtccaaaaatccaaatgttggcaacaacaaactttgaaaaatattttaaagtaatatcgttacggtttctaatacaaatacataatcatatgttattttcttaaatacaacactattcacctaaattctactacaaaaactctacttgagttactggaatggctaatttgaaaggctacttgagcaaccattgagagaataatatttacgtgctggtcaagtctatgaagataaagaatcctaaaaactaagtacgccttactagttaaagactatcattgattaaactcaggatacaataatagtccgagaccaaattgcttttattataaaataaaataaaaattgtttttaattgaaacttaatttagaagaggtccaaggtaacaaaatcaaacatcctctcccattctacgacgcaatgaggatccctctgaagggggctcagccttcaccttatccaagatcctaaacactttaatgtcaatgattctttgagagaatttcttgaactgcatcatattagagagcacaacgaaaacagattattgagcttactaatggagtaaatcagtgtacactatgaaagctaatagaaaagtatcaagaataaagttgtagagaaagttttacaagggaaaagaaaaacatgtgctaacatataagaccaagtattaacatgaataacaataacccacataacgtaccacaaatctcttacgcccctgggatatgctgagcgactttacgaccgggggattagctgaagtcgccatgattaagagagtgtgcaaagttacgcgtttcctaaacaagaaattttgattccaaaagcttacaattaaagtttctacgtgcaaagatagcaattagggtttatcaatctagttacttgtctgagaatcaacataagccttgaaagtgaaacaacaaaagtaaaagcttacgaaaataagtttggttcttaagcttgagctagtatgagcttgggaggaatttgagaatgcggcagatgaatttaagggtttaagctttcttttattgtttctcaattaaagaggcggttaggtttgttctggttttatctgtactctttaaaatcaaccgatattcataaaactaattcattttcttgggccttaaccaaccttagttcaagccgaggcctatacatccttattgtataaaagatttttttgtttcttcttcactttttcggcattaatctctactaagaaaattcataatcataaacaaagagagaaagaaaactagctaattttttttgaatttaatgttaaattatattcaaagaaaaataaactgtttatacatataaatgcaaatattttttttaaaaaatatatcaaatgtgtatcctatctatccttgattttgatcttgccttgaagcaaaccacacttggattcctcttgggtacttctcttcacctctcacccttagcgtgcttaatcgattctttatgtttttgtcgattagcctgattatcttctccgtcctcgatgaaaacggaaaactagctaattacatggaaacggaaatgaaaacggcttttttttataaagaaattatgaaatagagaactaatagggcaagaacaaataaattttgattttatataattgatttgagaagataaagctccaccaacgtttctttttcgacgaaatacgcgcatgaactcttccatcattagattatccatcaacaaattagttaactatcaatgtgattttcccatgcaatttttaatcgaaaactaaaatcattacatagtttttttatttttttttttaagcaatttacctttctcaaatcatcattttccatttgaaatgaatttctctttctacactacaaaatttactagcagtacatatagggtaggctgaattttcagccttatactagttggaatctcaacttttcaccagagtcttttagccacttaaaaaaccatcataaaaaactttaatttcgataaaactacacatactttcggatttgttcttaaaactacgcctccaattgaaccgaccagttaaccgataatttttcatccggtttgacttacccagaatttaaccaaaattaatccgattttgattctattttagcaattttgaccaaaaaaatgtaaataaattgtcttcttaagaagtaaaagtatttttattaatttttatttgtgataaacaattaaaaatattaaattataacttaattttaacaaaacttaatatgacaaaataaaccccaaattatattttgagcctacattttgttataaaattttgataatatacaaacatatacattttccttttgccaatcatttctattttttataaacttaaagctatgtctttttttaaaacaaaatattcatttttcttgcaatcataatatatgaccttagaactttatatatataatgaaattcaaaaaatatgccaaatttatttttatataaatatatctgtaaacaccacaatcaaagtatatattatggtatttataaatcaatttttctttatagattctgttttctttttatatattcaagatgagttatatatatatatatatgtgtgattatgtgttttaaaaaagaaaataacctttgaattattaaatttagagtatataccaaatacatttatataaataacaccattgtatttataaaaagaatttgttgtctattttgttatattattttgcggtatatatttttattataaaagaattttggtaaaattaattaatttagtatttttatcaaaattaaataaatagtattcttcttctagagaatatattttctgggtcaaaattgggttaaaatagagtcaaaatcgaataggttcggttaaattttgggtaattcaaaccgggtgtataattattggttaactggtcggttcaattggaggcgtagttttaacaacaaatccgaaagtacgtgtagttttatcgagattaaagttttttatggtggtttttcaagtgactaaaagtttaggatggaaagttgagattccaactagtagagggttgaaaattcaggcaaccctacatatatcgtatgctctacaaaataaatatagaattgattaataaacaactttagttcccttatatgtatctgaattatcattaagaaagagtttatgtattggcatcaaaagcatctaggaagagtagaaggtatgagttttgacttgtgtgcatgcagtctctggtgctgttggatcggtccaccgtaaaccgagattgttctactagaaagcccgcgatgcttggtctccaatcctagaaaattgaagataattgatcgacaaaccaaagatcctcacatatgaatggaggagtctccccttgaagaaccccattcttacacatcagaaaaggagacttaagaattcgaatcagttcgtccattatctatttaatttcctttctcttgtaattgccgagccaaaagttaaataaaagaaggttagatccatttctctcgtcacttggattttaccaaaatgggtttagggttagattgaacggactgtacaacaattaaacaggttaagtgtttagcgcctaacaatttttttgaaaactgcatttagtatattctattttaaagccaagtatacttaaaattgcttgccaatccacaaaattttattttaagtaaggttttgacatttatttgtaaaacatattttgcacgtttgcaatcaatttgtgaaataaaattttgagttaacgaaaaaccttgcatatagaatatggatcttcgtaagattgtaacaatgataagtaagagtatcatcaaccttttattaacgagtaggagaaagacgacaaacaaaatgtatcttcaacgtgttattttatccacttactaattcaagatggcaatgttatttgtcttatttcttgccatgtaaaacagactgatgtcatcctgtggctgtattatgcagaaaataggatgtgaggaccattacaatcgtaaatctaaccaaaccattataaacatttaaaatgaaaaagtttaaaagctaaacgtgttaagtgtttgaacgagaacaatcgctagagaaacatagtaaaatttggagttgcgagagaagagaagaggatattttatttataaaaatatatatatatatatatatatatatatatatatatatatatatatatatatattatgacaggaaacttttgttgaaaattcgtcaaaatcacagtttggtaggagttcaactttttttttgtttctgtgctgaaattctaggagtggcattttaaccaaaccaaacccaagcttagactttaaccattcggttatgtctcttctcaacccaaatggttcggtttggttaggtttgacaacccaatatatttatttaattaataatattgtatattattaaatatgtaattatttgcacttttttttcatggtttatttgaattattaaactttttgcttaagctaacttatatcaaatttaaagttcaaacgataatgaacaaaataattctgtttcattacattgattagtcttctaaaactaaactaaaaccaaaccaaactaaagtcaaatcaaaccaaactgaaccgaacatagattgacccaaatcaaaccaaactgaaccgaacatagattgacccaaaccctaaccaaaccatatactagatcggctgcggcataaaaagtggtgatgatgttttattctatgatttatacactaaccgatgtcaagttggacttttccctgatgtagaacgagattggattttcagaagaacataaacttcttaactacacatctagcttggttggtataccgtatctctaaattacaatttatttcccttagataataaaattcttaataatttgtaccaatcgtcattgtgacgctggtttatgttttcctacatttgaaggcctccataggcccaatggatttctaattatatatcttcaattgctggtataggtaacaagaagaagaaataagagaaaaaggaatttacatgacctaacttggcgaaacgacaaccacaagcatggcgatgtccaatcttccaagagatttgttggaggaggtactctctagggttccggtaaagtctatagcagcagtgagatccacttgtaaaaattggaactctttaacctacggtcagagcttcacgaagaagctctatggtaaaacaatggcaacaaaggaaaaggagtttctggtggtcatgactatggatttggaggtttatttaatgagggtcaatctccatggaattcataaagatgataacaatgttaaatcatctatcatgcaaaaagctaaactcattaggctaaatgatgatcgagttcgagtcgatgatatatgtaaagtctttcactgcgacggtttattgttatgcatcactattgggatcaggcttgtggtttgtaatccttattgtgggcaaacaaggtgtatcaaaaccagaagagattaccatataaccgacaattacgctcttggacacgagaagatgaagaacagcccacttcgtaactacaaaatcttggtgtttcatgataaatccttcctccaaaattcttggtttgaaatctacaattttaactctgattcatggaaggttttatatttcacttgtgactggaaattaccgttttctcaacttgttgtgtctctcaagggaaatacttactggtttgctcgagagatgtatatacacggaccaagaatagatctccctgatttcttgatttgttttgattttacaacagagagatttggaccgcgtcttcatctgccgtttcactctcgttgtgttgatactgtgactctcgctagtgttagagaagagcagcttgcggtgttatttcaggactcaaaaacgttgatcctagaggtatggataacgactaagattgagcctaatgcggtctcatggagcagcaaggtgttcttagaagtgaatatgagtccactcactggttttcagtttaatcgtagctttgggagtttcttcattgttgaggagaaaaatgtcgttgtggttcctattaaaggagggcatttcaaacgaaacctagcttacatcattggaaaggatgaatacttcaaagaagtggatcttggagtgccaagttcatatatatatttttccccacatgtgtgctcttatgttccaagtttagtacaaatcaagaaagatgcacaagtgatgctgcaacaccataacgtctcagcagaaaagcatcatgagttttgtgcatctttgtgagttatttaagttatagatagagctcttctatggcagtacaataaactgtttccttttgctcatcttctattattaatttgtatgtttaccattgttctcaggtaactcaacatatatattcccgatggatgacgaacaaaaatactttgcgtcatgtgtttggcctttccaccatttcttttctttttcttttttcttttttgaatatcaggaggttctgaaccgaaacccataatttcccaggcgcaaaaccacaacatgtaatattagtttcattccagcgcacccgaatcgacgatctttaatctctaggttctttaccaattgagcaaacgacacttgatccttctatcatttcttgatacagtaaaagggcatcttggaagcttcctttggcatttgctagttagctgagaaactaaaggagtattagaagatcatgttttcgtttcaagtatctgctttatccacaaataaattaaatgcaattagctatacatgccacatctaatcgtttcgggggagtgcatttgttgatatcaattatgatggaggcacatgttcctttgtcgtaatagattagactctggaattgtgacgagaaggctcttttaattatcacaattacaataaataaataggagccatttctattctaaatatatgacacagcacgtttcatggtacgtctttagcttttccaaagagaaatatgttattttcaaaacttgcatcacatcaagagggcatgtaagtaaatgattaatctaacgcaaaatcttttttgttctttcttttgcttagataaaatattaatatcaaatagtccacaaagtggatgatcggaaaagagttttacattgtctgaatcgttacaaaaccaaaggaaaaaattgacaagaaagattgcttggatcaatacaatataggttaaaattaagccggtttggtaaaaggtgttaccaatcaaacccaatatattatgcataacgctgtacatggtaaacaatgactaacaagtgggtcatagccttggtgagcccggaggatgagtgatgaccctttgatggtcttctcctcgaatcgctcggctgcatttgaacttttttttgaaatccaatttgtatcaacccatctttccctcttactgcaattcaaaaacaaatcactaataagaagagttttgctaacactttttagaactatctaaaaatttgattagtaaaagtttgattatggtcttttaaaaaatggtttgttaaggagcatgactccttgaactatccccaacgtaactgcacatatatgattttagaagaaacaaagaatctaagtaaatccaagaatataaacatcaatgaaacaagtataagcctaacatgggtcagccttctatgttagccaagtataacatagaaagtataagcctaacatgggcttatactttctatgttatgttctttaatgggtcagccttatttcctccgcgatccaaacaggctaagaccgcgaggcccacatttttttgggcttccttacatgggcccgaacccgccccgcaacatcccaaaacgggccaggcccgcggataagaggcccgattgacatctctagtttcaaactatctaactacaaattattgtgaaaccaatcaatctatatatacatctatatatacatttttggtagactttttggccaaaaatccctatactatttactattaacattcaggtccttacaaattctatcaaaaccaaatattttatgactaaaaacttacaaatcgttaattttcattaaatagtttaatcaactctttcctaatttttcatccttaattaaatctttctttattgaactatatttgattaaggctaatttcctaaaatctctatatcgatattaaatataaatataaaagaagtcaataaagatatttgttgttatatctaatttattttgactttatatataaaatccatatagttaataaaatatttgatttttcttcatcttatgtaattcatattttttaaaacaggcatataatactcaatcgatgaaaaaataagtgtacaagatcccacattgattaaaaattgggatatcatttagagacatactataaacaagtaccaaaatgaatctgaatatgaatgagcaggaactttgatatatcagacatctaaaattaaaagtgttattcggtttactccgattttttattttaaataattaaaaccttaaaagttttaagatattatatatatttcaactttattaaaagttaagtattacatttaataattttaagattttatgaagttttaaattttgtaaatatttgaactttataagaagtttaaacatttataaatacaaaaaaaaaatatgggacgatatagtacaggtgaaatcctagatgtaaaatcaatatacaattatgaagtttggattgatactaaaacttttttgaagttttcaatattataaatattcgaacttcataagaaaatgacaaaatgatgtttaatttcacgggacgaggttatatggtgggatgggtttggattgatattaatacgggatggtatattatgaatgtatctatagatcatcttaaaaacaaaaatttaattttttatttaataaaagtataggcctattatatacctcttgaatatgttatttgtatataaataatattaatttaaataaaaatctttaattttttaacaaaaatatcaacctgcgagcagcggtgtaccgcaggtcaatctctagataatacaagttttaaatcgttattacccctaaccacaaaagcaaaataatgaattttaatattatgtgtcaatatcatattattcatatacaaataataattcttataaaaaaatgaacatattcatccgaggtgtcccgcgggtcaatatctagttttgctagactttttggccaaaaatccctatactatttactattaacattcaggtccttacaaattctatctcaaccaaatattttatgtataaaaacttacaattcgttaatttgcattaaatacttcaattaactctctcttaaacttttttcttaattaaatctttctttacagaactatattcgattaaggctaatttcctaaaatctcaatatcgatattaaatataaacatagaatttttctgtcactatatttgttcttatatctaatttatttttactttatatataaaatacatatagttaataaaatatatgattttctgcatctgatataattcgaaaacaaataaataacttaaaagtatatttttttaaagtaataaaaattgtccggaagtatatcatagtatcatacataaaaaacaatagcatgtatctataaatcatctttaaaaagaaattcaattttttatttaataaaaatatatgcatgtgatgcacttcttgaatatgttatttatatataaataatactccctctgtttcataatataagttgttttagaccaatttttttgttttacaagaaaagttattttctagtttctatgcaaattatatgttactttaatattttatgattacttatattatttagtctcttttatgattggttgaactttttcaaagtaaatattcttaactgaaacaacttatattgtaaaacggagggagtattaattaaaataaaaatcactaattttctaacaaaaatatcaacctgcggtttaccgcaaatcaatctgtagataatacatgttttaaatatttattacctctaaaaaaccttaaccacaaaaatactgaattttaatattaaactaatatacaacaaatatcagaacataaaacatgaattatccaaactttacatagaaaaaaaatatatgtcaaaaatatatgccgtgaattcgaaacttgtgtttgccaaaacaatcgcacatttgcaatttcgttaaatttctgtcttaaagacataatctttttgatcatttagcttccatagctaccgtagtatctaattccttcccttagattttgatttctctcattttatgtttagcgttaacgcaaacgagttcaaaattttgagttttcggtttcttatttttagatacatgcctcatatttagacttttgctggtatcttgcttgattccttttgcaatttctcttgtttaccttgaaatataattttgtattgattgataatacacttggtgtgagcagtttttgatgggaagggatcaaatggataacattgtggaatctttgcaattagataagagtaagttcttagaggaatcgagaaagatgacattactaagctctttcagccatgtctaaacattttcaaatgtacagtattaaattacattgtagataaaagcgcgctaacagctcctcgataattatattacaaaaaaaaaacgtgcggtttggcgtggtttgccctagaatttttaatgtcttagtactccaatgttttttataaaatttaatgttggattttaagagtgatttttctatgattaatatacatataaactaaattccttaattattatttttgatacaacttaaattgattcatgcacttacccttgctatacagaaacctagaaagaaaatttgaattttggcatttaatcttcacacacattattagactttcgatttaattcaattaaaactcttttttcttacacattaaaatttgtggttggacactatatatatccttttgctttgacgggagttgtgaaagcgacaagcaaatatataaacgaccttatcaacaaagcaaacgtatagctacaaacgattgtgagcttttatatcaaacaatgcaaacatatagatcctcataactaacgtggtacacccatatatataacttatatatttgtaaatctgcttaaaactttacaacttacggcctttatacctttagatacggctatgcaactatacttttactggatttgtaggtttgcatgcaagatttaagtgccataaacctaaagcctaagggtcaatgtaaatataaaacaacctaaatctagatctttatatcactttgctcttttcatgatctctctcttaagtttggttttcccttctttcctttcctctagtgattcaccacctctgtcaccgtggcaagaatgcatagtatgtctgcctatttctgaatgccgcatgcgattttaaccacacaaaataagagggaatcaaaagattttttagaatagtataaatttcattattattttaattgatagactctatggaaacagccatttttctgaagaaaaaaactacggttctagcctcaaaactatcacgttatcttccatgtcaactgtcggttacgcacaatgttattttagtcaaattttaatagatggaaatggtcactatctttgatttattccatatatcatatatgtgtcatttacttaatttggggactggggttaaaacgtggctactacagcaattttatcttaaactaagtaagcagctccttggaaggtaagatagaccgatcaacgtacgattaagtatagggtaaattgcaggccacacccgttgaccatgttttatttccatggattgtcaaagtcaaatgtggttttcaccatttgtcttttcgcctgcaaaatgacgcttctgcccttgcgcttctctcttagcaactgttgaaatgtacggtttagtttagcaggtttagttacgtacactgttccggttcagttgaagattttttgttcacgttgacgcgatcggttccgttacaagtgagattattccgaagtgacatcaacatttaatgcccccaaaaagtttagatgtgactattgtcacaattaatgcaaaatcatcattacatcaaataatattaaaaaaattattaataataattaaaaaaaatttgttgagataaagaagatgaacccaggaacaaagaattattgcgaacgtacattgctgctgaagaagtgttgatcttgtttttgtaccaagtttggagcattgctcgtgtaagtaatgaagttcttttaagaagttttttttatgtcatattaggatcttgattgtgttcgaactccatttttttatcagaatatttgcaaaatctatatctgtttgtttaaaatagtcaaatgataattggtatttaggtttataaatgtgtagtatcgacattccatttgttttttatatgtatagtatttttcagttgcatttaatgtgtgtctcctgaatttatgatgcaggtgggttatggatattcccgtatttaccatggtcggtgagtggaaatgcaaagaaggagaattgaaatttgaacctgaggaaggcatctttggtcgttgtgtacgcgttcaggaaaccatgacgtacacggactttgtccgtacactccgagaggctttcagtttgaagtccaccgagatcaatcccataattagctactggatgccgggtgaaatgtcaatgctgatagatactaaacgccctcctgtatacattgacagtcagatgggtctcgagacgttttttttggttcgtggtgggtatctttctctcaacttgtttgtctctttcaataatacagtgaaggcgttcgggaatactgtctctaggtctcatggtgaagtttctgaaagtgaccgtgtgtttgatagtgctacaaatgttgatgaaaataatgaggatgcagaggagcaagccgatgttgaagacgatacaacagaagaggatgaattggaggagggcaacgaagatgatgatgggtgtgatgattatcttggtgtggatggatctattgggggaagtaccctgtatcctaccacagacggtagtgaaggtattggcgaagaatacgattacaacaagtggaacgatgtaatagtagaagaatacgtacaaggaaatcttgaggaagacgtcagtctcactcaacagactgctcaacatccagggaaattcagtcgtttattggaaacgtgtacgtacacgggtgttagtgtacctggcggagatacaggggaattcagtcgtctcttagaaacgtgtacgtacactggtcttagtgtacctggcgaagaaacaatctctcaattgggttacggtacacgctgcgaagggcaaagggattccaatcttatttgtatagacgaagtcaccggggatgaagtgatcgaaggtattggagcttcctcaactgggacacaaaatgataatggggtagttaccgcagctgaggcttaccaagtgtataatgaatttcctaagttacatggtggcgagttggcgaatctcggtaacgatgctgctcctgtgttcgatgacttactcaattttcgagctgatgagacacaggttgaaatcagcaccacaggcgaaactttgtttgttggaagtgtttttaagaatagaaaagtcctgcaacaaacaatgtctcttcaagcgataaagcaatgcttttgcttcaagcaacctaagtcatgtcctaaaacattgaagatggtgtgcgttgatgagacttgtccatggcaattgactgctcgcgtcgtgaaggattcagaaagtttcaaaatcacttcgtatgctacgacacatacgtgtaacatcgactctcggaagaactacaataaacatgctaattataagctcctcggagaagatgtgaggagcagatacagttctacgcagggtgggccgcgagctgtcgacttaccacaactgctcctaaatgatctgaatgtgcgtatttcatattctaccgcttggagagcaaaagaggttgcagtggaaaatgtacggggggatgagatagcaaattacaggtttttgccgacctatctgtatcttctccaattagctaatccgggtacaataacacacctacactatacaccagaagatgatggtaagcagcgcttcaagtatgtctttgtctctcttggcgcttctatcaaaggtctgatatatatgaggaaggtagttgtggtagatggaacgcagctagtcggaccttacaaaggatgtctccttattgcatgtgcccaagatgggaacttccaaatattcccaatagcttttggtgttgttgatggtgagaccgatgcttcttgggcatggttttttgaaaagttagctgagattgttccagacagtgacgatttaatgattgtctcggacagacattcatctatatacaaaggcctaagtgttgtttacccgagagtgcatcatggagcatgtgctgttcaccttgagcgaaacctctccacctattatggtaagtttggtgtgtctgctttatttttcagcgctgccaaagcttatagggtcagggatttcgagaaatattttgaactgttaagggaaaagagtgctaaatgcgcaaaatacctagaggacataggatttgagcattggacaagagctcactgtagaggagaacgctacaatatcatgtctagcaacaactctgagtccatgaatcatgtgttaacaaaagcaaaaacttatccgattgtttacatgatcgagttcattcgggatgtcctaatgcgatggttcgcatcgaggaggaagaaagttgctaggtgcaaatcttctgtgacacctgaggttgatgagagatttctacaagagttgcctgcgtcaggtaaatacgctgtgaagatgtctggaccgtggagctatcaagtgacaagtaaatccggggagcattttcatgtcgttctggaccagtgtacgtgtacgtgtcttaggtacaccaagttaagaatcccatgtgaacacgctctagcagctgcaatcgagcatggaattgatccgaagtcttgtgtcggatggtggtatggccttcaaacgttttctgattctttccaagaaccaattctacctatcgcggatccgaaagatgttgtcatcccacaacatatagtggatttgatactcattcctccatacagtagacggccaccaggaagaccactgtccaaaaggatcccatctagaggtgaaaaccgggtatgtactaacatcgttcattcatctacttgtattttgagtattaccatgcggagatttgtaacttcctgtctttgtcacttcagaaaaagagacagaaaagacttttaccaaatcagtgctcacgctgtcgacaagcaggtcataacaagaagacgtgcaaaaatccaatctagttccggtgacaagtttctgagccggccaatatagtgtacgcttctgtgttttctcggtgtacgtaagtttatatataatccacctgtaactatgtacgttgtgtacgtacgtttaaactctacgttcgtataactatgaacgtttttgtctgtgtacgtgttaaagttcatgtaataagggtacacagaggtggttgctcaatattttgagtaatttgaaataagttttttgaaaatctaacttattccccctcttaaatgaacggagttggagacatggttgggtatattgtggttgtgttggtatttaatggaaaggacgtaactgttgctgtttattgtcaaatcaacgttatgattaccctatatgacggttaccaggctattaccaaaaatttgaatcaagtgtagttgtaaccgcattaataactgtagccgttccagatttcctctatttaagtctcctcccttccttaattttatccacaatcctcattctaaacccatttcttgtgccggcagttatatcattcacaaaaaaaaatttagtctttcgaatcgcttgttcttgctatccgtgagatggaggggtttcatacggtctcagaattgtgtcctctgatcactgggtggcgaatttatgtctttgtcgtgagggtcttcaagaaggttatatcgcccaacgtcttcgaactcggccttatcctggcagattacgaggttatttccgttaaattattatgtgtttttctcgttcattcgcttaacttatatattaaactctctactatcatgttctgtatgtaaagaataaccgtattgaggccatcgttgatcgtcgccttgctccgttttacgaagaccgattcgttgaaaatgagtggaagacgatcaccaccagttccagatttcgatttcactcccttcgactacattttggataaatctgcttacaagaacgttttagtcggtgaggaggaataactctgacgcttcatttattacatttttgaaaatgtttgtttattatctttgtttctccatcatctagatgtcattggagcgttggttgatgttggcgcattgactacagactattacggtctcaaactgagtttcaagttaaaagatagatagtaagtgttcttttcatttgttttatttacaatgtcactctaaacgctaacagtccttatttctaacgtagcaatgaagtcttggagtgcgaagcccgcaatcaacaggcggagtacttggatggttactttcagagtttgggtaagggaaattttgttgtcgcactcagcttttggcgtctaactgaactgtctaacccgaagcttgagagccatggtgctatttcaaaggtggttgccaatccggacagagaagaagttgcggatatctcgatggtggttttttagctagagggaatgaaccattattctccgttttaatataatataagactacatttcaattaagttttctttcccagttgttgttgttgtttccataagaaccaaattacatttcagtcgttgttgtttcttgtttccgtttaaattttaatctaatttgttgttttatgtacgtgccttgttttattgttcaaatcctctcgcaatgtacgtatagtttctggtgtacgctatcgtgtacgtatattagttttggtgccttcaacatcaaaaactgttagatttatacttatgttgtgtacgcaatttcccaatgtacgataaacgaagtttaatgtactatatagtgtacgtacacgaagacatctagtaatacttaaagtggtaattcattcaaaagccagaaacataaaaaaggacaggcagtttatataaaaggaaattcataagataagataaataaactggaacgattcaaaaaacataattttttaaacgaagcatacacatgtgttgcaaaatatgtgtgcatccgtcataccaaaagactcgagagtagagccgagtagagtagcttagaccttagcagctttgcttctagtagaatatagccatctccctggcgtactagtagaaaaaacaaaccctgcagccatgatggaacgtgcattgccctacgcaactcggcgggtggacaaacctccaagacctttcccagcggcgagcattttcagtgtgaagctggctgatgtgatacatcaccatctctgcaaccacgtggccagcttcaagggtgggtgtcatttcccagaacttttcgctgatagggaggaaatccaagtgattaccggtacacgtaaggaacaaaccggttgcgaagcaatcaaagggatcagataaagcgaccgttgtcatgactgaaaggccctgagctactgtcacgaagttgctcgcttggcgaacaccttcaaggtaaaccgccgggatggatccacgttctacaagcacctcgaagtatggccggaagggagaccccggttggagtaacgacggccacgtcatgaattcatcgattgcaagggtgttgatgtcacaactgtagtctggctgacggggaggtagttgacaagtatgcttatggggtttggcaattggattcctaggtacaactcggttggaagggttagcggaggtaggaaaggcattgtttttcaaacgaggaggtttagacggattcgtgtattcaactaagtgtgtttgtcatgagttttaaagaggagaataaccatcaatgtaagtgggtgggtgacgtggatgtatatttagtgcatcatattagtaacttttaatttaaacaaattcctgtgtacctctcataatcgcgccgtgtacgtctacaaaatactcattacgttctctgacagaaggttgagttgacgtctgtttgtatggcatataagtggaacaatatggcttcatgtatagtgctatattaggggtcaacgcatttactaacaatcttttcaaataaacattaacttacttattttatctgccaaatcaattgagtacattgctcggtaaccgtgtacgtctaatagagatattaatgagagtgtgatggaggtcacttctagagtgtatttgacagcgagtaattaatttgaagcgaaatcttctatatatgggttatacgacgtcaaatcaaatttcctttcgtcttcatttacaaatatcgtcgctcactatgtaatctttatagttggaattaaactatgtcacgtgtacattatcatatatcgtgtacgtagatattttattattttattattttaatgatgtctcatattagagtactttgagctagtatgtttgaatcaattacaaagtggtaatttaattaaaaacaaacttccattactgataatcaacgtaaaaagctcacatattgttgcatggaaaacttataaatatgacaggatcgtggcgaatgtgagctctacaggatctggctaatccgtttagcacacaaccagatgtaacattggttgcaaagattattgaagagtctcgatctaatgtaacacacctctgcgcattcaggagtgcttacgtcaacacattccgggaacgaaaaactgttagcgtatgtgtattttaaagtattaccatatttctttatatcttctagcacctcctcacaaatgtcacgtgcgtcctccgattccaaagcataatggttgcttccgaagagccgaaggtagacaccacccatgtgagcattaccagcacatatgtaaagaattgcgcatgcaagggttgcagcggcgttccttggggcgattcgctctaagtgtaggatagctccctggatgtcagactcatgtgtaacgagacgcagtccttcatggtaaatagccgtggggttaccagcttgtaagcaccgtttgaagaagggtctatagcgaccttcggagttgatgtcatttggatcgtggcctgccgcgtagaagtcatcgggatcgtcgcacatgctgaaaatgtttgcatttttgaggacatccggacagtagacaatgtctcttccacgaggaccggatttcaacataggtccgaggtaccaccaacatttgtcagccattttcttggctatcttcgcaagcaaatcgtcaggaatatttgggtttgtcatatttaggagtaaggtgtttcgagaaaatgaaatttgaacacttaaataagcatcattgaagatatggttgggtaagttatggttgtatttattgcaaaggtattaagtgatgatgtgtattcatattgtcaaatcaaagtaatagtattccatatataatttgttatcgttgttatgagcaacctctttttattaacagcttaaaactagacgtgtacgttttactgacggtcttagtgtacgtccacatttacatttctacatttactcaacaaacagtgtacgttgtagtgtatgttttagtgaacgtccacatttacatttctacatttgcccaacaaacagtgtacgttgtagtgtacgtccacatttacatttctacatttgcccaacaaacagtgtacgttgtagtgtacgtttaagtgtacgtccacatttacatttctacatttgcccaacaaacagtgtacgttgtagtgtacgttttagtgtacgtccatatttacatttctacatttactcaacagacagtgtacgctgtagtgtactattagtgtacgtccattcataaatatcaccatttatgagacaaaccaaagacctcatacgtttgcatgtgttattttttagtgtacgttagagttgatatctcatgctagtgaacgtccatatctagttttccgagacaaagaaaaaacctctaagtattatttggtagatgcacgtgtacggagttgtggacgcttagattttaatatccaaatttacatttactgcagtgtctaaatatcatatgtgaatttggctgaaaaatattcaacttgagaaacataacacaccttgcaaatttcttaagcaataatataatttcaacataaacataaacaacatagtagaaggcttatcataatttgaaacatgacatagcggataacataaacaaacatataaagtagaatggaataactatagcatttgactaacacgcctggcacacgaccagaggtaacagcggttgcaaacgttttggaaagctcctgataccatgtaacaatataaggcgcaaggaggcatactaattccatggctggtaggataagagaacgtaggaccatatgtattgctgtatggagggtcaaacttctttatttcctcgatgaactcatcacccaaaactcgagtggcaaccgagtccaatggataatggttgcgggtgaagagctgtagaaacaagccgcccatataatcatacccagcacatatgaatacaatggcgcatgcaagtgttgcatttgctcgtactggagcatgacgctgtaagagcctgatggctccattgatgtttcgttcatgcgttagaacacgaataccttcgtaatacacggccgtgggattattagctgcaaaacaccttaagaaaaatgttcgatgtcggccttcatcagcggatccggagggattgtggccccctccagcttggaagtcatcgggcgagtcacacaaggtgagaatattggcatctttgaggacatccggacggtagacaatgtctcttccacgagtgccggctcgtaccaatggacgaaggtcggaccagcattggtcagccaggttcttagctatcttcgagagtaaatcgtcgggaagagtcgggttaaccatgtttgaaattagatagtcagaggtcgtcagtaatttcttcactttaataaccactactgtgaatttggttggggcaattacggttgaaatgaatgtcatacttgtgttggtaagcgttggctgtcaaatcaatttatcacttgagttatgttataaagttaatatgcagtgtacgagacatatagatatgtacgtacacatttacattatgtaattataagtgaacgatgtgtacgacaatatgatagaggacaataaattaacttctgacaatctccaaattaaatgtagttgcaatcatatatataagtcaggtttgttcataataattggttgcaaagaaccagaatattgttcttggacgattaaaccaagtgcacagtaccggcctcccgcttgccgtgctcgtagatgtcaacggagtatttctgacggtagaagaccatatctgcttctcgaatggttgtcagatccgaaaaagggtgtccaaacgcaagcaactccaggaacttcatcgtgtatggcccgcaatctcctgtagttgggttttgagcaaccgtaggacaacgcacatactcaaaaggttcaactgagtacggagaaatcaatacatcctggcacatcgctctgactaagtacggcatcatttcgcaaataggagtcattctcgccttcacagccgactcccgcgtgtgcgatattaaagcgtcatacacagttattagccgttcattaaggttgattcccaaagcagcccaatgttcactcttccagttcatcggagcatacacaacatcgacatccttcatccacttcatattgggttcacggtttatgtgaactccattagcaatgtcggacagtaatttaccccatttgaacccgttcttattaatacacttcttgaagtcgcccacccgcttggtaagaagatgcgtcagcatcatgtccaatacaatacatctgtttgctatcatctgttccccgttcttgtgccacatcaacattgccatcatttctaaatgctgaaatgttcaaaaaatatatcagtgtacgtacacttccacgaaaaatttaatcatctatgtacaatttataacaaggaatgtacgtatataaatgcaacgtaccgtactttcgacccattcaccaggtgttagaaggttcgcaaaaaagtcgttgggcacttttcgaaacccgaaaagagtgtgaatcctgtaaaatccagaaaaatatttgataacaaccttaaaaatgatgattgagatattaaataatccattttactataatgtacttacacagagggtcctttaatgatattgctgaattcctctacttttgaagggtcaaccacgtccagggggttgtatgagacatttccagccctgataacaacctctatctgttgagctggtacatcgggcaccaatactgtttttgccttaaaaccatgaggatgggcatcatcctgttcatagacaagttgtttcttcactttctttggggacgattttttttcttcttttgcttcgacagcagcagcattgtctgattcatcctgttaacaaatatgattgtcaacaacagtttcatacgtttttctatgtttaaaataggtacatacattatttttaggaatatcggtcttgtctgcttcatctgaccctgggttaggatcctcagtttctacagacccctcgacaatacacggctcttccatgactacctgtgcaagttaacgtacacaagtatatataatgtacacatataatcctatgtatgctattccgaaaataggaattgaaacacacaaattgttacctccaaatcagtggctgcagctaaatcaccaacggctttggtatccaactcccgtatgacctgcataatataaattttatacatttgaacagtaaataatacattttatttgttgcaagagttagcttacattgttaactacttgaaatggtgacgggggatcactgtgggtcttctcaggtatttcaacttccatcactgtcactaatttggattctcctgccgcctcaacctgtagaatttagcatcggaaagaaactttttagtaatgtatgaaacaatatatatgtacacagaacatagtgacaaaaatgtacgtacacttgtggcaggtacgtgagctgtgtctccatcagaaggctcataagtttcttctgactcgctgccattagcttcagtcgatgcactggcatctcttgcttcttcctgaaacaaaaataatttgcaaagtcttatgggcgtacacatatggaaaaagaacaagtgactaacacatacctgtgcagatgttgaaggtaaacctgatggattgtctaccatctctatgtcagcatcagctatttcatcggcccctgtatgggtaccaactaagccaggttcagcaacatcctttggtccattatcctgaaacataggctaccatagagttaagcgttagataagtgaagaaattaatgtaatagttatgcatatagtcatggaaatctgtatataacgattaccagaagatctacctctgaaactcttgcagacacattagatggaacttcttccatctcggtgtcaacagtagcttcttccacaggcctctcttcctgtgttacaaagacagtcccaaacattgaacctaagcagacagtcttaccaacaacaacatttcctctatcctgaaacatagtttaactaacttcttaagcgaatatgtacgtacaccatttaaacagattgttaagagtattagtagacgacataccagatgggattgtgtggatccagcataaggaactattaaaaatccagtgtctaatatctcttcttcagcggcagaagaattcaatccatcatttgcagtaaaatcactttcattattagcgccatcctgtatcgaaccagacagtacagttatacatatggattataaaatatttagcaatgtacgtacatgacttacctgttcatcaatgaatccttgcatatcttccttattggaatcaggctcctcaatagtgtcaacagcaaaagaaacatttttcttcggctttgaaggttttcttcttccgccgaaagcagtggtatgtactccagggacatccaaatcttcctctttggaattacagccaacagaaagtgcaggagtgtccacatcatgagaaacacgagtcagccttgaagactttctcgttccagtgcttccttttgtagacatccttctcgatggcttcttcgcagtaaccggtgccttatccatagaagtaggtggttcccgcgaatcatgggaaggtatggtttgttctggccttttgccttttggatcaagggcagcacgtatctggtcacggacaaagtctttcatatcttcatgcatttgatacatttggtcttccagctccttcaaagacctcctcatttcaacaataaacctctcaggcacaggctctccaaaacaatcctcagcagtctcttctttatcatagtccatttcagatttctggtttttcatagcaggttctttagggctcgggcccggtgcatttcgtttcctcttaacatctacaatagaccagttgctgctattaattggttttcttctaggtgcaataccaaaaaaattagtaaaaacatttatacttatacttacctgtctcttctagttgtggtgggcgcgactgctttggtactctagcatagcctccaacccattcatcctcctgccactggtgcccatctatcaacagtgcctcaatgtaatcaacccttggatcatcaacttcatcatcccatgaaagagatggaggacaaacattatcagctggtttcacaatatagttgacctcaacctacacaaataagtatgttaaccatagataatatacatttacttattatgtacgtacatacacaatttaacacacctcatcagcagcctcacactccaaaatgcgagatgtccggattgctcgcagagaggcaagacgatggatagacctctcagcaaatgtcctgttaggtacatcatcaggtcctagcttagcaattgatgggattgtttcgaaagctaaaagctggagagctaatgggaaaccatggagtgcataagaccctacaagtataccccttattagtttctgagcatcgtaaggagtttggaaatttgctatcctccccaaagtacgggtaaaggacacccttccccatgggtatttgcagaaaaactccaggttcttagtcatctcgacagtcttcgaagtaggcctgttggggttactgtgggccgctaccacaccgtcaaccaaaataataagagatagtgccagttgcttccacccctccatgctttcctcctcctgcagccagctcaccaaatcagcaattgttagaaccgtgttcccaaacctctcatgaaacagagtattccaaacactctcacactcaggtttcacactgataacatcatcaacgtctttcttcttgggatacttcccacattccagcccagttaagatactaaattctcttaatccaaatctgattggatgaccgccgaatacaatccacatctcattcaccttctttgtcactaactgacggcatattagtccaaggacaagcttagcattgaaagatgccttgtttttgggtattttaaaaagtttcccaaatggagaattgagaagaaactgcatctctggtttcccctttagtacttttgctatgtcagaaatgtactccggtttagagtacgcgttcatcttcgtctcggaagggtaccggtctagagcaaagagtcttggtggtaactcttcaactgtaagatcttcagtcggagcaacacttggactacctgcaattaaaagtcatatactgttgagcaaacagaagtagtgtacgtacacagacattttccagattataactcaaaatcatatttttggcggaaacagagatttccaattctacttctcaatttttcatcctaaagatatgctaaattccgacaaattctaacactttaatcaaacaagctttacaattctgatacacccaaagacaacaaacggtaaattagagattctaacccagttcctccgttgcctttgtcgcagagcgttttctccgcggggaaactcttaatacacgcttctccttccctggaccatgctgcttcctcgggacttcgtcgttagctttattcccagccatagctaaagatgctatctcgccggaggttcaaatttcgccggaaaaaacagtaactttctcttggcttcgccgggaaaaacagtaactttctcttggcttcgccgggaaaaacagtaactttcacttcaccggatgtgggagttcagtggcacaattcaactacccaacaattcgaagttatgtcgaattttgaagcaatggatactgaattttgtttcgctttctgattctctctcaatctctccgttattctctttttcgttttctcggtttcttcgtttcagtttttttttttttgtctttttcaaaactgaaccgcatcaactaaaccgaaaccaactgctgtagggtttggtttacgccgtcaacttaaccgatacgaactgctgcacagtttggtttgtgccattattaagttttctcagggtaatttggtccgaaattgaatgaaaagacaaaacgtgaaaaccagttctcactttgacaaacggtgagagcaaatcttttttcgtccacttttgtgaaaatttcttttaagtatattatattagagaaaattaatgtcgttgaccaataataagttattacaagttggcgtctattttattgccttttaattgtctccttttcgctacctcttcttggaaggtaagatagaccgatagacatacgattaagtttttttatttcttagaaaagatgatgtcgttgacaaattaaatatggcgcctattttattgtcattttaaatttcttttattgctatctctcttaatcctctcttcctttttaaattatattaaaaataaaaataacgtttttataactagtgcaacaattaatttaaaggcttgttctagtgctagttttgccaagtgacgttgatcatagcttctttttattctgttcctggaccgcacctggcttgcgtgttcacgaagctgtcatagtttttggtccgcttcctttgccgttaggtgaaacattgatctttataatcttttcccctgttttgaaaacttttggcacttgctttttatcatttttgatgttatgttttaactgttcacaattgaggcaaggccagaacccagaagtttcaggccagagatttccattatgtttgacgaatattttcataatgtttggtttctcagtttggctgtatgaaaattgtaagagatgccccccaaaagaagtgtatccatgaatcagcccaacagagggcagattctccaaactgtgtttagccactttttcccagtagctagtcctgacagtgagctggttccatcttctcttcatgaggatattactcccatccttcgtgtagccaaagacgtagaggatactaatccccgggttgctttcctatgtgagttttaaaataaatcaatattcgttacgacttcagagtttatttcttcaagatcttgacatcaaatctgtggatgattctataaatatactgtcaggtcattcacatgcgctagataaggcaaacgagcttgatcccacatcaagtggacgtgatgttcgccagttcaagaatacaattcttcaatggttagaaaaggtaccaatattaaactagctcgcttgagattttcatatcttcatcattaaatcatcatgtgtctttgacttgtgcagaataatgaaagtactctaaaggcaagacagaagagtagtgatgcacatgaaatgcaaagtttctatcaacaatatggtgacgagggcatcaatgatttgctaaatgctggtgctggcaggtttgtactatagctaaaggttttcgttatataacacttgcgtctttcgttcacagtgttttcttgcttatttttgtagttctagttctcaacgtacaaaaatatatcaaactgctgttgttctctatgatgtcttggatgctgttcatcggaaagctaatatcaaagtggctgctaaggtaaatctgatactagctagattaacatatctttaatttcctcgatgtttacgttcattcttttttgtctgtacgtagattttggaatcccatgccgaggtggaagcaaaaaacaaaatctatgtgccttacaatattcttcccctcgatcctgatagtaaaaatcacgctatgatgagagatcctaaggttacatagattaatgtcgtggtttttctgtttaactgccactttgattaaattaaacaaaaaaaaagcatcaatatttgaatttatgtactctgcagattgtagctgtattaaaggcaattcgttacacaagtgacttaacatggcagataggtcacaagatcaatgacgatgaagacgtgctagactggctaaaaactatgtttcgctttcaggtgatgatttaatttaataataatactgctttaatatatatagatttttatttttatttttattttactattagtaacaattaaaatggaacaaattaattttgctaaccaaaatagcggaacaattctttggttcacgggtggatccttttattcacccctcttaatctaaccaatcagaatctgatacataatattttaaaaattaaacttatttgattgtaaaatctaaattttaactactctttttaaatccaaactgacatataatttagtttatttacaaaatctaaactctaatctttgtttattataaaccgatatttaacctcgtttgattgtaaaatctataaccttaaggttctttatacacctaaatcgacatttcacctcgtttaattgtaaaacttaaactgtttataaatctaaactaatatttaacctggtttaattataaaatataaactctagcccttttttgtaactcaaaccgatatatatatatatatattttcaatttattagattttacaattaaatgaatttaatgttttttattagatagtagatcctgattagttagaacatgaggaagtgaataaaatgattctctagaggggtgaaatgaattcaaaataaccaaaatgactatacactggcggaatttggttaaattgttccccttcactcttttctcattttcccactgtattactctttttttccggtttctttcgccgtgctttatcataaaaaaattctgtcaataatagttattaattccgtacgtattgaaacagatgaccatggtttatgtttaaattattttttttcactgttttgtttattttaaaattgtgttgagattgatgattgatcttgaaatggcagaaagataatgtttcaaatcaaagagagcacttgattttgttacttgctaatgtccaaatgcgacaaacccagagacaaccaaatgtatgtcttgtgttttcttgctctgtgtcaagtccattttttttttttttttttttgtgtattgatttgcactaataacctcatcaatatgttcacatagttgttggatgatcgagccttggatacagtgatggagaaattattaggaaattacaataaatggtgtaatcatgtgggcctggaaagcagccttaggtaaggcttctccttcggcttcacttactccaataatttgcattgcaatcttactgagtctttccagttatattatttttgttgccaacttgtataggttccctaaggataagcaacaaaaggtggtacaacagaggaaactactatatacaggactctatcttttaatatggggagaagctgcaaaccttagattcatgcccgagtgcctttgctatatctatcaccatgtatggattcagtttcaaaattttcctatttgtgcctatgattagtcaatggcttataactctaacgaacatctctccttacgagctgtttttttttttgtttagaatgagttctctctattgggctttaaagtgttttaaattatgcacaaacaacctaacagtctttccacgttaaaatttaatctgtccgggtgatttcagatggcgtttgagttgtttgagatgttggagagtaaaggtagtaagaagaaatataagcctaaaaacccaacatatagtggtaaagatgaagatttcttgacgaaagtagtgactcctgtttacaagacaatagccgaggttgtttgctttcttggccatttgctcttggattttcttttgtttgcatcccaattaatactgatatcaattttcgtaatacaggaagcaaaaaaaagtggcgaaggaaagcattctgagtggagaaactatgacgacttgaacgaatacttctggtacaatatattcaaagatgcatttatcatctaattccatatcctttttgaatgtcacatgatgactcttttgtctctaatataacttgcaggtcaaaacaataccttgataagttagggtggcctatgaaagccaatgctgatttcttttgtaagacatctcaacaacttggtctgaataaaagtgaggtatgtgtagaacttgataagtctttaggagatcggttatatttcgaattgataccacgttagatgtatgattatttagctcaatttacaagttctgaccgccttaaataataatacataagtagtattgagaaaagagctaaaaggaagtgttacatatatatattttctcactgaaattttgttatcaagaatttcatggttaatgtttgcaacgctgcagaagaaaccagatctgggagatggatgtgtcggaaaagtcaattttgttgagatacgcaccttttggcatctatttagaagttttgacagaatgtggagtttttatatcttgtctttgcaggtacccgaaccacttgctttctttgaatttttctttgtaagcttgtacaaatcttgactgattatgtaatttgatggatttcgtgggtgtggtttaggcaatgatcataattgcttggaatgaaaccagtgaatctgggggtgcggtctttcataaggttttgagcgtcttcatcacagctgctaaattaaaccttttccaaggtgtgtgatactaaaacttgtatataacatttttagcagttgctcgattttcctattttatagatcatgacgttcacctataaaatgtctaaaaacaacatattattgttttataattatatgacaaataataaggtatattattatgtatactactagatattaacttgcggtataccgcgggcttatatttttataaaaaatttaaatttttgtatttaagataatttataaatatatactattattttgtttaatttaaatgtatggtacaccacaaaacaatattttttaactaaagatttgaaaatttaagttgtacctattttgttaatattgtttatgttgtttagtgtttaagattgtataattgtatttgattgttaatttcatttgtagtatacaatcatgtagtaatatcaattcaaatccgtcaattctaggatttcatccatattataaagtttaattgtttatataaatttcttataaaacaatcgagttgtgtttctttaaaaaacaaattttaagttgtatttgttttgtgaatattttttttgtttactgtttaagattatatatttatattttgattattaattctaaaatttcacctataatataccgtcccatattattatcaacccaaatcagtttaagatttcatccgtagtataaagtttaaatatttataatgtttaaactttctatataagactcgagatgtgttttaaaaataaataaattttaagttgtatttgttttggtttagagtgtaagattgtataattagattttggatcttaattttaggatttcatccgtattataccgtcccatattattaaaggcataaacccataaattctacgatttaaccgtagtataaagtttaaatatttataatgtttaaacttcttattcaattattataaattttaaatatttataatatttgaaacttcataaaacaatttaatatttgaaacaaatataatattttactttaataagggttaactatttataatattttgaaacttttaaaaatttaccattctttgaaaaacaaagaaccagaataaatcgagcacttttagttttggacgtctgagaactcaagtttcttgtgtttgtattcagaatcattttagtccttttgatagtatgactctgaattatggaccaattcttttaagtaatgtgagacattgtacacatattattttttcatcgattgacttatatatatccgttctaaaaaattcgaaccacttcatatacagaaaaaatcaaatattttattaactatatgtattttgtataaattcaaaataatataaaattaaaatcaaataaaattataagaagaatcatatatttatgtttaaattaggtagagaggttttaggaaattagttaaggtaaataaaaaatatggttagtttagagatattagatatattaaatttggtaattaaataattaatttcttttttaattattgtttttgtagaaaatgttagcttttccaagaattaatgttattcgggatccgaaaacaataaaacccggtaaagaacctgacccattaaagttattcaagatccgaataaaattaaggcagatttacaaaattaccctttttttactacccttttgcaagaatacctttttatatggtttatttttaagaatatccctttctttgaacagaatgaccaaattaccctcatctaataagaacatataattggaaactgaaagtttcccgccaaatttttggcgccaaaatttatttttcccgccaaaaaaaatttctaccaaactttttttcccgccaaaaaaaaagtttcccgccaaaaaattttctcgtaaatatttttttcccagccaaaaaaatgcttttaaaaatccttgtaaattttttaaaaactcttttaaaaaaccttgtaaagttttttaaaagctttgatagttgctaaaaactcttgtaaatcattttaaaacctcttaaaatctttctaaagtctttaaaaacataggtaaatactttaaaacccctttttaaacctttgaaaatcattttaaaactttttacaatagttttacaagatttacaatcgttttttgagcataagtaagtggcattgaatgatttacaagggattttaaaagcttataaaagggtaaaacatgatttacaatcgttttaaagcataagtaagtggcatagaatgatttacaagggatttaaaaagggttagcatggtttacaatcgttttttagcataagtaagtggtattgaatgatttacaagggattttaaaagcttataaaagggtaaaacatgatttataatcgtttttaaagcataagtaagtagcatagaatgatttacaagaatttttaaaaagggttagcatggtttacaatgtttttttaagtataagtaagtggtattggaatgatttacaagggattttaaaagcttataaaagggtaaaacatgatttacaatcgtttttaaagcataagtaagtggcatagaatgatttacaaggtattttaaaagtgtttgtatggtttacaatcgttttaaagcataagtaagtggtattgaatgatttacaagggattttaaaaggggttaacatgatttacaatcgtttttaacgcatatgtaagtgtcaaagaatgatttacaagagattttaaaaaaggtttgcatggtttacaatcgtttttaaaagataagtaagttgtaaagaatgatttacaaggattttaaaagcttataaaagggtaaaacatgatttacaagagtttttaaagagttttaaaaggatttacaaggattttaaacctttgtaaatccttttaaaactcttataaagtctttacaagcattttttaactcttagaaaaagaattgtaagtatttaaaacatttacaactctttttgaaccattttgtaaagaattacaagagtttttaaagggttttcttatattttttttttaaatcttttaaaaactcttgtacatcttttaaaaccctttaaaatcccttgtaattctattgaaacacttttaaaccctttaaaaatctttaaaaaactcttgtaagtcttttaaagccctctaaaatctcttgtaaatcttttaaaacccttttaaaatctcttgtaaatcttttaaacccttttaaaatcttttgtaaatcgtttaaaatatttttaaacccttttaatatcccttgtaaatctattttccgccaaaaaaaaattttacgggaaaaatgttttcgaaaatgttttttggcgggaaattttttttcgaaaatttttggcgggaaattttgttttggaataatttaggcgcaaaatattaatatttcattttgttaacgtaaatcaatttacaaataggggtaaaatggtcattaaaaatttaaatagggtataaatgaaaatggtaaatagaaaagggtagaattgaaaaggggtagtgtgaaaagggcattagaaagaatttttctaaaattaaacctgataaaacccgacgcatttgaattagatcattaaagctcaaatttcaaacattaacgacgaaaatgtttatatagatatatatcaaatttctgtaacaaaatatgaaggttcaaaaatgcttcccaataattaaaaatatcagaaagttatgtctgttaaaaattattgttatatcatctcatatatatatatatatacatatataatttaatcaaatatatattaatatatgatatagtttgttcactaaaatgaaactaaaacaaatatatcctataattatattaataaaacaaatatatatcaatacatgatatagtttgttcactaatcatatatataaaaatcaaaatacaattatattagtaaaacaaatataattaaaatttgaatgatttagttataatctaaattttaacttaataaactgtttgttattcttcctataacttttaacagtaaaaattaaacatagttattgtatgctaaataatatatagatataagagttgtacatttagaaaatacaaaaaataaattatatatatttttaatctactaaacatattaattttttattttttgaaaaaaatatatctccgtggtatattgcgggttaaaatctagtacagtcttaattttctaggaaatttatggtgaaaatgtcacaatgatgatgcaagtgaatagaaactaattttgcattatatatctctgactacgtcctcaaatttgcagctttccttgatatagctctgagctggaaagcaagacatagcatgtcaacacatgtgaggcaaagatacatcttcaaggcagtggcggctgcagtatgggttttactcatgccattaacttacgcatacagccacacctctattttcattgtggctattcttatctacttatccccaaacatgctcccggaaatgttgctcttgattcctagcatccgacgtacacttgaaaagtctgactttaggccagtgaaattgataatgtggtggtctcaggtatattattaatatatcctatgttgatacactgtcaattcatacatgttgataaacaaggtgattgatcatgattcttggtgacgcagcctgaactgtatataggaagaggtatgcatgaaagtgcatggtcaatctacaagtaagaacatgcatatgcttgttgaaatgttggttggtcttcctaaatttcctaatgaggtttctatgaatgattttaggtacatgatgttctggattgtcttgttaacctcaaagcttgcattcagttattatgtggaggtatcacaatttcacttatcttcaactttttgttttgctgtatgtaaggaaacattaacattaaaacttagagacatgcgtttctctaataacgtcacggctgaattttagtgacattttcgtcagtccatatatatgttctcatacttccatcttcaaagcagattaagcctcttatgggtccaaccaaagaaattatgagtgttcctatgccaggctactggttgcccgagtttttccctcatggtaatggttaatagcatgtggatattttcttattacatagtgaagcctttattcaataatctggtttttccttttgttttgttttttcagttaagaacaatagaggtgttgtgatcacactctggtcacctgttatccttgtgagttagaatagattcttcatttccatatggtcatttctcacactctccccaatctacgctaactttcatatgcaggtttatttcatggacactcaaatatggtatgctatagtatcaactctggttggaggtttatatggagcttttcgacacatcggagaggttcatactttctttaccataaattttaaaagaatttaggaacagcttatttcatgaggaaatgacatgctaataaatctttttaagggttatggaagaataaaatagttcaaacattggcataatgtcacaaaagcctaactaagcaccatatgtttttttttttttttttggtgtggtatcaactaaccatatatattttaacaagttagttggtctttgttgagtatatataagtatagatttcaatggatttatacggaacttttggtatagaactgtttgggaggcttagcattgagaaataattgatgctctagaatttatcctttaggttctggcttgcgtttcctagctatattgtttcttgaaagaagtttatttcattttctcagatccaaacacttggaatgttgaggtctagatttcagtccttaccaggagcctttaatgcttgtttgattccaaatgagaatacgaaagaaaaaggaattaaattggctttctctcgcaagtgccacaaggtctgcttcctactattattatacggctatatgtatatatgaaatatcaagatatatgaggcaaacctatatttattaaaattaaaatgtgagttctcagtatcattgcttttgaatagaactcactttgagttgttgtttttttttctttttcagatcccaaatactaatggcaaggaagcaaaacaattttctcagatgtggaacaccataattaatagttttcgagaagaggatctgattagcaataggttgagtctgccatcgaattttcgtccgtttgacaactaaaagttattgctaaatccttctagctggagaagagtttactgattaattaatgttgataagtatgtagggaactggaactcctgctgatgtcatgttgggcttaccctgatctggattttatccgctggccaatttttctgttggccagtaaggtaaatattatccttgtcttaaatctgatcttacgttccgatttcggttcttatttgcatatgtacttgtgtttatacatggtagatcccaatagccgtggatattgcaaaaaaaaggaatggaaaacaccgtgaactgaaaaatatactggctgaggacaattgcatgagttgtgctgttagagagtgttatgcttctattaagaaactcttgaatactctggtcaccggaaatagtgatttaatgtaagtatcacaaaacttatcttatataaacttttcctataattagcttatcctatatagttgtcctttcctaatttatttgtctttgtacaggctcataaccacagttttcaccattattgacacacatatagagaaagatacactcttgacagagttgaatttgagtgttcttcctgatctgcatggccactttgttaagctaactgaatatgtggtaagccttgtagccataccatgttcaacatctcatcacccttggcgcgaattcaggagaataactgaaattagccttcttgcaacagctgcaaaacaaagacaaggacaagattcagattgttaatgtcttgctgaaaatattagaaatggtgacaaaagacatactaaaggaagaggtttcaagtaagatcacctgactttaaggtttttttgttgaatggttgatcaatgttttttttttttttttttttgaagcatgctcatttataatttcctttatatagcttgctagagttatgccactctggatcatacaaggttcatcaccaacataaatatttcagcaaactccagttcccagcgttctctcaaacagaagccgagaaagagagagcaagtctcctctttaaaatttcatccttgcaccattcttgtttccatgaaaaggggtgcatttgactctaagctgtgtgtgattctctattttttttttctcccggcagatcaagaggcttcatcttttgcttactgtcaaagagtcggctatggatgttccatccaacttggaagcgcgaaggcgtcttacattcttttcaaactcattattcatggaaatgcctggtgcacccaaaatccaaaacatgctttccttttcgtaggttctattgacttaatttcaacttcttttttggccacctccattgaggaagaaactctgtaattgcactcttaatttcctgcaagattttgaagccataagaaatccaagagcaataaaacatcttattgacaactatttgcttgtgttttccttagggcactaacaccatactattcagaggatgtccttttctccacatttgatctggaaaaggaaaatgatggagtctcaatactgttttacttgcagaaaatatttccaggtttttcatgtctttcactctttctatctcccccacaaatatcatttgacactctttttttcaactgagtctgtactttacgtccagatgaatggaaaaactttctggaacgagttaaatgtggcactgaggaagaactcgacgcaatagattatttgaaagaggagattcgtctttgggcatcttacaggggccaaacactgaccaaaacaggtatgtggtctttcactagacgaattttatacttcgctctttcactggacgaaaaaaacaagaaactgaacttaaaaagttgtgagtgagtttttttttttttttttttaatttgatcaaccagtgcgaggcatgatgtattaccaaaaggctttggagcttcaggccttctttgatctagctaatgaaagaggtgcatgaaagtctttgttatgattacttttatttgtagaaactatggacatgttccctcaaatgcttttgttttgttcaagaattaatgaaaggatacaagagtgccgaagcttcaagtagtggaagttcactctgggctgagtgtcaagcacttgctgatattaaattcacctatgtggtcgcatgccaacaatacagtatacataagagatctggtgaccaacgtgctaaagacatattgacgcttatgactacgtatgccttctttcatcataattattagtttgatctgttatttccttctcatatacgttaatgaagcttgatttttcactgtggcaggtacccatctttacgtgttgcttatatcgatgaggttgagcaaacacatatatatagtaaggggacaagtgaaaatttttattactcagctcttgtcaaagctgctccacaaacctattctaccgattcctctgattctggtcatatgctagaccaggtatagatattacaagatcgaaactgcgaaaactcactacaacatcttaaactttggtgctcaatattcatgacccaattgcttgtgtattgagcttcctaaaatctattcttttttttttgtgtccttcttctcacagtgatatacattttcaaaaaatcccactcaatcatcctctcagttattttactttatatatctttctccaggtcatttatcagattaaactaccaggacctcctataataggagaaggaaaaccggaaaatcagaacaatgctatcatttttacacgcggagaagcgttgcagacaatagacatgaaccaggtgcgtcaactaattttatttttatcagcagagcctagtgaattgtgaatctcaatatgctttctagtattctctagcaaaatttctcttcatatcaaaatctgaagatctaaaaaattcaataaacaggattattacatagaagaagctttcaaaatgaggaacttgctacaagaatttcttgaaaagaatggaggcgtgagatatcctacgatacttggactaagagagcatattttcacacgaaggtatcacgaaaaaacatttctaaatatactttcttaactatgctatacaatcgagaacccttgaggtactgtgtatatatataataagaaaagataggtattatgatatatttaattaagccctttctatgaatctattttgtttaaacacttcttctttttagatatcagttttggtcctcgcacacaaagtgatctcctatttctctcgtttcttgtggcagtgtttcttgtcttgcatggtttatgtcaaatcaggagcatagctttgttactattgggcagagggtgctagctaatcctttgaagtgagtttctttttttcctggtttagaaaagttctatgttggaagggatatctgaatttgtgagttaatattaatattttaccccaactcctggatagggtacgatttcattacggtcatccagatgtttttgatagagtatttcacctgaccagagggggtgtctccaaagcttctaaagttattaatctaagtgaagacatatttgcaggtacttgcttcaactcctttcttctgtgacacgcataaacacgtatatgtatgatctaatttagaacgttattcttttcttaatatcattttggctgcttttaggtttcaattctactctacgtgaaggcaccgtgagtcatcatgaatacatacaagttggtaaagggagagatgtgggactcaaccaaatttcaatgtttgaggcaaagatagctaacggaagtggtgagcaaactctaagtcgtgacctatatagactaggccaccaatttgatttcttccgtatgctctcttgctatttcactacagttgggttctatttctgtagcatggtatgtctaagttctcccttttttatctacaattagtatttaacatgcatggaagtttgtcttagtctaaagccatattgtctgtttccttacagttaaccgtgcttacggtctatgtatttctctatggacggttgtatctcgttctaagtggggttgaaaaagaattggggaacaagcctatgatgatggaaattatccttgcttcgcagtcgttcgtgcagattgtttttttgatggccatgcctatgatcatggagattgggcttgagaggggattttatgacgccctatttgattttgtattgatgcagctacaacttgcttccgtatttttcacatttcaacttgggacaaaatttcattactactgcaagacattgttgcatggaggcgcagaatacagaggtactggccgtggatttgtggtgttccatgccaaatttgctgaaaactacaggttttactctcgtagtcattttgtgaaggctactgagctagggattctcctactcgtgtatcacatatttggcccaacctatatagggttgttcactatttcgatatggttcatggtgggtacatggctctttgctcctttcttattcaacccatctggttttgagtggcatgaaattgtcgaagactgggcagattggaaaaaatggattgaatatgataatggggggataggtgttcctccagagaagagctgggaatcatggtgggagaaggatattgaacatcttcaacactcgggaaaatggggtatcgttgttgagattttttttgcattacgcttcttcatatttcagtacggacttgtgtatcaactcagcgcctttaaaaataaatatagtagtttatgggtaagctacttatgtcgcttcctttttgaattcattacttgagtctcttagttttgctaaatactttttttttccaggtttttggggcttcatggttactgatcttaatccttttactcactgtgacggtatgtagaacagttcatgtcgagtttttttctatatgagatactagactgattaaattgtccgagtctccttgaatgctagatataaatatgttaagtgatccatgggtgctaagcgatggattttgttttcaatgcaactatcacaggttttggattatgcaaggcgacggctgggaacagagttccaacttttattcaggatcatcaaggtttccttgtttctcgcatttatggcaatattcattactctcatgacttgtcgtcttatactaccccaagacgtcttcctctgcatgcttgcattaatcccaactggatggggattactacttgtaagtcttcctgctctatcaaacttcgccaaatgttttaaaacatgtctttattgagtgtctgagatatttttatgtattctgcttctagggttttccaaatccttgaggatgtttaggattgtgttcatattaaattattttactgttctccttccagattgcacaatcttgtaagcctctgattcaacaaccagggatatggtcttgggtgatgacgttggcttgggtctacgacctcgtgatgggttctctcttgtttattccaatagcgtttatggcctggttcccattcatatcggagttccaaacgagaatgctctttaaccaagcctttagcagaggtctacatatctcacgtattctcagtggtcagagaaaacaccgctcctccaagaataaagactgagaaccctatttgcaggcaattgtatttggtatatgtgtgcatgctttgtaagggaaggcaaatgtgatatactaaaacctctataaattaatacttgataaattaataacctatataagttaataattttttggatatgagttgggaccaatgtaatttgtttttgaaaattttatataaatatataatcccatcaattcttcaaaagtcaaggaaaggttaaaatctggtctcatagcttcgttaatgattgtggtaatttattgaggaagattatgtttagggggtgctgcataatcacagtgtcaaatggtgggtgagttttctaaagataagttctttagaaaaacatgatttagtgacttgtattattattccgctagagtttaaattttgggtaaaaggcttgttattatatataaaaagcaatttttgaaacgcaaaaaatatacttcctctgttacaaactaaaaatatttaaaatttgacccatatatcaatcaatcacttgatatttaaatttttctaaattaaaatataaattattattttctaaattccacttaaccaataataaatcaatctacaagataaaaaataatctcaaaaaatatttcttatagtaagaactgttaaaaaaatgattaacatcacttaatagaaactattttttatttttattaaaacataaattaataggagaaaaagctggtacactgaaaaaaaaaatctttgaaacttgcgtcacggcaggaagacaactagctaaaacaaacgccaatatgtttatatttttgtaacttttaattaatttgataatcctatgaccatcttatccaaaaccaaattcatgagactgaaatttctttattcaaaaacacaacaatatagtctgcttactttattccctccaaaacacctgaatcttgtttcagatttttgtaccattccctctataagacacctgaaaacatatatagatgcacaaaactccattactctccattggctcatatgctatggttagtcatcacacatcggcaagtgcaataagctgatcaactacactaggatccgcgagtgtgctagtatctccgagttcttctaattgcctcgaagcaatctttctcaagattctcctcattatctttccgcttctcgtctttggcaaccctggtgcccaatgtattctgtccggtgctgcaaaagccccaatctggaaatggcaaaattcataccgatactcatcagaagtgtgcaaagaacagttcctcaaaagtttagcatctctaaagcttaagcattcactttttccttaatatatatcatacctgatttcggaccattagtactaggcttttacgaagctcctcgctgtaaggaacaccttccagaagagtgacaaacgcataaattccctgaccttttacctgatacaagcaagagccttgaccgttagttactttggtgtgtgataagaagcaaactgatttcagcttttatttgactggtaaatgaagaacgcggaatcaagaacaaaatcaaacccaagaaccatgaagaaaccctaggttgttatagagagctagaagactcttcctgcctcgataactaattaaacatcataagtcatttcttgaactcttatcagtgtcatactgtgcttcatatcccaaccacttatgcatagtcagtccacatacctcatgttctatgcctacaacagctgcttctgcacattgagggtgtaaaaccagagcagattctacttcagcagttccgattcgatggccactgtgcattagagaaaaatccagacataagtatagatttgagtggtaggaatattggaggtttaaggaatttattgacatcgttttagattttgtgttctacctgacgttgataacatcatcaaccctccctgtaagccagtagtaaccatccttgtctctggaatacaaaatagaacttattaaaaacttagtcaaattcacccgactttggatattatcaatatattaaaacgcctctatctaagcgatagttgaaagatggcacactaactagaaattggtttttgtgaaaagtaagatagattatccacctgctgcaaccatcaccactgaaataatatccggcaaaaggtttaaagtatgtggtttcgtatctttcatgatccccaaacagagttcgaaacgccccgggccatgaacctttgacacaaagataaccactacactcgccttcgatttcattgcccttttcatcaactatgacaggctgcagcatacacagagagatagagatgagagtgaagccctctccaaagaagaatatctctagaaagaagcaatatgctaattattaatttgcactacaaatcacatacctgaacaccaaagaaagggaaagtggctgaaccaggtttctggggccaagcacctggcaatggggttatctgcgatgcaatttgatgcacatgagagaaagagagcatgcaagaggttttaagagagataaagagggagtagagggttaccatgaagccaccagtttcagtttgccaccacgtatctgaaatgggacaccttgaatcaccgactacattgaagaaccatctacatcaaagattcggttaaccattaaatatagttcccattcaactgaccgcaggaataaatctagagatattagagttcaaacctccaggcactaggattgatgggctcaccaacacttccaaggacccgcagcgatttgcgcgagtgacgtgttacaaactataacaattaaaatgagttgaaacggaaataattagtaaatgatgtagagacctaaaagtattatcccacacacaaggcttaatttactatacaaaaattagagggcaaataaatacagccgtagcttacaaatcattacaatactgattacttttcaccgcaacagaaagattgcatatatcttaccttatcgtcatcgcgcatgagagacctcaccaatgttggggcagtataaaatattgaaaccttgtatttgtcaacaatatcccaacagcgtccagggtcagggtagtttggagcctgttcaaaatcagattataatatcaaaatccatatgaaagatatgaacagtaaaaccaatttgcgcttaaatgctgctagctctttaatgtattactatgggagagggacctagagcttaattattgatttaagacattaactgatagaaaaccatatattcaaatagattaccccctcaaagacaacaacagtggctccattaagcattggtccataagtaacatagctatggccagttatccaaccacaatctgctgtacaccttatgttagaaaagcaaagagattagcactatatagcatagcttttggtaaggaagtttaacagtcaagacaagtgtctttgcataccagtatacatctgttgatttgtagtcaaatgcatatttgaacgttgtagcagtgtagatcatataccctccagttgtgtgtaggacacccttcaaaaaccaatatttaatagagaaacatatcaaaaatctacgctaaagatttaatctaaccaaggaccaaagttacctttggcttcccagtacttccactggtgtagagcaaaaacaggggatcttctgcatcaacccattccacctcacacgatgttggatattgagaaataacatcctaaagtgatcaccaccacccacagaagacttttagaaccattcgaaaaaaaaaaacaatgaaggaattttgacaattattaagttgctctgcagttacctgccaccacacatctcttccattctgccatttagtgttttcccttgttgtcgctaatgagttgtcataggtcaagcatatgcctggttgtagagaagtaaaacacagaaaatcatcagttatatatccatcaaaccaacaaccactcaaattcagattctggtgaatgaacaaacctacagagactccatctttagaagattggtcaagtgcagcatcaacaatagctttaaggtttatggtcttagggcctcttttaacagcattgcaagtcagtattacatttggcttgcaatcaacgattctttgggcaagagagtccgcagaaaatccagcaaaaacgacctgtgggagaattgaattagtttcgaaactggttttgtgttaatgaattaggtatatgttgtattgtagaaaaatgtacgaaaatcacaagttaccgaatgaacagctccgatccttgcacatgcaagcatagcgatgggaagttccatcaacataggtaaataaattacaacagcatcacccttcttcactccattatctttcaagtaattagcaagctgcagcacaaggacaaggaaaatgcagtgccagaaaaataatgagaaagaagagctctagaggtggttggagaggacgaaaaacagtgtttatacctggcaaactcgttggagcaactcagaataagttaaggaagcatctaccccaagttcatttccttcccagtgtatggctgttttatcacccaaaccagcttcaacgtttttgtccaaacagttgtagcaaatattggtgattccccctttaaaccactggtcatacatgatcccagacatgtcatcacgacgaaacattttctaataggagatacaggaattagaacaaagaaaaagaagaagaaaaatatccacctcgatgctaataggacccttcctgacatcgagattctcggaaaacacttggtcaccccatttctgcttccagtaaaactcagacgcaatatcagaccaaaaagcagcagggtcatccatcgacctcttatgcatttccatgtactgcatacaaataacaagacgagagatgatttacagatcataaaagcaagcagagaagatgaggtctgctgatctaggactcatttgatgttacaaggtataaagagagacctgttgaggggaggaaacaagagcctggccggagaattccttgctgggaaagacgagatcattctcctccgatgcaagggattctcctaacacgacggcgtttaattgagagatctttccggcacctgagggtagctgggacatggactcgacatgcctcagggaattagacgacattttcctatggaggagaagattctccgatggggatgatctaatatacatacaattagaacttataagaagtcataacaaacaagcaaaatcacaaatgttttaacttatgttaaaaatactttggtaaattcggtaagactattagactgttaaatgaatttcctctgttgactaaacaccaaataaatccaatgataaaccaaaaagtaatccaaaatctgtaagaactcaaatagaaaagaaatacttatgagtcacctatgggggaaaagcgaaagatgaactaaaacttattgtgaaatgtgaagtctcaaagactaaaccttttaacttcaaacaaagttaccaacactaatcaaggaagacacaaacaagcctgaaacaggttactctaaagaattgggacagctccatcacgaatccagtcaaataaataacctaacaaatcgaaaaagtctgaaaaacataaatatcaataaagtccaaatctttaatattcaaaacaattctccaacactgtctttttcttaaagccagtaatcaccatgttcaaagttcaaggggtcacaaatgcggtctaaagttcaaagcaacggccaacgggtaatatcaataaacaacaatcaagacatagaacctcatccttaaaccctgaatcatcaacaacatatcaacatcacatcacatcatcaacagcatattcatcattatccttttaccctcatcagtcatcatcatatcattatcatatcatcatcactataacagaaaatttcaaacattttcttacactcatgattctaaatttcgaatcaaatttcagaaagaaaaaaaaaacctcacctttgagtagccggaaggattcgagatccaagtgatccactaattttcggatcctgaacaaaaaaagaacaaaatcagaacatcaaaagataaaaagactgaaactttacgaaacccaaatcaaagatcatatctttcctattccaatgatcataagattcgatttcaatgtccaatttttgtaataaataaaaaaacgaaaacgactcactgggtcgtatttgaagactgtaacgagacaaaaaaaacaaaacttgaaaattcttaaatagagaacatgttcgtgttcgtaagaataagtcaactcaccaatgagcctgagctggagacaacgctgagaatcggggaagaagga

SEQ ID NO: 775 - DNA, 74842 bp, Arabidopsis thaliana
gatcctattttcattttcgttttttttttttttttgccttaattacctttttttattattcctcgttttttgttcattattaaatttgcctgccttgtgctcacctacttatatacccttccatagtatttggcatgaacgtgacttggtagagtgtggtacggttcttgtctcggactatttaagtacgatgcagattttgtaaaaacgtaacgtgtttttgatttgtggaccacttatgaatcttatcaagtatctaaaattagacatttcatgtgcgtagatgtcaattacttgtttctaagaattaagaaacatataagttattgtttctgaaatcgtgtaggataatttatctactaattatggagtattgtatagtatatttggattcaaacaactcatttacgaaaaatattgaaaattcaaaattagtctaccttccaggttatcaagttcgaccgctagtcaattgattttttttaacgtatctatagatattatatagttatataatgttaaaataaaataatcataccatgtttaattaacaaaagatgaaatctaacataacaacgaagtgattataattttgaaatccaactaaaaccaaaaataaatactaagatagtaggaaatgatcaataagacgagactcaaagagtaataatctcactcttaaaactcgtctttgcagatgcaagataagtaagaaaacaattaggttcaaatatttgagtactaaattatttgagaaagagcaatgaaattattgaaaataagttacggtataataactatgtctatgaattcttcatatgcccagaaccataatcatatagcttagctttgttcctttagtttaaagtgatctgttgagaaacataaggaatgcatattttgttgatgagttaggatataacttcattgtttaactttttctattatatgcttttcttgttaaggagaacctttaacaatgtttttgatgtcactgtaagcatagcagcatacagatcagtttcaaattaaaggaaacagttaagataatgggaatcaagtaatgtaattatatgaacttcttatttgagtattattgagaatttgaaacttaaaagcgtgttgtgtcgtcatattagatgcaaaacaaaataacattcaagcttgatcctccagtcaacataggttcctagaatgtgacagaatctggttgaacaatggcttcatcagtcttatcgtcatgcttattctgttatccaagtagacaaaagagttgtaagtaattaatgttcacatgtataaccgagatgataacaattgaacaatcaaaatagagaaaacaaaaaaagtttggttgaatcttttccaactacgtccaataacgaggccgttgaattatatgatcaatcgaatcacacacaagtcactaaggctttgtgacgaccagagaaattggctacaattcgattttagaactggagagtcgaacatctctagcgtgatacaaagtcgaacatgtgtgatctctaactatccaagaacctccacacatggacttcgattccttcttcttggctaaattcgatattcactatcaaacattgttaaaccagtctaactctaatacatcgtttaagacactctaaagtaactctttcaatattcactattgaactcttaagtaactctttcgataggtaagaagaagaaaatcgatgtaatacgaaacacttagtcaaaatatgagtttaaaaccaaagagcaccccaagtgatttggtttgttattgaactaattgatctatttggtacaaaaattataacatcacaacacatttcatgtaaaatgctgtagtagctttagttttctttgatccttttttcattccttcttacctttgttttcttcatcacctttcagaaatttcatgaaccagtaagcagatgattttgggtgacgggttaaaccgttcttgtagtctacatataccaaaccaaatctcttggtgtacccttgcgcccactcgaagttgtccagcagcgaccacgcaaagtatccctttatgtccactccgtctctgtttcaattttcgccattaacataacactctcactaatttacttgataaaaattctctgtttcctaagtttttgtcgcttgtaaacaactgaatgaagggaaaaatgttgacttactcaatagcctgggagacgttggcaaggtaactcttgaaatagtcaactctacgtttatcgtcaagcatatcatgaatagaggccgatccatcatcttcatcatccatacctgtcgtgttggaccaagaaaccttaacctcaggatatatataatagaagttcaatttgaccaaaataattcattgtttccaacttttttttggataacaaaactactgctattcttaacacgctatgcattgtactatattaagctgtaccatagagttacaaggatagtaaataccattttcagtgataaatattggagggtggttatattttttgctcatgtaattcaatgtctttcggattccccaaggcacagcataaagccaatccgaagcagcctgtaattggcacagattatttagtttattactagcttacacatccttgccttaagcagatgtgcagaaatgtcaataaaatcattagattagctgagactaagaagagaatcttaccctttcgcctatcaaatctccattttccagttcaactgtgcacggaaagaatagaggatgaatactaggaaacaagtaagaagatactattagcataagaaatttcagcatttgttaccaatcctctccaattcttgtgcttggtaaaagttactctcagcttctttgtttgagacatgagaaatcaacctcgacgtatagtggttcaggccaaggaagtcccatgagttttgaagcataaactccttttcttccggagtaaatctaggaagattgtctccaagtttctggcgcatacttgcaggatagtctccaaaaaacaaaggatccaagaacctgcaaagtatttaatttgttatttcaaggaatcatatatacttgcaagtgtgtaagtcatttgatgcatagttggactttatgatgatttgatattaccactgtcttaaacacaaatatggcatttatgcaaccttaacatatgaaaagcctactatatagtgcttgctgatgtaataagatagggaatatcacacaaaggactatttagcaaactaagtggattatatgttttgaactacctaccattacacaatataaaatcaatgaagtaattccacaaactattcccaaaagtcctaatctatagaaatcagactttttactacaaaatttcacgacgttatagtgcagcagtgcgtataagctacagagacgccacatttacatagacaacacatcagcaatacgattccattagaaatcttaatgattaagaaagcacccaatgcgcatcctacttaccatccaagttgaaagtcaattcgcctatccgcagcaaccttgtcttctggtttctcagagtttggctctgcccattcacaatcaactgacaaaccgatttgtccaccttgactttcctagattaatatatgtaaaccaaacgcacactggtaaataacaagcaattgagatgcattgataaaggtaccagatgtcaacaacagaacctttgagacatcttccgatagccaaaggtccaagtaaaataaaacaaaattaggttgctgaaccacaataaaaagctaccataccttgtacttgcttctatatatggatacagcagttgcatgggccagaacctgatgatgtgagaccaaatatggttcgatcaagggcttctcatttcttccaggtgcaaatataccaatacagtgtccattcaccgaggtctgaagaggttcatttaatgtgatccagtgcttcactctatcaccaaaattggcaaaacaagcatctgcatagaggccaaaataatcgctgcacgtgaagaaaagtttaatgtcaaattattaaattctatgaaaagtgctgcattgtttattccagctagggaaaggcttcatagatattagccctctgcagcataaccaaaaccctgatgatgtgagactatattttaataaccccacttaaacttgcacaagaaagggatcatacacaacacaagacttctaaattgtatttttgttttcgaagatattacacataaattgaaatagtctattacagtttactacttacacaattttcctatttgtccaacctccgattgcttcctggagatgtgatgggagatcccaatggtacagagttacatacggctgaatacctgcagtagcaatcatcccgtcaaagtaccatccatacgaagaggaaaaagctcatttcaattagagtaaatacctttttcaagaagtgtattaataagatcgttgtagaaagcaatgccttcttcattgacttcagttcccaggccatctagaaaagttgacatacaaatacaataagcccttcaatcggcaaacttttcaatttttcaggaagtccagaagacaacaaatactggtttacagttcttttttatggccacatgcatcaatgctaaaggaactcaaaatttcatgtctctaaaagtaaccccacagggctttaaaacaatctcttagcaaaatactgatccatcatttcaaagattaatatacaaacaaaatgatcccccgaaattagagatcaaacaataaaggttctaaaggagaagttaaccttcccatcacaagaatttcttcaattctcgcattatacaaaactcaacgaaataaactttctcatgaaaagatacatgtacttaacattgtcaacaactactatataggatatatactatgactagggacaatataaattacacataaagaaatcatcaccacacagagatgattagtaaactgcagaacacacacattatagtttatccaaaattaactaaaatggattagtaagtaacaaagtagcaactataaacaacacaatatatttaaacataccagggaaaattcgagaccaagatatagaaaatctgtaagcaccgaatcctaattgtcctataagatcaacatcttcctgcaacattattggaacaaaaatatcataagcaaagagttatacagaccatagaaagatcctcacaaagattagttaccttgtatctatggtaatgatccacagcaacatcgccgttacttccatcaagaatcttccctaaataagaggaaaacaaacagttaaatctctacctagtcgtcatcgattggtacgggataagctgagaagaaacaacaaaccttcgatatgagtgaacttatcccatatacttggtccctttttaccttcattccaacctccttcaatctacaaatcatcatcaaatacttaagctcagtgataataacaaaacaacagagcttatgtgaagcaccaagcctattcctacacaaacttcaaaccacatctaatcttcttaaattcgattcgtacttcaattctggaatcgacatttgcagaaaacacaagtaaatagagaatttgggacacagaagagtagaaaacgaaggagaaactataatgaagaagatgagagtcagatcttggagcgagagagagacctggtaagcggaagtggcgacgccgaaggtgaaggtggaagggaagttagagcggtgggtgaccggagggacggcgagattaagcaagttaagcttctgtgccattttttccgattagtgtggaatctgatagaagagagagacagacttaagaagcaaaagtttcggagataaataaatatcagaaagaaggccaaaatcagcccgaatgttttggtctaccaattttaatagaatgcatcaatgcacttttttgaaaccgaaccggccgttatgtaagatttaattccactattacaataggcatcattacaatattatgcaaaaatcaaaacgtaacaatcaacagttaaatttcgatgattaaattgccactggacttagaccgaagatatacgaacaaaaaaacaaatatttaaagaaaaaaagaaatcgaaccaatcagaaatcaacgaaatacatgaacgaatcctaaatttctatacttagaaaaaaaaaaaaaaactggacccgaacaaaattgataaccaaataaaaatctgaagtaccgaaaatatgatatataaaatatattaattatattacacttgatataatttaattagccacaattacaattacaaatccgaatatatcatttttttttttttttttttttttttttttggacaacggattagtttcattccattagtgtagaaggtaactacagagatagagggaagcaatcccaaagtttaaaacataacaataagggccataatccaagattaacataacaaggttactaagatagatagagctaatcgacaaagatttcttgagagcttggagccaaaagcaaagaagcttggtggtacttgtgagatcaaagtttatcgacgattcttccaagagcgaatcaaaggaagagcaaattgccagagtcaatagacgagatggcgttgaagaagaggtcaaagacacaatcctcgccgacacgaggaaggctacataaagtagagctttggtcgaggttcggggagtggggaaggtgctctgttgcttggatttatttgctacaaatgttgtagtggagaagatgagcataggcaaaccatagcagcaggaaaaggtagtggaggtggaagccttgaagacgttaaaaacgttaaccgagcaaggtgacgggtggtcctttgacaagcttcccaagccaccataaaaagtctcgcaaagaaggttcaatagcattagaccagagtctttcaagcaaagcaaaacattccacaacatatcaaatgaagctaaaaccagggtttggacaagtagagtataatgccgtaacataacaggtgggttctctctcacatggagtctaccatggagattaagaaatccacacaaagtttgtagtcggcttaacacataacaaaatatatcagacctgggcttatcgggtaagagcataataagacgatccctgaagatgttaatttgtgcaaatataagcttggataacaagggatacacggctatggggatgaggaggctacggtaaccaccgctccttagagacagggtcataatgccgtatttcctcaccctaaacatctggccacaattaaagaagctaacaagcaaggtcttcttcaagcttcgcaaatagagaataatatccttaggtgattctaatagccaggttcttagataagttttgtaccagcatagcaagattgtatgactaggttccaatcgacgtccataaacaatcggttccatgagtcgacacaataatttgctagacaagaacagaggaagtgttagatagaacctgggcttttgcagagaacacagtggaaaacaccttttggagatgggccttggagatgtgaggaaagggcctaaacccagagagcagcagggaaattccaagcttacagaccttggccaaattactaattgggatagcccaaatatttcagacatgggctgagaagggagtcttagcgggctatgtgagaagcccatcccaaaagaagagtccaattggccaattagggttttgcctcttgcaaaactctcctccgtcaccccaagcagccgcctagagagggaattccgacggagcaccgctagggttgcttggacagggaagcgagccgtcgtaggagaccagtggttagggatcaaggggtttgcaggtttgggagcagatctggagtttccgcagttatgagtgagagaactcactaactttgacaacgaggccgcaacggagagccaaagaatcaccatccaagagatagagccgccgtgtgtcgttgacgattccattagattttcttcttctaaaattggtaggagaaatagatttcgcgagtgtttagcaagatagatcggaacaaagaaaagtgtgaagcaacaaggatggccgaggaagcagagaagaaattcgaagtcccgacgccggcgagaatctccttcctccaccggcgtcgaaaaacaatggcgaagagaaagtctcgaaagatgtgccagagagaaagtcgcgtacttcgtcagcggctatttcctacttcttgtagtactataacatgtggatcttctctttaccaaaaacagaacggtaatgtaaattacaacagattacgcccaaatgttatagacaatcaataatcactcgtctaatctccaattcatcaatcctttagtccaaaacacttgaatatataaaaaaagaaaagttgcaacaaatcttgttccagtacaaaacaaaagaaaatactccaaactttaccaagagacaaaacttgatttaggtttgaagcaactatttaagaaccatcgagcagaagagaaagatattccgaatatatcatttatgtgtcaagagtgaaagcccaaaaatattatgtctcaatgcatctaaaatctgatgcatttttgcagaatcctatattgatagaaacccttttacaccatgttagattctcaatccatggagtcttaactaggttaagaaagagtaaaaaaaaaaaaaacatctcacttaaagttatgtagattgttataatctagacaaacatgagcataaaaattttgcattaatccattcaacaagaccagagcaacatttcggtggaaaacgtgaacaatgtcttaatttcggtgtgaaaccttatcctaatattttttttgttaagaatgtaatttctctactagaaatgaaaacagtttatgtttacaatcaataattatagacctagacaaatgatctcatggcaaaacaaaacaaaacatagagcatataacaataaccacagtttttggtcgatccactcaaataaaattactacgggagttagatgaagcgatgacgattttgttgccattcctggaaaagttgcaaaaggagaagggcatctgcaaattgtgaccgccaaaatgcgaaaaacgcatagctctagaagcctttcaaagaagacccgaaacaaagctttaacggtatagaactctaaacctgttaacacattttctcccctcaaaatgtaaacgattgttcgatcaagtccatgagcttcccttgaatggaaccacatacgctaaattatgtcaaaggtgcaagctccctctaccaaattcaatcttcgaagtcggctagcgcagagcaagatttaaaactattctccaccacaccaaaagccattagctttactagctcctctaaaaaacaatctattcgcaagcaagaggcgaccacgcaaagcatagaaaactactccttgaggcaacaacagaagcaagcaacaataaaatcaggccttgaaccaaaccaaaatcttaatatacatgtaacgttctcaattgacaacaaaagctagttatcaccgataactatatcatcagcatatcaaacattacctcagccacacgaatgaacaaatgggcaaacacaatctagttatccgaatatttttgaatagaaaaagtaatacaacaacattgatagaaaaataagattacgtaatttttacaggaaaacaaaattctgctattgtatcgggaaaaacatgagtatacaattttgacgttaatcacaatttaatagttttggcaaaaatgcaactccatgattttgacgataacatgatatttttgctattttgccgacaaaatagttaatttccgacttgctgggtttactaaactacatcacattttattgatatattatacagtgaagttattgtatgattgtatgagtctatgacacgtgaatcacgcctcccccatcgcgtgaaacatcaaacttatttatgcgccatctacatatatatttggtttgtttcatataagacaatgcaaaaaccaatcatttatttatataatcaaatagaattattaaagtgagtacaaatacatgtatgaaaccatatatgattaataatttttcttgatgagccttttactcaatttgtttatgggccttttcctctgcgggattttgaaggaggtacataaaaacgagggggaggaggaggaattggtggagacggaattagtggagatggaattggtggagacgacatctttttacctgataacaatattgaagatattgtttcattaaataatttgcaaccattaaatatacaatcaaagaatcaattgaaaatatacatctgaacatttgcaccatgacaataaataaaaaatgagtgcaaatactaacgttcgtcgcgtttggcttctgtgaatccaacttgagaggagataaatagaagtagaagaagtaaagacaaaagaagagaaactaaatgtgatatctttgtagccatttatggtccactttgtcttcctaccgtagcgaaagaccatctcatgctatcgatctatatatagagagaagtaaacgaagcatcaataatctacaaactcaccaactacttctccactcaacagttcttttacattatttctccgaaagaaggatattacacttcttcaatattattcattgctcgtttccataggaagactcatgataaaaatatttggatatatgaaataaaatatgagtaaaaagatcatacaaaattgtaatgcaaagagtatttctattaatgactcccaacaaataggtataactataaaattgtgatgactaagggtaaaaaatgggagaccaaaatatattataggaatataaaggactagtaatcagactaattgctgccaaaaaaaaaaggttatcagactaataaaaattaccaaaattgcttgttcaaattatcagactagttaagttctatctatcactatatttaatatacaaatatatttttctcacttaacttgccattgactatatccttaattttctagacgaagaaaattcttaggcgagaacaacccacaacagttatgctaacaatcttttttggttgatctttttttttttttttttagtattttaattgataattgcgactatattcattgaatgttgatatattatgtgctaattaatttaaaaattcaaaacagtaaactcttctactttggcttggtatctaaagaagttgcagttagaatttgacatccggactttgccatattcctctttaaatcagtagaactaacacatttagtttagacttttctttttggttcgatctaaatatatctaaaaaccaaaagttagtagcttaactggtaaagattttaggcaaatcgtagaaattgctgattcgaatgattaggacgagaccatataatatgctctcgttctgggttgggagaatgtactgacgtaaacttagaagggcaaaacctcttaattattcaaaaaaaatatatctaatttaaataatatctaatagtgaaaatattggtaatgaccgagattggattcgagtcacccaatgtagcacttcgacaatctttaaattctcacttagcaaaagaacatgtgatgtattcatttcatcgccattgacttttctatcttgaatcaactaaaagaaattatgagaaaaaaatagatatataaaaaaaaattatttgacttcttatatgtagcatttcaaatgtacacggtcggtaggttagctagttgctttacttgcaagttgcaactaatttttgtctcccggttacgactttgcgacttatttgcatctataaaatctaattttttaattgttttgtcactgaaaagtcaataaagtcaacttttttgtctttcttgtaggccggacgatggtttcacacccatacataatacccacgtgttattagaaagactggtgagtgatgacattgaatttttgtaactaaagtatttttttatttgaacgtatatttcattttaaaatattttgtaaagatatctaaaataactcatttggcattgttataaaatttaaccgttgactttatagccgttaacagaatcaataaacggttttcatttttaacggataaaagatccaaaaaaatatactcatcattttattttttgtcataaatatgttttatttattatacagagccaaagtaatagatcataatatataaatattaaacactaaaacaattgtaattatttaaaatttaataaacatttaaaatatttaacggaaaatacgtttagaatatttataatatgtgaattaatttataaaaattaaataaccatttgaaagaaaaattttaaattcttaataactagcattttcttaactaatattccctttgtcccataaagatgaattttctacgaaaaatatttgtcccacaaagatagaagttttatattttcaatgcaaattttaaaactgttttcctgttttatccttattaaataattagataaatatttattattatttttaaagtgtattaagaggttaaaattatcattatacaatatttcttaaaaaatgtgaaatttctaaaaaaatcatcttagtgggacggagggagtatatatcttcatcaattctaattactagaaaaacgagaaatcttaggacattattaatattatattttattaaaagataaatattgtaattttttaaagtttaataaacatttagaatatttaactgaaaaacgtttagaatatttataatatgtgaaatctataaaattaaataaccatttgaaagaaaatttttaaattgaattgaattataataaaagtattattaaaacaaaaaaataaaaaataatgtctaatttcactgaacggtattagatggtatgacgggtttagaatattataatatatgaaatttataacaattaaataaacattttgaaagaaaacttttaaatttatttgatttatatattttttaaattaaagtattattaaaaaaataacaaaataatgtttaatttcacttaacggagttagatggtaagacgagtttggatcgacagtaatatgagacggtataccacgggtgaaatccaatagatatgtttaatttcactgaacgaggttagatggtagaacggtttggattaatagtaatacgagacggtataccacgagtgaaatctattagatatttttaattttattgaacagaattagatggtaggacggatttgggtcaatagtaatacgagacggtatatcacacgtgaaatcctagatataataattaaaatacaattatattatatcttaaatactaaacagaacaaacaatctaacaaaaaaatataatttaattttaaattatttagttataatctagattttaacttaatgaattgtatatttttgttcatatacttttgaacagtaaaaaaaaacatagtaattgtacactaaaatatatatagatataaaaattgtatatttagaaaatacaaaacattaaatcatattttattaaacaaattaaactttcttttttttttaaaagggtccgctgtgtaccgcagattaaaatctagttatttataaaaaagatattgaaaaaatgtttagagatttgttttaaaaactataactaaactgagtaaatgtgaaaatagtgtatttaattttgagaggaacacatgtcaaataaacaaagcgtcacttgttagctttttagagcatgtctttaaggaaaccttaaagttgtcaactctatacgtgggttatatatttaatattaattttgaattttaaataaaaatttacatttaaattataaaaataaatgtacatacaattgttaatatactttttgaagaattttatgtttaatgacctaaaaacattactatggttttacgttttttacaatagtcaactggtcttattaaccttaaacactattcattaattacattgatggattcttctttctttaaaatgtatagtagattttgtttttggtttttttatatgatttttttagcaatgaaggtcaatccaatagagaaatagtgaaagtttaatatattatttttatttaatttattataaatttatttgatgtgagttttttattttattgaaaagccaaaaaatgattaaaatgtgtaatttaaaattgtttttttctaagcagcagaatcaaacaagcaaagaaacaaatactgcaccaagcaaaggaatcaaagaaacaaataaggaagcaaacaatgaagtaagcaataaacgcacagaaggaaacaaagctaaataaacacattgagcatgtaagcaaaggaatcaaagaagcatatatacatgaatgcttatgcatgaaaattacttgggggaataagaaaaagtttcgaatcttaaacagttccaggattatgaaaattctaaatatataattatttttaagctaatatgttactatatactccctatggatccttattaatgtattttgtaggattttcacatatattaagaaaatatattaacaattgattgtaaatgtatctttttgtgattaacaagtttctataactccaaatcaatagtattcaaatatattttttctgaattttacaattcatcaatactaactaataaatattgtataaaaaattgtaaattgtctttttgtgaaactacttccttttttagataatacaatagtaaagaacaaagagagtataaattatgaatttgtgaaagataatgtcatcactaacaactcataatgataaactcaaccaaacaaaatctcatatccaccttctcttcaatgtttactatatgtatagtgatgatatatgtgacgtgctatgaaaagtttcaacaagatgaagaaccattttcaatcagaggtcctcttacgacaatcaaggtacaaaacaataatgactatttgcttggaatccactgtaaatctaaagatgatgatctcggtttccacattcatgtcaatctaggagattcaacaaattttctgtggatttagccaaggacgagataataaaggcgtgttcaaaaatttataattccaaaatatatttttatagatgtaaaaattgtacacgggaagcaacttgcctcagacagttatatggttttttaagtggttaaagtagtattaaattctattattgattcaaatataaataaaagaataatttaagaactgtataaaatttgcatatgatgttcttaatctggaaaaaaaaaattattgtgaagtatattagagcaaatttttgtaagagagcgaataagagatgtgagctcgtaactcaatatttagaaccttgaaccgtaagtcaacattttttagtgaagttgaagaaaataaaaagggcatgagagggatgcgtaagaaaaaatttattcggaggaatggattttcttcttgtggatgataaggtacaattggatttaaaacttgtgagtatcttcaaggttatttagtggaaacatctattcttttatatattaattaatgttatttccaaaatattaattttaagaaggataaaatttggaagtacatagttgttttggaggaaaaaatcttgattattgtgggttatttaaacaacttccatttattgtaaatatgcggatatatctagtgattttttgcctaatttagattaatcaagataaatatgtatttaatttaaatgctgatatatatcactctgaaaaatttacaaatcacaaaaagttattattaaccaacaatcatgataaactcatcgagagtaaatctcaactcttatttttgctcaattttcattgtgtccatagttgtgatatctttgatatgttcagaagctcttcaaattcaacaaactaaagaaccacttcgaggtcatcttacgagagtaccattgtcaatcagaggtcctcttacgacgatcacggtacaaaacgataatgactatttgcttggaatccactgtaaatctaaagatgatgatcttggtttccacattctcaaacaaggtgaattatatggttggaaatttcatgtcaatctaggagattcaacacttttttctgtggatttagccaaggacaagataagaaaggagtgttcgagatttacaattccaaaatagatttttatagatgtaaaaattgtacattggaagcaaaaaaagatggtttatatggttatagcaacttgcctcacacagttatatggttttttaagtggttaaagtagtattaaattgtattattgattcaaatataaataaaagaatgatttaagaactgtataaaatttgcatatgatgttttaacctggaaattaagaattattgtgaagtatattagagcaaattttagtaagagagcgaataagagacttgagcttataactcaacatttagaaccttgaaccgtaactcaacattttttagttaagttgaagaaaataaaaagggccggagagggatgcgtaagaaaacaaattattcggaggaatggattttcttcttgtggatgataaggtacaattggatttaaaatttgtgagtatcttcaaggttatttagtggaaacatctactcttttatatattaattaatgttatttctaaaatattaattttaagaaggataaaatttggaagtacatagttgttttggaggaaaaaatcttgattattgtgggttatttaaacaacttccattatagtaaatatgcggatatatctagtgattttttgcctaatttagattaatcaagataaacatgtatttaatttaaatgatgatatatatcactctaaaaattttacaaatcacaaaaaagttattattaaccaacaatcatgataaactcatccagaataaatctcaattcttatttttgctcaattttcattgtgtccatagttgtgatatctttgatatgttcagaagctcttcaaattcaagaagctaaagaaccaattcgaggtcatcttactagagtcacgattcaaaatgataacgactatctacttggaatccattgtaaatcaagagatgatgatttaggctttcacatacttgcaaaaggtgaattatttggttggaagtttcatgtcaatttctgttattcgacgctctatttttgtggttttagccaaggacaaatgaaaaaaggcgtgtttgaaatttacagagcaaatagagatttttatagatgtgcaaattgtacatggaaagctgagaaagatggtatttacgggtatagtgaggatcctgtaaaaggttatttattttataattggttaaagtaatataaaattgagttatttaagagaaacaaatatgtaatgcagttgctaggcaaatcagtgatgcaagtggcatacaagcaacacgtgatttggggaagtatttgggaatgcctatcctgcaaaaacgaataaataaggacacttttattgaggttctcgagagagcttcgtcacgacttgctggttggaggggtcgtttcttgagcttggcagggagattgactttgacgaaagcagtgttggcgtcattaccggtgcatacgatgactactattgtcttacctaagtccaccttagataagttggatcagttgtcaagatccttcttatgggggagcactccagagaagagaaagttacaccttatagcgtgggatcgggtttgcttacccaaagcggaggggggactgggaattcgctctgctcgaccaatgaatttagcgctgctttcgaaagtgggctggagactaatgaaggataggactagcctttgggctcgggttctacgcagcaaatacagaattgggggcttgcgggatactacttggataaatactaagcggaatgcttcttccacatggcggagtatcaaatctgggctgcgtgaggtggtgatcccaggtatgaattgggtcgttggtgatggtaaagatatttgtttttgggatgataagtggttggtggaggacccgatacgtgatctagcagccgtggagcttccagcggacttccaggggattaaaataagagagctttggcatgagggttccggctgggatcttgcgaaaataataccttatgtctccgagggtgtgcgtttacgcttgctgtcaatggtggtggatacggttacaggttctaatgatagaacaagttggggagcaaccgcaaatggtcagttcacagtgaaatcagcttattcgttcttgttacaaagtgagactcaagcacagaatatgaggcagttttttgatcgggtttggcgagtaactacaacagaacgagtgcgagtgttcatttggttagtcgtccatcaagttattatgacggatgtggaacgaagaaggcgacatttatcagcgtcgggcgtttgtcaggtttgtaagggtggggatgagacgattcttcatgtgctccgagattgtccttcaatagccggaatctggggtcgccttgttcctcggggtaagatcacagctttctttgccagcaacatcttggactgggtttatcaaaatctgagtgatgttacggagatacgaggctgtccctgggccacgttgtttgcgatagtggtttggtgggcctggaaatggcgatgtgggaacgtgtttggagagaatggccgttgtcgagatcgtgtgcgttttgttgtggatcaggctagagaaatttggattgctcatctgaatttacggagaggagctatgcgggggagtgaggtggagatgagcattaaatggaccccaccgagcacgggatggttcaagctgaataccgatggcgcatctaggggtaatccgggtttagctacagctggaggagtggtgagagatggagagggccaatggtgcgttggttttgttttgaatattggtatatgctcagcacctttagctgaattgtggggggtctattatggtctacacattgcttgggagcgggggattagacggttggagttggaggtggactcgacattagtggtgggtttcttacaggcagggatcgaggattcgcatccgctgtctttcctagtacgtctgtgctatggcttcatttctagggactggatagtccgtatctctcatgtgtatagagaggcgaatcgtctagcggatggtttggccaactatgcgttctcactcccgttgggttttcatgcttgtggttcaatgccggctcctgttgcttcgatagcgttggaggacgcagctggagttgtgcggttacgtacggtccgagtgtagttgtatttttattcagttttttgtattttttctttctgttggggggctttcccccctctcctaccaaaaaaaataaaataaaattgagttatttatttaagagatactgttgaagagagaaatatcatcttccttccttcaattacacgtcgcggatcaaagaatccctctctaactcgttctctcgatcgcaaatttctcaattttagaggttgggttttgattgggttgattcgtatcttgtttgagtttcagcgtcattgggtcgcaagtgtgagactttcttgtgccactggagatttataaaaaattgatttctataaaaaaaaagttttaggtagagtttctgttgttgaagaacaagtcattgttttacttttggtatgagcttttgttctgtaggatttgtgagtttgttcttcttcgtagttttgatgattctttcattgtgttgtatattcaggtgtattatcctagcagttttggggatccacaatgagacaattagagaaagatggtactagtgctgaccttggtaattgattgatttggagcaaaccctaattattccgtagagggattttactaggtatctaaactatcgatggcaaagacctctaaattcttctttgatagtttctcatgcttcatgtgatgctgactgtgtccttcctcgagtatagatagcagtgaaatgttgatgcttttccaaacttctgagcatgcctgattttttctcctacttagaaaactctgtctgcgtgactaatttgtctaaagatgcctgtggattgaatttgatggagttgtttagtccgtttggtgctgcaacccgttgtcatgtagctattgaccaaaagacgagcaaaagtcccatacaatgcgttggtgaaatgaatatagtaaaatatataatattctataattaatatatatttctccaaaacccacaaacccagtgttggcatgcaacgtttcttctccattgtttctattgctccaattttctggatttcattttctctattattttttagtgtggcctctctttatcaagcctcactcacatgcaaggtttttcttggaagaacgtagggtttacttctctttccaaaagtctgaaatttgagagacaaaagattgaagatgtgtatacattgaatttcaggtaagtattatgtaacgccccgaccgtccttagctgtgggcctcacgtcttctttcgggtccatgggtccacccctgtctgacggtctatgcgtcacatctgggagactttaaagatttgttaccatctctacaaatcactacatgatctttcctcatgatttgtcctcacttgcatggttccgacaatcactttccggaaggtcacccattctgaaaccactccagcccaagcacgtttaactgtgaagttctctcaggacgtttgaccaaaaagataagtgtactttggtgataggtggccaaatcaatttttttaaacctctcagcatgcactaccatattcctgaaaccagagtgttacatattattttattttattttctttaaacttccatgtattaattttttccgtatctctattacaggatacagttttgagaatgtcacatgaacaattacaacagagcagcacaaaaagaaattacaaataaaaacagaaagtaagagatagggtacatcatcaattcaattcagggagaaaaaaaggcatttgtaggtgagaactggacgaatctaaaccatttagagaggtaattctcaccaagtaaaggtgaagacgctgaatgtgtcctttaccttaacatcataaattaattatcccgtatttagtacgggtgagaatactagtaccctataagacgaaaccaacaaaggaaattttgggactaattctagttagagtcttgtagaagacgaatataccaccacgggatattgtgcttactaagagtttcatttttctgaatggatagttttatatagtagccgcccatcggtggcattccgagtagttcatatagtatatatgctttaacattttgattctctaaatgcagaatttgatattatttgcatacactcttactaagttgcatataatttcatgagcagacaatttacattccaagtgtggattaatgatacttagtcgagaaggacacattattatttatttagagaaagacaagtagaagggatataatacaatctaggatcaaaaaccctcatgacacgttggcaaaccggaaacaacttattaaacagtactagcaccatagtctagcattttttttataacatacatcgatagacgacaattattccatgaaaacagtcacgccactctgaattgcgaccatccttcagttttaaatgtacttgtttaggcacttttaactgcggcggtagatcctccggtgcagacagaagaacatgccttggtgcattgttcaaccgcttcactcaatactttacttgtgtctagtcatggaaacaaaacaatattactttgaattattcctttatcttaaaaaaatgttaataataataacaaaaaaaagaaaaaaataataatgtatagtgaacttgttttaccaaagttttggagagtggtcaaggcaccacacacagaggatgcacaccctagcttgcaatattcattgacagcatcacctaaggcaaaaatcaagatacatgcaaattacttgcatcacacaatgaaatttccatccatcttataacaaatataacttaatagaaaaattagatatataccagaattttcgagaatgtcattagtatatcccggaggacatatcgtctgagatgtatttttgcatttactctttaatagacaataaaattgggatgacacggaaagcatgcatacaaaatacacagatctatcatccttggtaggacagcagatttttgcttctacttgaatctgtgctaagacaagactcattatgagcagacttgagatcacagttttgccttccatcttttgattgattacttgtttgatcacaaaatgtacgtagacaaaactcttagtgataactataagcttatcttgatgaatttgtgatgaagcaacactccgttaaatactagttcttctacaatttgcatccacgaatttcatttatttaatgctctattaagtctactcagtggctaccacatatagatgaatctttaatggtgttcgtcaggggagatggccatgcaacaagattggcttaaatactagttgttcgacaaatttgcatccacaaaattcatttatttaaagctctattatctctactcagtggctatcacatatactgcgcccactcccatgtcagtttctagggggtgtgggggaggtgggggcaaaagccattgccagggtgcatggcaaatttttttaaaaaaacctttaagtaaaagagtcaaaaaaaaaaaaaaaaaatcgtgtgaaaaggatatgtaaatttagttttacctagggtctaaaaacatattgagacgggactcccaccataataaatctttaaaactaatggcgtttgtctagggagatggccatgaaacaagattagcttaaatatactagttgtattagaacttgccaccaaatacttcatattataacttcatcacatgcacgctctacagagtctatctcaaagttgtaacttgtaaaacttctcgagaagcgaggtttgagaacacttgcatgacgtgataatgtttgctgcgaaggtattttcttagataaatttgaagaggatgatgagacaaatgaagaggatatgatggaagcgcctcaactcaaacgatatatttcaaaaatacctttcatcatatcaatattttggcgcattatttattctttctattcagatattttggtgcgttattaatatttgaattttgaaaagaaacacacaatctttccaaaatttctagagaatgtatcaacaatatcaaatttcacaaatttcttttgttcacaccgaaagctaacagtctcaaaattaagctaaatctaatatgagtaaattaaaaaaaaaaaaaaaaagcagattaaattggttgtaaatacagatgattaaagtatcaagtttagtttagggaacttggccctttaactatattcttatttttctagacaggtgaaatatcttctcatgaattcttaggcgaagaaaactcgcaattgcaaagctaagtaattgacaagcaagtacgtaatcgtttttctacaatccgacttctaggcgataaccgcttcgataaaggattacaattttggtttgaaacaaggctctaaatgtaaaggttttctaatattctgctacattctctattttccgatgcactagttgtacaaaagctatacttttctttgaatataatttaacattattttcaaaaaaaaaaaaaaaaaatttttgcttggtatccaaagaagttgcaggtatgattcgaccctaggactttgccatattctcctttaaaatctcacccaggtaaattaatcggtgcaagtaacacattgagtttagaattatttttgttcagtcaaaatatatctaaaaacgttaaacaatatctaataaatcagtatagtgaaaatataggtaatgacctagattagagtcactccacatatcacttcaaaaatctttaagaaaatattacatatagttcgagtattgttcttagacttcaaggtcgtgtagtatgggtcacatcttctgtgttttcgagtcgaggacgtctacatggtggtggtctcttggctagtacttggaaatcatatttggaaataggagctccacatgatcctgatggtggagtatatattgctggacccatatcgtcatctaattcatagccaaggtaatgatatattagtgataaaatttggctgctccatttgattcaaaatctgaaatctgagtcaattgttcatcctaattgagaagaacaattttctgtccctattttattttattttatactgtttttctctgtccctattttactaaaaatgttatcttgattcaataaaaatattttacatttaagttaataattctcttttcacaacatcgttttcgattttcattctacttcatcgtttaccaatatttcaaaaacatgatagattgtaaaggttatgaattgtgcgattctcttaacatgtgaactaacctggtatactagcttctacaagaccaatcacaaacatcaggcaaagcagaagacttagcaaaagaacatgtgatgtattcttcatcgccattggctcttctatcttaaataacttaaaaagaaattatgatataaactttaacatttttttgatacattatatagattatatatcattaaatgtagcatttaaagtaaacacggttggtaggttagctagttgctcttcttccaactaattttcctctcatcccgttacgacttttgcgacttgtttgcatgattgcatctattataacttaatttttaattgtttttattatgacccaatagtcaacaatgtttttaatagacgatttcacattgccatcaacaacggaaacgcccatgttgtaataccaaagtgttattaaaaaggactgatgacaacattggattttccaatatacccacgtgttatttaaaactaacattgttgattgtctgttaaatcctggaaagaatatatctcttacaagatcatgaaagtgaaaaccaaaaacatgatctctttaagcacttttgcagaattccataatgatataaacctttttactctggttagtttatcaatctatggggtctcaactaggttaagcattagcaaaacaacattttcgttcaagaataaaataaaagcctcacacaaaatgttagattgcagcaacctagacaaaacattctaattaatgtagcttaagtcattcaatgagatcagaggtgctataacagcaggagaggctctctattttgagaatgcatgtagtcaacctcaacctcattcagcgatcctctttcagtttattgtgttggatgatttattatgatatttaactagaagatgatgcccgtgactctatttcttctaacacttcttgaaacatttctagtttggggaaacaaaagagaacgagatttacctattatacataataaatcaagatagtgaaaatataggtatactcgatattagagtcattccatgtatcacttcgacaatctctaaacaacattacatatagatcgagtagtgttcctagatttcaaggaagtgtagtgtgggtcacatcttctgagttttggagtcgaggacgtctacatggtggtgctctcttggctagtatttgtgatgaattgaattctgcaattgaagctccacatgatcctgatggtggagtacttatatccggacccgtatctatttcacaacaaagatattaatatatttgtgaaaaaatagctgcaaggatagtaactgtgattttctttatatgtaaactgacctgatcttctagcttctacaaaaccaatcacaaacatcaaacaaagcagaagaacatgtgatgtcttcatcgccattggctcttcttatctcaagtagctaaatacaaatcaagagaaactaaatatatacaaactttttatatattgcatttaaaatgaacgcggttggtagcttagctaaatgctatactgccaactagtttccttctccccgcgttttgacttgcgacttatttgcatgattgcatctatgaagactagtttttatggccccaatagtcaacaaagaaaacaaaagtcaacttttttttatggggttgacaaagtcaacttggcatgcccctcttttgttttctattattttttggtacgatacacaacaccaatttttttatatttttttttgctaacacataaatatttcattaaaaatagaaaatgtttggaggtactagaaccaataatttggtctcataaaaaaagtaataaaaacatggaaacaaaaaaatccgtctattgtatcaacaaaaataagtaagctttcagaatcaatgaaacgataaaacgattttgatgtatctcctagaagacatctcaaaaaggaagatacacattgtcaaacaaccaaggtcgattcaacaaaaacaaagctgatggaagagccttttactttttttttttctgttatttcaacctctcttttgttttgaacattttgatgcgttaatttaaaagtggcgaagattatatggttatgattcattggactattggagcatacaggttgtgagtagctgattaaaagaaagagactaagtagttacttattaatctagagtgagcttaaacactttgacaacaaaaagaaagagtgagcttaagcattagctaatggataaagagtagagaaggtgatgacatgtggatgagtctgaattcactagccatggccacaacacgtttgcctcgtccaacaaccgtcgtccagtgcaactcttaactcttgagagttggttttatcggcttctctctcaaaatataaaattgtgattcataaaaaatctatgttgtttaccagattttctttacttagctagccgagacaaagattctttttttttttttttttgtctcggcattggttctaatgcaggttgaacaatccaatgagaccagagatcctacacaacaggagtagctttattttgagaatgcatgtaaccacaaccacatccaatgatcctctgtggttggattacttatgaaatttaactaagagatgtactacactgaaacaagtgaagtcagtgattccatttctttgaaagcttcttgttacatctcaagttttgagcagcctgagagaagtagaatttccaatagcttcaccctattaagagttccctgcaaataagttatcactacaccaatatatactgtattaaacgatgcaatatcctttgtgttctacgggtacaacactatagcacgaaccattttttcgaaaatggatgacaataacaaaaccatataagccgagaaagaaaccaacttgagttccacaaaatcaagtgggtaacataatgtaatcagttgtcgaattggcaaaaatggagctcaagagttcaaagtatacttcaagaaccacaacaagtgtcaagaagccgattgctcccaaaattttccatagactcattctcattttcctgaaacgcaaatcagtaaaagatcaaaagatgaaccagaaatctaaaccacttacacgaaacacattatattttacgccatatacttgcctgcgaggtctgtgattgctttcctccacgtctacaactggttgattattttcttggtaccttgaatatataagagttaacaacaatgggtgattcttaaataaaatgggactacatcaagaagagacgtctcaagaaggttcatatatacctggagattcccgggaaaaagctacaagcgaataggtttgacgtttccccatccatcggataactaattttccaatgtacaactgcctgtaatgaatcatgtccatactttgatcgatgacaatctaaatatataccattactagcatagccaagatcatcttcttcgtatgtaaacttaatatcaccaaagctaaaatctgaggagtctcttgctttgtaacaaagagcaattcctgttgctagaatcgtgaatctatcatcgcaatcaacatcaacttctatttcgtcacctgttactatgtgaaaatcgttggtcaaaaggttggcattcatctgaatccgaattttcgaattcttaaggctatgtatccatgcactgcctctggtaagattcctcactatgatagcccgggggtatatggagctgtatcccattggacacacgaagttcatccataaggtgaaccctaccacggtatcagagttatcagtttcaggaactgtaatagagaatgaacgcttctcctcctcaaagtaaacccagtttggaatgacgtttggacgatcgactgggatatatatgcattcatggttcctcttaagccaattctacaaacaccaaccaaataattaatgttgttcacaaacaatatctttaaactaacaatcagatacgagaaaaacaaaagcaataaaaacgaacctcaagcatggtgttaatagtagtatcagtagatgcgagtttgcacccatccaagacgatgaaactcaggtattcatgattatggatccctgggatctcaaaaaggctgatgcagtcgttgagttgcaatttaaacaatgccgagcatttagaaatatctggagttcttttcaacatgatgcattttcctacgtccaaaaataataagcttctaggtaaactaaggatggattgaagttttgagcagtcactcaataggagttcaccgagattcggtagagtagcgaaatctgttggcaaattgcaaaaactgttgcctcgtaaatcaagatcccggaggaaagataaactcccaatatcttccgggatcagttcatcagatagattgcagtaacctagagataaaattctcatgtaggttaaaccacttaatgagactggacgcaatagagaaacagaatggctcttttcagaatatagattgtcgatatcatcactcaataaacctttgcagccgttaagagataaccttttcagtttcttcagctgattgatcgtagaggggatttcccttagagctgtaaaatctgcaagaagagttgtcaaggattccaattcccctaaagcatcatccagtctctcaagttttgagcagtttgagagaaagagagattcaagtgacttcaacttatagatttcctcagggagaacgtcaagctcgatgcaactgcttagatttaatagtaccagctttttgtcaagaatcccaattgacttgtgaaccaaaaccaagcttttgcaattgatcagtataagcttctcgacgtttgggaagtaagagaaatctggagtctctctgaggtagacagaatgactgagatcgaggtatttcaccatatttgctggttgaggaggctacaagaaaatagagcatatgattaaatcactatatcaaaaggagcttagctttattcgatattttaacgtaccgattgagctttccaaaatcgtttaaggttgctgtactgcaagtccaaagcggctaaactttccaagcttaagtttataggaaaacattctaaagaaaacccatgccaacacaaccatcgtagatcttttgggaaatgctcatagcttccattgagatctacatatctaagttctaacaatctcagctcctgcatctttgcaaatgcttcaacctcgaagtactggaaatccataacgtcggctttcaggctaagtccttctattgcatttgtaccctgtttattacaacaaacaattaattagaagcaatgttcttcaccttctccatataattgtttttctgagaataataacatatgaatctttttccttactgatttctttttcagtacaccgacgacatcattatgactccacagtctgctacgttctccacatttcttgggagatatttctcggacaatttgtcttcccatgtctcgtaataaatcatgcatcattatattgttaccagaaatagtaatgagacacctttccatcagcagactgagtactatgtcagggtataagttgcatccgtccaatatgcaggcaacatagtaactatccaccccaatgaaaaaacaagcaatgtccaagaatacatctttctgttcgatagttagcgcattaaaacttatctgaagtttcgcttgaatgttatcattagggattcgtttcaacaattttaacgtgctttcccactcacgaatgcttctctcgatgagaaaagcacccaagacttccacagccaagggtagtcctgcacagtatgtaactacttcttccgagtgctgaagaaactctttcggtggttcacttgttctaaatgcatgccaactgaaaagttcaagagattcatcaccatcaagttcctttggtgaatagcttccttccgctcttagttgctttaacaaatgcatatttcttgtggtaattattatcctacttccatggccaaagcaatctcgatctatagctgctgaattaagctggtgtacgtcatcaacatcatcaactacaagaagtacacgtttactgcgaaatctttcttttaccgcatgatcaaggcctttgaactctatgtcattcctccttaaaatgtcagagagaagttgatgctgcagatgagttcttccctctggcttcttggaatattccctaaaattttctaggaaacttgatccttcaaaaagatgtgagaattcgttaaacgccactttcgctaatgttgttttaccgatcccacccattccatagatcactataacccggactccatccgaacctatgctcagtagtgaagaaatgtgttgtaggcgtgatctcagacctacagcatatgacggtacatgcaggtactggcagggcagtcttttgagaatctctctagtgatatctgcaatacattctgcttcattcctggaatcataaatactagttaaaagagctgaaaatatagtttcaactttctgagatgcatcatattttttcatgacaacaagagaatcaaggaacataatagatcggtggagctaactgaccgatttttgatgtcccacccagatatatttgctacttttgttaaagcttccctccaatcctttagcttgtttaatgggtgactgtttttgtgtttagaaaatgatttagcatatgacccttgctgccagcgtatgtctgatgggtccacgtacaagaaaattggaaaaaccatgtgagagggattatttttgtggcttttcataatgtgaacaagttcatcaagacaccaagccgatgatgcgtagtcctttgttaaaacaacaatgagaattttcgaggtttcaatggcattcagtagctccggggaaatatattctcctctttgcaattccacatcatccatgaatgtgcttataccacatcttctgagagaatcgtaaagatggctcagaaagttcttccgcacatctgctccacggaaacttacaaacacatcataggtccatcgctcaggaattcgctccctgccttgagccatacctaacatgtgattacaaagagaaactaaggagtgtcatttgaacaagaatctcagagaaagaactgaacagcttaaaaatgtatgcttgggggaaaccatgttttgacaatgaaagtatgaaggggacgtgtggaatatgaacacgacgataaaacacggcacgagcaagaaacatcataggtcactttcctaaatacatgttatcttagcaaggttacgtagtgaaacctttctccaaacaagcatgctaagttaatatattgtaacgaatcacagtaaacaaaactctgtactaaaagggaattttcaaccagataatgaagctttaattgggaagcatgatcagcctaaagttatcttgtaatactactttggtctttgaaaacaattacaaatgattatttgtactaaaaaatggattcagcaaaacaatctatcagcccacaaagttcacaaaacaagcaacaaaagaatggagtaagagctttacttaccatataagagacacaggagaatttgagctagtcctttttggcacactgaagtaaaaaaaaaaaacagagaagatgattttaaagagaagatgaaagaagaaataagaggaacatatataaaacaaatgaaagctcaccagaggactatagctatacagttacagagctgaaatcatgaaactgtagaatgttcaaatcaacttctttgtttaaagaaagcttctttagatctttcacataatgaaattgaaccaaaagaggataacatatcttatctcttgcatttgtgactctgattaaaaaagttgactttccaatctcaaaatcaactctggaggacccataagttagaggaccttgacttaaagctaataacagtgaagaaaaggaattgacaaacaaaacaatccactgatcttctttgagataaacaacaacttgtttaccgaatttctcaatcatctttactctactaaactcactgagacaattcatcgaacaccttcaaggcaatgcagcaactaccttaactctaatcaattaactataaaacaagtcaaccaaaattgttgacctaaagcaagccgtaactaatagtcaaatatataccacaatttaacccttgagatgaaccgtttatttggggaccgaaacgctggctaccttatatctttgattattgagattcgagagagatacgttatgccttttggacctaaccaataaagtttccgtagtaaattaaaatagtcaataaatggttgacacatatcaacatctaactcatgcgaatttttaaacccaacggatgcggttgcgactagtacgatagtttgcaaaaacggatggtcgcaattttaaccattaataaatattttaaaatataaatttaacggtttaaaacatattgtgtttgcgagagttttataactagtaaatttggggttgcaatagggattagtcggcgatgaccaaaataaaatataatctataattacaaatatattcttgtttacttatatatgtaattataaagggaattttataaaatctactactttttctggagttcttttacaatttctacaacacaaagctttcttttacacattgtaccacatttcattatcacatgcacatttgtggacgaaattgtcctagatggtgacagactgatgtgacagccttttgtttttgtctccagatcttgtctccgattagaaattctctattgcgtctacgccttgtcttcgattttatcatcttgctctattattatgaatcccacatcttgtccaccaattgttctcatttaaagattttgaattttatttagattttttgccatctattttggtccacagattagttgaacgttattgtcttcacctgaacatttacaattgcatataattctattttaataatatattatatcggggataagttaatatcgaatgagtgatagaattagataagggacaaattcagatcgaaatgatagacaagataatatgttataactggatctttttgttattttgcaatcgaaggaaaaaaagcaataatctggattggtgaagacaataatgttcaactaatctgcggaccaaaatagatggtgaaaaatctaaataaaattcgaaatccttaaatgaaaaacaattggtggataagatgtgagattcatgataattttgaaagatgatgaaatcggggacaagatctatatacaacagaaaatttccaatcggggacaagatctggagacaaaaacgaaagttatttgtttagtctcacgaaatataatgtttattggttgaagcgcacgtgtgtcgagggaatagagattaatagaaagaaaaaataaatagagaggtaagagaaatagaaaggagcgataaataagaaaataaatatagagggtaaattagtaatttcaataggaaatgtcgtaggagttaaaaggggattggaaatgtggtagattttataagaaattgaaaaaaatggtaattgatgtaattttcccaattataaagaaaaattcattcaaatgctcttttcatgatgccccttttcaactctaccttttcatgatgccccttctcattatgtagattttttttttttttttttatatcaattggctaaatacagcacatctggttcagctaaactaaaaaaaaaaaaagatgggtgagagaggcgattttagggttccagtgacgagttcgcaagatgcgccaatgatggatatcggagatggtggtcgtccctcgggagaccctctggatgtggtagagtcatgggcgagtaaggtgtccggtagcaatgctggagggaggttgtcaccggagagagtgttggataaggagttcgtcatggcgaggatgcggctggagtttcctgatggggaggatggagaaccagtcattacgatcgcccaggaagttcttgatgtgatgaatggtttgtggaagcagtgtattattgtgaaggtgttagggagacacatagcgttaccagcgttgaacaagagattgagggaaatgtggaatccaaagggagggatgcatgtgttggatctcccaagacagttctttatgattcgctttgatctggaagatgaatacttggtggctcttaccggtggaccatggagagcgtttgggagccacctaatggtgcaagcttggtctccggactttgatccgttgaggaatgagatagtaacaacgccagtgtgggttcgtttgtcgaatattcctttgaatctgtatcacgaaacgatcctgttgggtattgttcagggattagggaaacctatcaaagtggatctcacgacattgcatcatgcgaaagctagatttgcacgagtatgtgtggaggtgaatctatcaaaacctctcaaaggtacaataacgattaatggagagagatatttcgttgcttatgagggtctatcaaacatttgctcgggatgtgggatatatggtcatttggtgcacaattgtcctaggagagtggtggagaggacagtggcgcctgtgaccgtggaggttccagtgaatgtttccggtgggacgccgcaggatgacggttttacggtggttcgaagaacgggccgtaagggaggagcaccggaaaatagtggggtggcaacagctggtcggttgagcacaaatttggaaaggaatctgcgtgatatttctgggcgggcgaatatggaaagcattgatacctctaacagttttgggaatttggaggaagtgattgaggggagtgtaagggaagttgctgcatcagtggatgcgaataaagaaaatatgatgaatggtaattatgctaaaaaagggaagagtgttgcacaagggaaggcttgggcgccagtggatttaatgaataaaattagggccggaaaaaaagataaaacggctggaggcaaggtaggagaggctaatgggccaaagcccagaaatggtaactccaacaggcctgtgcgtgggttagtttttggcccgacaaggaaggaaattgagttatctggctcggggaaaaggctgagagtggatgaatcttcggtgtatcgacagggtggaggtggttcaccggagaaggagagtagaggagttgatggcgtgtcaatgtctgtggcgggagaggctgtggcgaagagttctcttgtggatttggcagaggcgccacagaatagagaagtggaaatgcagaatgggttgtcggcggttgtggcgacctctcttgcggcatgacagcttgccccggtagttcaagcttttttcaatctctttatgatggatgttttattttggaattgccggggggcaaataaacctcttttccgaagaacaatacggtacatgttgaagaagaataacatcgacattctggctctgtttgaaacacacgctgcaggagatagagccagcagaatttgtcagaagttgggtttcgagcacacgttccgggtcgatgcagtggggcatagtggtggagtatggttgctgtggagagctagtgtgggagtggttacagttgtggcctcgtctgaacagtttattcacgccaagattgtgagtgagacagagaccttgcatttgattgtggtttacgcagctccatcagttagtcgaagaagcgggctatggggatgtttgaaaactgcgattgaaggagtagatggtcctttagtgattcgtggtgatttcaacatgattgtaagacttgatgagcggacaggggggaatggacgtttgtctctggactctttagcattcggtgaatggattaatgagcttatgttaattgatatgggttttaaagggagtcagtatacttggagaagaggtagattggaagagaattttattgctaagcgcttggaccggattctttgctgtccccaggcacgcttgagatggcaagaggcgacagtaactcacctccccgttgttgcctcagatcatgcgcctctttatctgcaactttcgcctgcattccgaggtgacccgaaacgaagaccattccggttcgaggcagcttggttactacatgacgggtttaaggagcttcttcaactctcttggaataacagtctatcaacgcctgaagctcttaatgggttgcaaattaggctgaaaaagtggaatcgggaggtgtttggtgatattaatcaacgtaaggatcgattaaccacggaaatcaaatcggtacaagacttgctcgatgttgttcaaactgatgctctgttacgcaaagaagaagagctgattaaagagttagatgttgtcatggagcaggaggaagtcatttggttccaaaagtcacgggagaaatgggtgttagacggagatcgaaatactaaatactttcacacatctaccattattcgaaggagaaggaatcgtgttgagatgttgaagagtgatagtggtgtatggatctcagacccgcaggagctggagaaattggcgactgcttattataaaagattatattccatggaggatgttgatcaagaggtggaaatgctaccaccgggaggttttgctaggcttacagagagagaagtagcagagcttaccaaaccgttctcggcagttgaggtggaagcttcagtccggagtatggggaagttgaaagctccggggccagatggataccaaccaatcttttaccaagactgttgggaggtggtgggacagtcaatagcccgctttgtgttggatttctttgtaacagggatcttacctgaaggaaccaatgatgtgttgatggtgcttatccctaagctagctaagccgagtaaaattatgcaattcagaccaatcaatttatgtaatgttttgtttaaaacaattacaaaaaccatgatgcggcgtttacagaatgtgatgagtaagctcgttggtccagctcagtcaagcttcataccgggcagattgagtaccgacaatattctggtggttcaagaagcagtccattcaatgcggaggaaaaaagggcgaaaaggttggatgctcctaaaactggatttagagaaagcctatgatcgtatacgctgggattttttacatgatactttagtgtctgtgggactgccagattgttggagagagtggatcatgaagtgtgttgcaggaccatctatgactttgttgtggaatggggagaaggcagatccgtttaaaccggctagagggttgagacaaggtgacccgctgtcaccatatctctttgttctttgtatggagcggttgtgccatcagatagagatttcagtagcttcgaaggagtggaaaccgattaatctctctcagggagggccgaagttatcacatatttgtttcgcggattatcttattctttttgccgaagcatcggtggcacaaattcgggttatcagacaagttctagaacgattctgcgtagcgtcggggcagaaggttagtctcgaaaaatcaaagatcttcttctctgataatgtgtctcgggatttagcgactcttatcagtaatgaaagcggcattaaggcaactaaagatctgggcaaatatttgggaatgccagttcttcataagcggattaataaagacacatttggtgatgtggtagagcgagtagcttcaaggctggcgggttggagatgtcgcttcctcagtcttgcgggtcggattacacttactaaatcagtcctctcatccattccggttcataccatgtcaacaatttcgctgccacagtctattttgaataaattagacagtatctcacgctcttttttatgggggagtacaatggaaaaacgaaaacaacatcttattgcttgggatcgtgtgtgcttgccaaaacaggatggagggttaggcatccggtgctctacacagatgaataaggctcttctctcgaaaattgggtggcgtttacttcatgatgatgtgagtctatggtcgaaaatcttgagaagcaagtaccgtgtcggtgatattcataacagagcgtggatggtgtctaaaggtacatggtcttctacatggaggagcgttgtcgtgggtctgaaggaggtggtcttctcgggtttgagctgggttctaggggatggtgttgatatcctcttctggaaagataggtggatgtcgcagaccccgttatgtgaggtggtaacatgcgaattaccggcaaactgggaggcggttaaaagttgtggatgtttggagagatggagtgggctgggatttacagaggcttacgccgtatttcacagaaggtatgaagctcaagttactatctttggtggtggataatgtgacaggggctagggatcgtttgtcttggggagggtgttccaatggtaattctacagtcaagtcagcttactcttttttaagcttggactggagttcgaagcagcagatggcgcgttttttctctagaatttggcgtgttgtagctcatgaaagagttcgagtgttcatatggttggctgcaaatcaggtgttgatgacgaatgttgagagatacagacggcatttatgtgattcgagcttatgttcagtatgcaagagtggggaggagacaattctacacattttacgggactgtccggcgatggcgggaatttggacccgcttgttaccagcacggagactctcttctttctttttgaaatcgctgttagaatggatctacgcaaatttaggagaggagatagagattaatggttgtccatgggcggtcactttttcgcaggccatatggtgggggtggaaatggcgttgcggtaacatctttggcgagaacaggaagtgtcgggatcgggttcgttttattaaggatcgtgcgttggatgtttggaaggcgcatgtgcacaacatgggagtgacgacgcggacagctagggaggagagattgattgcgtggtctccgccaagggtgggttggtttaagctcaatactgatggggcttcgcgtggtaacccgggactagctacaacagggggcgtagttcaagacggggatggaaattggtgttatgggttttcgttgaatattgggatttgttcggctccgcttgcggaactatggggagcatattatggtttaaatatcgcttgggagcgcggtgtcacacagttggagatggagattgattcggagatggtagtgggttttcttcggacagggattgatgattcgcatccgctgtccttcctggtgcggttgtgccatggcttactttcaaaggactggtcagtccggatttcgcatgtgtatagagaagctaatcgtcttgcggatgggttagctaactatgcttttcttttaccgttaggttttcatttgtttaattctactccggataatgttatgtcgattgttcacgacgatgtagcggggtctgcgtacccccggaacgttcaagtgtaatttttttagtttttcagttttaataaaaatgggggttcgccccctcttctaccaaaaaaaaaaactctaccttttctgtcattttcatttctaccatctttaattttttaatgacccatttacccctaatttggaaatcgttttaagttaacaaaataaaatattaatattttcgcctaaaatgttccaaaataaatttcccgccaaaagtttccgaaaaaaattcacgccaaaaaaaatttcaaaaatatatttcccgcaaaaaaaattttttggcggaaaatagatttacaagggattttaaaataattttaaaatatttacaagggattttaaaagggttttaaaagatttagaagggattttaaaagggttttaaaagatttagaagggattttaaaagggttttaaaagatttagaagggattttaaaatggttttaaaagggttttaaaatatttaaaagagattttaaaagggtttaaaagggttttaaaagttgtataagggtttttaaaagatttttaaagaatttacgagaagaccctttaaaaactcttgtaaatattttttaaatcttttaaaacccttttaaaatctttggtaaatattttaaaatcccttgtaaatcttttaaaattccttgtacattttccgccaaaaacatttgttacgaaattttttttttgcgggaaactgtttttttggcgggattttttattttttggcggaaaaaaagtttggcggaattttgtttttggcggaaaaaataatatttggtgccaaaaatttggcgggaaaatttcagtttataattacatgttcctattagatgaatgtaatttggtcattctgttcaagggaagaagtatttttaaaaatggacaacataaaaaagtattgttgcaaaaggatattaaaaaagggtagttttgcaaatctcccaattataaattggcaccttttatctttgattattgaaattcgagagagatacgttatgtgtggtaaaaaaagatacgttatgtgtttcggacctggcaagtaaagtttcggtagcaaattaaaactttctttcacacgtgtcaacatcttaatcatgtgtaaggaggagacgttgcttaaggagtttgatattattttggaacaggaggagacgttgtggtttcaaaaatcgagatagaagtggattcatatgggagataggaacacttcatactttcacacatctactgtgattaggagaagacgtaatcgcataaaaatgcttaagaatgatgaggatcagtgggtatcagatactcgtgatttagagaagcttgttctggattattattctcgtctttattcatggatcatatagcgcaggaggtggagaagctgccacagggaggttttgtgcaaattacacacacagaccaagtgggtctgagtcggagatcgttgctgaggaagtggagagagcgattcgtgggatgggaagctataagtctcctggtcctgatggatttcagccaattttctatcaaagatgttgggagacagtgggtgaatctgtcacaaatttggtgttaaaattctttgagactgctgagctaccttccaatctgaatgatgttctaggtgtcttgctgcaaaaggttggtaaaccagagaaaataccataatttcgcccaataagtttgtgcaatgtgttattcaaaattataacgaagacgatggttgaacgcttgaagccagttatgaataaaatcataggtcctgctcagtcgagttttctcccaggcaaggtaagtactgataatatcgtcgtggttcaagaggcattgcattcgatgcgacgcaagaaaggagtcaagggttggatgctcttaaaattggatctggagaaggcttatgatcggatccgatgggactttctagaagacacactggtggttgcgggtttctctgagttgtgggtgagatggataatgaagtgtgtgtctgggccatcaatgagtcttttatggaatggggagaagactaactctttcagaccgttaaggggactgagacaaggggatcccttatctccctatctctgtcttgtgtatggaacgactttgtcatctgattaaggaatccattgagaagaagaggtggaagccgtttaatttgtctcgtggtggaccgaagctgtcccatatctgttttgcggatgatctcatacttttttcagaagcatcggtcgcccaagtgcgggcaatcagaggggtgttggagaccttttgtaccgcttcgggtcagaaagtaagtctcgagaagtcaaagatttttttcttgaataatgtgtctcgtgttctaggcaattcaatcagtgatgaaagtgggattaagtctacaaaggatttggggaagtacttgggtatgccggttcttcatagacggatcaataaaaccacatttggagagattttggaaagagcctcaactaagctatcgggctggaaagagaaaacgctgagttttacagggcggctgacgctcaccaaagcagttttatcctccttaccagttcacgcaatgagttcgattttgttacctcaatcgacaatctcgcagttggataagatatctagatctttcctttggggcagtacgcaagagaaaaagaagcaacatctagtagcttggaagaaggtttgttctcctaagagtgaaggtggtttgggtatccgatcagcgaagcacatgaataaatctcttattgcaaaagtcggttggagattgttacaggatcagtctgctctttgggcacgagtgttgaggtgcaagtacaaggttggtgaggttagtgatggtcgttggttaattaaaaagaatacttggtctccaacttggatgagtattgttgtgggcttcatcgaggttatactgcatagcttgagttgggttccgggtgatgggaccgagatttgtttttgggaggataagtggttacatggcgggttactatgggatgaaagtaatggtgagatgcccgcaggttttgaaacgatgttagctaaggacttgtggagcgctgggcgaggctgggatttttctaagataagcccttatgtcacgctgaaaagaatccttgaactctcggctgtggtgttggatcttgtaacgggtgcacgtgacagattggccttgggagaaacacaagatgggcagtttactgtcggatctgcatatgcaatgttaagcttgaatgatttaccaaggttgaacatgtcaaacttcttcaatcgtatttggaaggtgcttgtaccagaaagagtgagaggtttcttgtggttagtgagtaatcaagcgctcatgaccaacgaggagaggtataggagacacatttgtgtttctaatatttgtgaggtgtgtaagagtggagtggagactactttactcattctgccggattgtcctgccatggctgaaatttggaccaggatagtgcctcgacgaagacagcgagagttcttctctaagactctattcgaatgggtttatgacaatctgcgtgagggtgttccttttgcggagagctcgtggtctacagtctttgcaatggctgcttggtgggggtggaaatggaggtgtgggaatgtatttggtgaaaatagaagatgccgagatagggtccagtttgttcgagacgtcgctaaagaagtctttgtaacgaagaagaacatgaacgtggtaaggggtgtacaatcaagagtggagaagttaattggttgggaagcaccgagagtagtttggatcaagattaacacagacggagcctctcatggtaatcctggacttgcagctgcaggtggagtgctacgggatggagacggaaattggttaggaggttttgcactgaatataggcatatgttcagcgcaattggcggagctgtgggggggggggggttactatgggctgtacttagcttgggaaagacggttcccgaaagtagagcttgaagtggatttcgcggtggtggttggttttcttacggcagggataagtgatatgcatcctctgtcgttcctggtacgcttgtgccatgactttctttcaaaagactgggatgttcgagtgtctcacgtgtatagggaagcaaatcgtcttgcggatggtttagcgagctatgcattctctctttgtctaggctttcattattgtgagtttgttccaattgtgttagactcgattttgagggatgataatcttgggtcaacaagaccaaggcaagtccgtgtgtatattttttttttttactcttttcaataaattaacgggagatctttttcaaaaaaaaaatcatcttaatcatgagagattaaatggtttaaacgcagcagacacagttacaaatacggaaagtttgcgaaaacggatggttgcagtttttagcgttattaaatattttgaattaattatttaactgtttaaatttagtgtgtttgcggaaattttataactgattaacgaatgggtatgatagtggttaacttaaaaacaattatttgatacgatttgagaggatttccttagttaaaaatacaaaaattcaaatcacatggtttaatgtgagatttgaatagattttacaaaaatcatatgaacttccttaaaatcatcaaaatcatttaaaaactcaagaaaactcaaatcactttaaattctactttgaatacaccctttaagtattacatattaaaacaccaaaaatttatgttactatgataacatacaattaataaaaaattataaataaagtactacataattattattaaaacaataaatcatagtgaaatgcgtattacttcatgcatcacttgaactacatccaagtaatatgacaaactacaataaatgtgtttgaattggtagattttcctgattaaaaattttattacaaaatttgcgtttactttttgtatttattttttaatttggattgatgccgtgattttagtaggaaaacgttaggaattgatgccatgattttgataacaagtttatttctctgttgtttatatgactttcttttacaaacacttctgctagcaactacaattgggcgattgattttcaaggcgatctaaagtggtttaaaatgatatctatgattggcttaaaaattagaatcggtaaacacccgcaaatgctaagtttgcggatggtactagaaaaaacaatcaagttctgaattactaactttaaaaaccaaactttatataataataaaaaatagttttcaaaaagatatatttttatctgctgtatttttacagaataaatttaatgattttaatatcatcttttaccatcactagtaataagtattaaaaattaccgtcctattttttttgacatcactttattttacgagattaatcaagaaaaacaaaatgtagaaaacgggaaaaaccccgaaaaaactgccatctattttaaatttgaccgtttaatacctctaatattaaatttggaacaaaaatacctaagttaattttggttgccttttaaaaccttcatttagtaaaaattgataaaataacatttcctagttaacagctgttaactttgctaacggagacactaactacggttaaaacttaactaatggtttttgcgtaaatatataagatctacttcacaacattacaaatattttgtcttagtctagtggttgaatgtagctcatttattatccatcacctgggttggagagtctctgacttttataatatttgtttatggtgctttttcagccttgtttcctccgattgaagcattgactttgcagtctcaaagctgagaaacgggtctttatgtttgattatattaattctgttatcaaattcttcattgaggccgttgagcatgtacatgacaagattgcgctcggagaccggagcgtcaacgttggcaagcatatctgaaattgacttgagcttttggcagtaagcttgaatggattggtcaccaatttcagttaagcggagttcattatcgagctggattgctctcgcctctttgttattgcgaaattgattctcgacccaaatgtctcttgcagatccaccagttttgaatgaactatggaagagttcatgagccaacgtgccgtagagccagagtttgaccaagccatctttcttggtccattgaagatcgttagcgtcgacagggaccgacgtgccgtcgatgtggcctaggacatcaaaagtaagacaatgagtgaggaaatgctcacgccaggcatcgtagttgtggtcgtcggaatcgagaatcaaggggatgtgagattgggtaagggattaaggagatccaaaatcaaagaaaaaacagaaaaaagaaaaaaattaaaaatcttctgtttgtacgcataggggaactcgaacccaggtgtagtggaagagtcaggcgacgttcaaccactcgactaagacataccattcttaactatgtgaaaagatatcttatatatacacgcaaaacccacggttaaattttagagaatattacagtgtagagcacttttttaaaagtatttacgtgattagacacttttcaaggagtaggcactttgtatgggcaattttacttatttaccctttaattacatcggttacaatctcttgtctctctcctttttctatctcttttttttcttcagaaaacacaaaatccagcggaagatgatggttgatgggtttgctagaattacaacttggtttaaaaatctgcaccctgataattttgttgtctatgtgtttattcatgtaattgtagtttcatgcgttctacctaaagttcattcaattgctccaaaaccttaaagtttgcagttttttttcttccagttcttcacttgctagatcttagaatttcagagaccataaaatatgaagaacaaaaaagaagaaagaataagtgaacgagcgaccgagtgaaggatctcgtgtagcagtagaagccgcgatctcgtttctctggtttttggtggcaaatcatcagtcgtggttctcccacttctctgataatcacagcggcgagagaaaattttgggcttatttaatcaaagttgtgttctcttatatagcacttttctcaattttcaattagtttttatttcctgagagtaaacgatttctcatttattctatattggtggtttaagattttaatttgagagagagaaagataaaaaaaacttgatcagtggatgcttttgcttcttgtggagtgtttgaagattttccattgatggagcagctttgtatcaggttctttccacactgatttattcatattgagttttttttttattgggtgtgaatgttatggtgaattgagtttaaacttgtttgagtagatattcgcttgttatgatgcatccgattccccaaacacttgcttttgtgttgatcttatattctctttgattcaattttgcagatgattctttgcattacattaatttacatcacaaactgacgtattgtgcatccatgaattcaacttgattcaaatgattggtgaccatagatgatagtacaaacatatatggtcagctggacgcctgcttgttaatgtcatccaagggaatctgtccattcagacgcaaacatcgatattatgctccttttatacacaatataagtaaatctgtttcttgttatatctaggattagtagacaattttggttataatattgggagtttccatacacaagtgaataaatggttaaagaaaaatagacgatgtactttgaatgggtgtttgaattggtgattatcattcatgtataaacttgtgtattgaaatgaaacgacctcatgagtcactagattaccacatggactaaaccgcttggatagtcatcaatggacaactatgtctttgatttgcttcaaatgtgttttattgattggtaaaattatcattttttgtatggttcagagttttgttttatggttttagatttagtggagaaggatcatgggagggtttgggtttaattttagggtaagtaaattaggatttagtgtaaagcgttaaaggtagagggtttacacactcgtatgaaccatttttgaatataatcatatgaatattaccataggaatgatcctatattttacagtttttacattaaaatgttttatctgcacaaacaaatacacgaaagatgaataacacaaaatctaaacattgttcaccaaatctaaacattgttcaccaaaatcaaataaaagaatacttcattagttggataacatatcttcgaagagtaatggacggattcctatagctgacaatcggcaagtacgtgttcatctatgatttttagaagtagagttgtatccatgaaacatcgaccaaatggatatagtgcaacaaatgaaggtgtatccacctagcgccgaacaaatggatatatattttgtgttttctcgtaaacttttcttgacatccatgagtcgacataagtatggagttgccagacaagacactggagctcacggcggccaccgcagcctcatggaccaaagtttcaaaaaaagctcataaacatcaaccaatcttcttgcataaccaccacatacccagccttatgcgtccaatcactttccatctacgcaaatgacatccaaacatttttcaattcaaaaacaaggcaataaattcaacagatctaacaaaaataaatttaaattgaaggataaaatcataaaatctagaacccataacaaaaaaaaagtttaaagatttacaatctaaaacctaagctagaatcaacgaatcacatgtaccattggcctttatgattcaaaaccaaagaaaccttttaccaaaaaaaaacaacgaaaccagaaaccgtaagtaagacaagagagaagagcatggaaccagaaaaagaggaagattaagggaagagggagttcggtagcagagagtaaggatctccttcttcttcgtctcgaaaaggagaaatcgatgatgttactttttttgttggtcatagtcgttcattgatggaggttgcagataatgaaatggatttgatgatggagaatggagaaaagaatacaaaactaaaaaaataaaggaaatttagggtaaacatagattgtgattgtgaattttgagataacctcagaattttcataattttgtaagaattattgagaacgactatgatgtgaaagaggaattgaaaatgatgaaaaacaaaagaatatggaaaggagaaatgataaaaaaaaaagaaaaaattaggttctcacccacacgatctcattaagaataagtttaaaaattattgtgttttcatcacttcaggggcaaattggtccaatttcctctaaaaaagatggttaagtgccctctctcttacaagtgcctcaaacgtaaaaagattctcacaaagtgcctaataatgtcacatttcctaaattttaaccccggttagtgtttccgttagcaatgttaacagacgttaactcgtaaatgttattttatcaatttttattaaatgaaggttttaaaaggtaaccaaaattaacttaggtatttttgttccaaatttagtattagaggtattaaacggacaaatttaaaatagatggcggatttttcaggtttttccctccagaaaactagaaatacagaaaatatcaaaagggtggttctctggggaaggagacaacagctgtcattcataaatgccaaatatattcagattaattatatatatatggctgaaaatagttcaaactaattaaatgatttagccactaagatatttttaatgcttgatttgatccaaaacatttttatgacatgaaagaatatttctctaccaaagaataattcccaagcgttgttgtttaaatgggttttatggtgaattcgcaaaatgaaggtggtgttggtggtgaccattcatgggttgtttaagaagcttagtaagaaggaaacaattcgactcttcaaatggcaaagcagagactcatcatcatcaccaacagcttgcaaaagcgttgacctttcctcacttgattgccattggtactaatttcgtaatgatgttctaggaatctgggtttcttagaaagtagatgaatttgcttattatataatctgatttgtagatggtttttaaagattgaagctttttgtggtttgactttatattaattctctgtttctgtttgttgtgggatgaaagattccatctgtttacttatgtatgtataaatgttgggtctgtgtttgttttggctttgtttcttcagtaaactttagagagtttggtttcacaattttaggtgttggatcaacaattggagcaggggtttatattcttgtgggaacagtagctagagagcattcaggacctgctcttgctttatccttccttatagctggaatttctgctgccctttctgcgttttgttatgcggaactatctagtcgttttccctctgctgggagtgcctatcattattcttacatttgcattggtgaagggtaacaacatttacttgcttatttagttatatagttgtttctcaggctttcatacgccactggatttggagatttggtagtttactcattgcctttgcagttttgcttatgaattcttggtactgcagtgttgcgtggttgattggctgggcgctgattttggaatacacaattggtggttcaacagttgcccgcggcatatctccaaatctggtttgttccccctttgactgattgatatcttcccttgcttgaaattcatactgaggttcatagttttttctttacataaagtgtggttatatattgttttgctgaactgcagtttagaagtgttgcgtgtttagaactgggtaggtagggatatccacatagctctataagatttacgctcttgtgttgtttgtgcaatgactctatttttaggattcttgctaataaatattgagtggcacttagagattgaaagaaaaaggcgacatttctttttgcaaagctttggatatctttgtgttcaccaattcgtttggtttttcttgtttttaacatgaacatgtggaaattgttttgtttatcatgtgatgacattttaatataacatgaataggcaatgattttcggtggtgaagattgtctgcctacaatattagctcgtcatcaaatcccaggccttgatattgttgttgacccgtgtgctgctgtgctagtgttcattgtaacaggactttgttgccttggagtaaaggaggtattgatttcatattatttcaattaaatcgtttggacagactcaactctgccgagctgtgttttcttaaagtgaaatatctcttctctgcagagcacatttgctcagggaattgtaacaacagcaaatgtctttgtcatgatatttgtcatagtagctggaagctatttgtgtttcaagacaggttgggttggttatgaacttccaacggggtaaactgaacgttccttgtgctaccactatcatattgtaaggtagaagctatatgaatgtttttttcttattgtttcttaggtattttccttacggggttgatggaatgcttactggatctgctactgtcttctttgcctacatcgggtttgatacagttgcaagtatggcagaggaggtcagtgtcatttattgttgcagtatcatattttcaagcactggtatatatacttatattgctgtttcatatgcaggtgaaaaatccccggcgggatttaccgctcggtattgggatttcgctcctgctttgttgtttgctgtacatgatggtgtctgttgttattgttggtttagtgccgtattatgctatggaccctgacactccaatatcatccgcattttctagtcatggaattcaatgggctgcgtaagtccgttaatcggttaagatgcaaactattcattggcaggacttgttttgagtttgatttgtttttcccctgccattctgtcttatagatatttgataaatttaggtgctgtcatggctctctgttctgcattaatgggctccattctccctcaggtaaactagaaacataattcaagtgtttagatctgtaaaattaaggatttaacaatgagaattttgaagaacatatacacgctatgtggatttcttttgtaccaacttattcaccaaagagcttattcgtttttcagccgcggattctgatggcaatggctagggatggtctcttgccttcatatttctcatatgtgaatcaacgcacgcaggttccaattaatggcaccataaccactggtgtttgtgcagcaatcttagctttctttatggatgtttcgcaactggcgggaatggtaattaagatgtattatgattcattaatgttacctggtccagtacttgaagcaccacttagcctgtaactagaatttgacaagctttagttggtgtaggtgagtgtcgggacacttgttgcatttacaatggttgcaatatcattgttgatagtcagatatgttgttcctccagatgaggtactgataagattggaactggtaaactctatctttattcgatttcaccttagactacaatatagaagattcttgattaaggagagaagtctctaactctcttccaatggccaaaccagaatccccaactcctttataatgctacgcactagtgactagactaacaaggcttttatcaggtacctcttccctcatcacttcaagaaaactcatccagtcacgtcggaacttccatccgtagtaaacaacctttacttggcaaagtggatgattcagttgtcgataaggaaaatgctccaggaagttgtaagttacaattcatttttgcaaacaaggttataggcttatagctatttattcgcattggtgcatgaactttatatgttagctgatctctggtcttggtataagcaaaatttcatatctgttgttgattctgtaggggttctcaacaaaaaaaacagacggaaatttgctggttggagcattatgttcacttgtattggaaacttccttttaagctatgcagcgtcaagcttcctcttgccagggttagttcatcaacagtttatttacttgaggctctatctttcactgggtttcaaaacttgggcctttttctataatactcagctccattttatgcaaactatgataacagactcctccgatattctctatgtggtgttggtggattgttccttcttgtcggtttgattgttctgatttgcatagatcaggatgatgctagacacagttttgggcattctggaggtacttatgtcctttctttttcccaatgttttgtagtaagcatttcatttggcaacaaaccaaaaagttcagagttgtaacttagaactctttttgttctacaggcttcatttgcccgtttgttccgcttttgcctatagtttgcattcttatcaacatgtatctcttggtaaaccttgggtgagttatggatcatgacaccagatttgtgaatactactaaccgatgacttcactgttgatatacatttgttttgctaatgttttagagctgcgacgtgggttcgtgtatcggtttggctgttcctcggagtggttgtttacattttctatgggagaagaaacagctctcttgtgaatgctgtttatgtctccactgctcatctccaggagattcgtcgcacttctggacattctttggcttaagtctacatgaaaccatcaatggaagctcaaggaagtgggagtttcctttgtaaaatatgttcaacaaaatctgtataataatatatttttgagattggattatcctgtgtaaatacaaagttcaatgccactgctcataggcattgtatattttttttaaaacctaaatggtctaaatgttatctggtggactattgtatattttttgaactgctgaatttggtggactatgttgaatctggcgactaaaatagcaaatggaaggctatctgtgaaaacttgctgattggtggaccggatcctaaatcgactcgaatccgacatggaatagttataaaattcaaacggataataaactatcctacccgaattccgaaccaaaatccgaatatctagcttagataacggtatgtctttctaggatggtcaacgcattcttatatttagctcatatatgaaatgaccacatgtaaagttgatatatatatatatatatatatataaagggccacaatttaaagttgttatcagtcggttaacgtcatataacgtcgtgtaaattttggcatggtcaatgattaaatttgtatgaaatagtccatcaacgatttttacatgtattaaatagtcacatgcgaagttcacatattaaatgatattttttgaaaattcgcgtattaaaagaaaagtttccccaattaattgcatttaaactttattgtgtacagaattgcatcaaaacttaacccaaaataaaccggccggtacaaatcggttaacaaactctgttaaaaaagaataacctagccccttaaaacctcatttggaactcaaaaaagcagtaccggaaaataatgctgctccggtcatttcgcaccgtcgagcttctccgccgaatctccacttcttcagtctctggatatcgaacttctccttcacttttacaacgttgcaatggcttccaaagctatttaccacacagagtaacaacaacagagagtcctttcccttcacacatctctcgattctgttcttctcagagcgcgaattcgcaaaatgagaatcgacacacgactctatcatcaccggtttcttcacggagggttaataacagaaagatttcacggcggaggaaggcgggaaaatcattatcaatctcgccggcggcggatgcggttgatttggcgttagactcagtggtgaagatctttactgtttctacaagtcctagttactttcttccttggcagaataagtctcaacgagaatctatgggctctggtaatacttagtctctttggaattgcttcaagtgtgattttggtgatttttagattgaattttctgtttggtgttgatttaggatttgtgatttctggaaggaagattataacgaatgcgcatgtcgtggctgatcactcctttgtgttagttagaaagcatggatcgtcgataaaacacagagcagaagttcaagcggttggtcatgaatgtgatttggctatattggtagttgatagtgaagtgttttgggaaggtatgaatgctttggagctaggagatataccgtttcttcaggaagctgtggctgtagttggctatcctcaaggtaattgaagtagctcttgcttacatattaggcaaataaagagacaagtaagtgtaaatgcatgaaagaagagcaattttgagttttagatggtctcgttgtatgtatgtatctttggctactagctccaacagtgtataatcgtaggccgagacctgatttctgtcatgttattggtctgcttctaaacatggaaatttattgtgatgaggcaactattatgttttagcttctgtatttattcaaaactttcaaggattagtatacgtgctatggcttcatattcatggaaagcaatatatttggaatgtgcattgtcatgtgaaaaactgaatagttatgatgtttggcttaagggttcccattatatggttacgacaatctgaaataagaaagtggctttgagttttaatcatatgagctctaatgcaggtggtgacaacatttctgttacaaaaggtgttgtgtctcgagttgaaccgacacaatatgttcacggtgccacccagctaatggctatacaaatagatgctgctattaaccccggaaatagtggtggcccagctatcatgggaaacaaagtagctggtgtcgcatttcaaaatctttcaggtgctgagaatatagggtaagtcagaggttaattattttagctctagtgcagtaaaggattaggaaaaggagttaaacgaagtttatatcttgatatcttaacttatgtaagtaacatgagtttatttgtcactctcggaatgatgtatgaatcactgctgtcttgagacatctcctaagtttgattttctaatcatggtttgcaatatgcagtataattgaagtagtgtacatgtcttgacaaggcaaggtttaattgaagaatttgatttcgtggttttaaactgcagctatataattccaacaccagtgataaagcatttcataaatggcgttgaagaatgtggtaaatacattggtttttgttcaatgggtgtatcatgtcagcctatggagaatggtgaacttcgtagtggttttcagatgagttctgaaatgacaggggttcttgttagcaaaataaaccctctatcagatgctcacaaaattttgaagaaagatgatgttcttcttgcatttgatggtgttcctatagcaaatgatggaacaggtatattttcctttatttccataagcctcagtgctgactttgtcccctattttgttggtgaagtgtgttttgatgtattgcagttccttttcggaacagggagagaatcactttcgaccatttggtttctatgaagaaaccagatgaaacagccttggttaaagttttgagagaggggaaagaacatgaattcagtatcacactaagacctgtaagtcatttgttatgactaaatcactgtatgttgtttgcttgctggttcatataccatctctaaaatggacaatcatcttttcttctgagcttaatagttttgtattgtatgcagctgcaaccactagttccagtgcatcaatttgatcagcttcccagttattatatatttgcgggcttcgtatttgtacctcttactcagccataccttcatgaatatggagaagattggtataacacttctccccgcacattgtgccatcgtgcattaaaagatttgcccaaaaaagccggtcaacaacttgtcattgtctctcaggtttgtgctttcttttccctagtgttttttttctttatgtcttgttagaaagattgaaaatcacttgagccacaatgataataagtacatacagtcaaccagatttcctctgtttcctaagcagcgaaagcttgcttagaacttttgaatgtccagcaaatataacagcaatgatgtctcgccatttatgtatcacactgatattgaatctctggttgataggtgttaatggatgatatcaacacaggatacgagcgtctcgcagaactacaagtaagtaaaagctaatcttaaacctcgttgtcattattgtaaaatgctcctgacccttttgtcatcgattcttcttaatatggcatacgtttagggaatcagcaattaaaataaagaattaaacataacagagcagtaccatatgattctaaaacagcacatatgaaatgcaaaatcataacttagacatgatagctttgcatgatatagtgttctgagagactgacaactaaactgattttgtgctgaaacaggtgaataaagtgaacggagtagaagtgaataatctgagacatctatgtcagctcatagagaactgcaacaccgaaaagctgaggatagacttagacgatgagagtagggtaatcgtcttgaactaccaatccgcaaaaattgccacttctttgattttgaaacgacacagaatagcatcagcgatttccagcgatctgcttatcgaacaaaatctagaaaccgagttggcttcttgttctgcggtttgagctatcgccaacacgtatggcatgttgtacacttacaaattcattcataatttgtaaactacaatgttgtatactcataaacatttaggatttgataagtggcttgtcacgagcctgaattttgaaaatcatttatagaaaatttgtcctactccaaaaaatattattttctccagaacagattcataaatgcaaatataccaaaatacgataacaatgtgtgaacacacctaaaagttaaatgaccccaaatttggttagtgcgtaggagaaactagaaagccagacttttttttgtcgtcttcccctttcattaccatctcttgttccaatgaaataaaagggacaaaacaacaaaacacaaatccctttccgtgtcttaagcgaactgtcacatccgtacgtgcatcgtgtaaaagaccaaatttaccctccaactacactcatcactctctatttacttactctctttagttttcttttctcggggagtgaaagaattgaagaaagaagagtgtttttgagaagatgaattcgtcgtcgtcgtgggagatgcaactagtggaaacggctaaagaggaactcgagattcttcagtctcaatatcccaaccgcttcgcttacctcaaatccgatcttcaatctttcatttctcacctccgtgaagatcacgcgccgccgcgtttatcaccctcctcctccgtagtcctcactcaaggtactctcatttttatggactgatgatgaaattaccggttgaaatttttcttgcttgttttgttttacatatttaagattgttctctttttgaagttattttttttaaaaaacattgtttttctttgtcagattattacatttcacattttaataatcggttgcgtcgattgagtttccaattgccaaaattcagttgattttgacatcacgtcttaatgaaatctcgacatgatttaccaaattagttgacataacatgagtagataactttcatcatgttggaactttttatttgcaacggttttctagaaatctttactttgttcatgttgaaagatatcaaaacataaaaactttgttcttggatttcaggaacaatttacatttggtttcttcaaagtgtttttttttttttaaactttagtagttattataccataatggtcccaaactggagattcatttgactagatttcactattaaaatatcaactatgattgtacggtatacacataaatgttaaaatataagttgccattaattaagttgttgttgatgcattggacagagtcatcaaattgtaactataagcaaaaacataagaagagaaagtgcgtcatggacaatttaggagatcaagcatcatcgtcaacaacgggaaagatccataagaacaataacaagatgggtcagagagtggtcacgaagaaaaaaaatagagttgaaatggttcttgagagggctcaactttgtctccaaaagataagagacgtgaaagcctctttgtgttgaccctttttacaactctttttttctctgttttttggttgatgaaatgtataaggaatgatagttaccgtccgagaaatgtgattgcaagtgataaaaagtaaaatgcttctcgaaaagaggtattgatgacagttcaacattgtataggtctttttggttcagtgagagactttcatttttcagtctcttaatggaaacctaatgaatttcttgtttacgactaagagaaaatatttatcataaaacaattttcgtttcttcctcattctaaaaagcgaaaaacagagaaaccccactgattactttgaaaacatttttgaaagctatttttttcttaaaaaaaatgtttgaaagatatgttttcttaaaaacaattcattcatttttgttttcaaattttgtaaatcagactaaaaaatccaaaaaggtcatagatcatagggtaatattagggagtagccaaatttgacatcatagtaaaaaaaaactaaccatgtgtcagatttttcttgtaaatgatactttttatggtgtgataggggtgagaaaaagactaattaaccttgtaaacttacggtttttacaatgatacatttgtttatggtagtggagatttcataaggtttagtgaaaaaaaagaaaaaatactcataaggttcagtgaaaaaaaaaaagagactatgaggtggaagtcataatcatcgtgacattattatagagtaagtagtccaaaaaaggactcatatgacggcaaaaattaaagaaaaaaagaaaaacatcatgtacttttttaaaataacatgaataaaataaaaataacgaaagaaatacttggtaattgtacaaaatcttatgtatttctgaacaatagcatataaaaataaataatagctggaatattaaaagatcacatgtaaaatataccatgaaaatttaagaagtgatatgaaatataccatgaaaattttaaaaaatcttatgtatgttaaacggaaagataccagtacatcataaaatattatataaattcagaaaaaccatgaaaatttaagaagtgagatgaatcaaataaaaataacaaataaacaatttggcatttggtcattgtcaaggtgaaattattacggagtaagtggtagtagaaaatattcgaagagaagttgacgacatagatctgacgataaagagaatccagcaaaagaaagatcgagaaagaaaaaacagagagaaaaagagagaagatgaaaaaataatattttaatagttttatttgcctctctgatcatttattctatcctttttagtggcatggctattttttgtatattctctaaatcataagtttaacaaaactaaaaattgctctttaacctaggatcttacaacaaaaaaaatgaaccttctaatgaaaaacattgaaaagcctaaaactcgtttgtgtgccttaaattaattaaaattcaaaactctgaaacgggacacgtggatttagtttgagaaatgtgttcaatatgtgctctacgagctcctgatcgatttttaccaccatataataaagaacattgccaaccatttttgaacactttcaagtatacaacctacctagctaagatcaagatggatgaagcgtaacattttttcttttcatgcttctttctttttcaagggattttttatttttagttttctctattagtctttttttctaacatactataatctactataaaaaattcatcaaacatacgatttgagtttacatttgattccattttggataaaagtgattattttatgtaaatatttatataggagcttttatgaatataggtatgttttggccaaaagtttataaaaaaaaaaaatcatattttacttgggcttataaatttgggtacttttggactaatgaaaagacaattttgtctttggatttattgttgataaattcacttgatcttctccgttgtgccacaaattttccgaccatgaaacttcgcttctcaccgtcggctcttgccttatcaacatagattcagtattctatcaacatcatcacttttaactccattaatacaatttctctcagtctcattagactcacaaaccgttgattcccataacctctttcgattaacccaattgcttaaattgaatgagagttttgatggaaggaatctaaaacataaagaaataatatataggaaacccaagaaatctaattttagatatagatcaaatcaattaaactctaattcatctatatttgtaaacaaaattcgatcgttattatcgaagataaacaattgtagcgttctctggacgatcacaaatattcttattcattgctttgtgtgtctttaaactcctacaaaagaaagttttgggatcgttttgttagtgtggatttgagacgcttacatattatgttgttcactggtttaagagaagaaaataggttttcatcgtgcatgaatgtgtctaaatctataagtatattaaaaagtgctacatcagacaatacctccgatataattgtgctattctcgtaattgatcttatttgtatatgatatatttaaactattttatatatacgtttagtctcgttgtttctatttttttttcatttaatttattgattttttttggctaaaaaagagaaaaaggaaaagaaaaagacggtcaactttgactccagaagataagagacgtgaaaacgtctgtgttgaccaatttttttttttttttggcttcaaatgtaaggaaagatagttaccgtcggagaaacgtattgctagcgatgatgaaaagtaaaatgcttctggaaaataggtatttattcttacaaaattattattaattatttcaaaatctgttaattagagtaatccaaaagaggtctcaaatcataagcttaacaaagctaaaatgagctctaaaacctagagcttttaaaaacactaggtgagtacctacgctacgtgtgggttgttgatttgaaaatcgttttaaaataattatgtttaactatttttattgctaatttatattattttcgtgtatgttattatgtagttaataaagttatattcattttatgtaattatagttgtatagttagattcacttttgattcaaatatcaattatatttttttcatatataaatcttcttctatatatacccaagattctaattttttttaattatcataaaatacttacatcaacaatatattatacaatggtatgcaattatgttattaattggtttgaaagttgtctaacttgattgtaagcaaccaatttcaatctatgtattctcttctaatctagtattccaatcacagaatgataggttcatggctaaatattggattaacataatttgaataacaaatgtataactaaccactcatttgctttaaaagttttcacatgaaagagaaaaaaaaaaataaaaaaaaatagtcttttaggtcaacatttttaggtttctctctttgcatttgcatatagccatattggagagagtgttgtatattgaagtttttggtatatctacgtcttaaaagaccattacttaaaaaaacatgcatgtcattattaatgttaccaatttatcataaagcacaaaaagatcatatcatgtagaccaaaaaatataataataacaaaagactaagttaaaattactaaactaagaaaggttaaatagcaaacaactatgttgcaatacacgaaaatttctagttgttatcaagtaatgactattaaaaaaatagcaaaaaaggaaaagtaaaatgaaagtaattttgattttttatatttttttcttttaaatgaagatatttagttaagagtgggattaatgtatgattcaattcaatgtaaaactttaaattttttatcattaagttttattattttttaatgatattaatttagaatgacatgtggcacttactggtgtgttgatgtgtcattcatatgcagataattggccaactttcatataatttttctaagccagtaatgaaaacattaagaaggaatccaaaactatgaaatgggacatgtggagagacatgcttaaataatattgacgatcgatttttttatcaccataaaataataaaaattgccaagcattatcgagcgccttcaagcaccactctctctataacccactggcaaaaacatacggattgtgcaaatgcaattcaatcaatcactaaccaaatcttccatctttcgacaaaacttcattatgcaaatgctgatatgcaacctaggatagattaagcacgcacatgatgggaaatttcttttcaaataacattgcttctttcttttttaaaaggtttttgttttttttttcatttttctccatgttagtctttttttttttcttcatttgaatcaacattcgagaagactacgggtcaaaacaaattatgaacaatttcaaatagaaagtttcctttattagttatttataagtgtgaaacgaaattgttctttcttaaaaaataaaggagacgaccagatggggggaactacaacactcaacccctccatagagtaatgaataaatgcgacaagtattaaaataattatgaataagaaatgaaaattatagtctaaacctgtatttgcagttactacttctaaccctaatcacactgttagcagccaagctatcaacggatacaccacacctaaccaaaaatcttactttcatcaactttaatttcccgagtttgatccgaaccggttgggtaactctaatccgcaacggtatacttcctgttaaccgttgttgctcttgcaatgtcgtcattaaacttgttgcattttgagtaaaaccagtcatttctaccaatataatagtagtattctcatgtccttggtagaattttggcaacgaccctgtagaaataacgaaatccggtttaactatttgaaccaatttaaaccgaccaaacgaacagattttaatttttaacgtaccattactgattctggtttgcatgtacaagacactaatcttgcttccatcttcatagtaaattccaattttctcgttgggatttttcgcggttatggtaacgttaaatgcggtggataaactcaagtcttggtttagttgaaaccgggttagctgtaaccggtcaatattgtaatccggaaattttggtctaaatacaaggtagagtataccaacgatcgctcctacgatgacaataaggagaaagaggacaagaagcgtgtagcacacgcatctgcaccaacaacttcttgatcctttcttctccctcggaggatccaacggtgctgcttgctgtgtcttggtaggatcaccatgttccgatcttgaggaaccacgtggaacaaggggagccgttggatgtggcggcgcttcggggtcgctcaccggatgaattttctggtgatcggacatgttcttgattcggctttaagtttggggtattttgaagttaataaagagaagcaagtgttaatggagaagagtgtcttcacgttttgttttagttaattgtatatataagctgtttggtgttgttaaataaagtaatagtatgaagagaaaagtagagaaagcgactcttgcatgaaataaaggaatatttaatgttctttcataccaaacgtgtcttttgaatttcctgctccttttttggaccgtaatcgtgactggttgattagtttaattaatttggaaattcaagttttaactagaagaaatatttgtcaatgttgggttccgctgccacgaagatgaaagttcttacatgctccgtaagtccttatagacgacaatgggtagaagaaatatttatcatgtatgccgtgatgtcaacactttttttttattttggcagcggcaacacattttaaaatcatttatttttatcagttttacaaaagcgattacaaaaattatagacatttgtttttgcatcagataaagtttacataaaaattatataaaatatacacctgtaacctatattgtatatgatttaaatatatatatacatacctagatataaaatggtttaatgtgtccaaactttaaactacatttctaggaagaaatcgttttactatgtctaaactatagaagaaaacttcgggaaaacaatctattttctacgaaaatattacattgtatcagtctaccagattcacattaatctttggccttgtgctagattttttgaaaaaattttctcaatcaatatctccataaatctattatttttaactatatactcacacatttaggtttttaagttattaggggagatgtaattttgatgggctaaagtatgaacttgggtctcacaattttcccctacttaaagagaatttgtctttgaattcaaaattcatggttgagcatgtcgtccttaaaaagttatgggtagtcttcttgcattactccttcggatttccacggtatctgttgaattccatctctttcttaacaactttgaatcgactttgatttctttccactttaacttttctatttgaatcgtcgaaatgatatgccctgtatgaaaacataaactttacagaacaactttaaacgcaagtcacactcctttggtgctttttatcttttagaaaaaacctccttcctgtttatcaaatactaaaaacattttagtcttttataaaacatttttctaaaaaaaacggattataatatatatatatgtattttttaatttagtctttttcatgttaacaccaccttgattttatcctctgttctaataccatttgtctcacccgtctccctcaacgttgagacgacatgctttcaccttacttaacatagacaacgtttccaaaaagaccatgatcgatttgcaacgtttcgagaccgacaaatgactggatttcattataattttcgagatcaacataaaaaaccaacaaaatgaaaactagatttcattataattttcgtaatacattgaattgatattcatttttaagacatttttccaaaataattttatttttctagatataagtgacaataatttcaatttcattattgattggttattgattattgtaataacaaaatattatattaatttataagtaacaataacaatcaaatgttattataaatatactaaaaagaaatcgcaaacccgggtccttacccagttcattatatttcttagattatatactagtcctttcacagctttcccttccagtctttctcgttctggcttatgcagaggtgcatgaacaacagactgagtatctttccgcatccgttgatcctcttacatagatcgttaaaccaaggttttccttcaagaggcgccaaaagatcctcaactgagatgaggcctttaccctcagactctggatacgcttcagtatagagtacatgtctcttcttatgtaaacaaaaaaacacacttaaagaaatgcaatgaacagaagctaatagcaaaactctgagaagaaagactcagtctttaccttgaaaggcagcacttggcattccagtgagaccttgcaacatccgtgtgtgtctatcatcatcaccttcagcttcgtcatcatcatttgactccacagtttcatcctatattgagattgaagacaatttaagtcccaaattcccgatagcaaaaaccctaattgagctaaaaccaaactccgaaaccaaaatatgtctcttatcttcttatcactaatgttcaaacctaattgagacaatttcatctagtgaagagaaataatagaacctcgaaatcctcggtaagctcttaatggtagttatcgacgcggtcatagcgattgtttttcttagactcttcctcaggcactccttcttcatactcatacaaaggacgtttctcattggcaataatcttcaggattgaattaggcaaataaggacctttcctcttattgttcttagctagggttttcgaagtagttctcctcttttctcccatggctgcttttgcttcttctttttggtttgaaaactttggtagagattttcgtagggtttctctttctgttaaatactaataaaatcgagttttagaggaacatgaaaaaagaaagatttctcaaaaatataccaactaaaccggataaaatatttctcaaaaatataccaactaaaccggatgaaatttggcatggttaagcgtaccaatatacgattaaaccgtcaaattctttggtcaaaacctaagaaaacaggtgcaaaatcagattaaagagtttgacagaaatacaatataaactgatttttggagtttgacttggataacataacgcatcttgatttgttccatattgtagacaatatattcgttgtacaacaacatccctggaaaaaaaccttggagcatgaacgttatcacatatatctaatatatatcagacttgttttgctataacattgttctaacatatatctaaacatatgtttagaataaaacctagagtactcatacttaaattgagtgaaatgactattaataatccaaaaacatttttatgaaatcttgtaaagatgaaaacattagtacgtataagatctagcactagaatttaattaattgataaatatgaaaattaaaaataaaagatagaagttgtctttgggcttttaaaaataaattttagatttaaattcatatgattttataagaaaacaaatttagtttgtcactaacaaaataaaatgaatttgaactatgtatgagtttatatcaacaatttatttgtaattattttatcatacatttattctgtaaaagtaatatatcatatgtttattaatatattcatacataaataaaatagaaaaataaaaactgttaaaatattagaaaatgtaagatatcaaattttataggctttttagtatttttttaatcatatacttatattgaaacaaaattattttataaaacaatttctaccacgttacgcaggcagatgcatgcaagtggtttgatttgtggttttcattagttgtacttgtatgtaggtgatatcaaataatttatttattttagttatgtattttaaaagtaatttatgttatatttgctaaactaattgctattaataaaacatttatttgagaaacagttatacaaatgaatattttttgcatattaaactgattatcaatttcagctcggaaaatatgaaataaattaattagtgattgaatgcaaacatacaatattcttccttctaagggcctgactggtttaaacgcagctagtgcggttgcgactgcggaagtttgcggaaacgggcggttgcggtttcaagggtgatcaagtgttttgaacgactgatcgagcgtttgataatgtgtgcgtttgcgagagttttatgactggtaaacatgcgggtgtgatagtaattaaataaaaaataagtaatcaaaataaatataatatattactattaaaagaaatataaatacaatatattattatgataaattgataatattagaaaaattgaacatttttaataattaaaaccataaataaaactattcacttgcgtttgcgggtggcagagggagaaccaatcaatccctaagtctggtgctttgcttcattctcttgttcttgggctattcacttaattcacatgaattagatattagtctttttcaccctcacaattactgatctatatttctttctttctttcttgtgttgtaagtagttttacctcaattttttctggaatacgggcacaacttgacgatatgaaaccaagacagctagattaggatgggtactctttagtgatcaatcatcaaaattgctcgcacaagaagcaaaaattgcatgcttatgtttcataccatttggcggttctgaaggctctaagctaggtttgagatctagtgtggaacaaaatttggatttgatctgattatcagaagctttatgcgtgatattgtttcaagcatccgcgggaaggaagtatatgaagatgcgacctttgaatcaattcatgtactaagttaagaagtagtttaacaaatcatagcaacttggggatattttttggaaaccaacagagtcggtcaaatcacaacagccctattttgatctagtctgtaggtcccaaacaacatcattatttgcccaagttgtcaagacacaagagcattaagagtttcctattttacccatggatcaccaataaatgtccaacggctctattctcatttacttcttgggatttgtttcctactttctaatctgtgatcgtttgtttgagcattatataagctcaacttagtatttcatttgtattcaagacttctacgaaataaacaagtatttttcttcaaaagaatttttgagtttatgcattagaacatagtgtggattcactaaagtcttgggtgtgtgtggatcaattatcttgtgaattcaagttaatttatttgtggtttgattgtggattcaatcaagtatgttgagtgtggattcattcaaaccgtaagccaagagaccggaaaacgtaaacactagatggattccgaggtttgtatcaataacaaatatataaatgtaagaaaaaaaataatgtgaaatgtatatttcagatattttttagtataatgatagaaaatttaacaaaaatgtataaagatccatgtcagaaggagagacacaggttgactgattttatagccataaactaattgcattctcagtttttccccccacactttttgcctcttaaatttccaccataaacgttgataattctttaaattacaacatgtactttcggattcatccttaaacatacatttccaattgaaccggtcattaaaccggaattaaccacaaattcgcgtttactgtaccgcgattgtgatttacccgattaatcacctatatccgttaagaaaagggttgactgattttatagccataaactaattgcattctctgcttttccctccacactttttgctcctgaaatttctaccataaacttcgataattcataaaattgcaacatgtactttcagattcatccttaaaatatgtttccaattgaacgggtcattaaaccgatattaaccataaatccgcgtttactgtaccgcaattgtgatttacccaactaatcacccacaccgttaagaaaacaatgttgttttgtaagcctacaatggagcttcaagaaacaccacatggagccgatacaatcacactcacacaaagaaacaatctatgtgatcaatgagagtagttctagttctttattgatttagattgtcattggaacaatcttcaacctcttttgtctattttggatgatgtattttcggaagttggttctctttaagatgatattatttaggttgactgattgatttggagtcttatctatccttatgattaggaattttatctagttcgatttgtcattttccttaccaattaacacaacacataacatatatagatagattcacattataaaacaaagacaaaacgacgtcgttttcttaacggttttcttaacgggtgtgggattagtcgagtaaatcacaatagcggtataataaacgcggatttatggttaatctcggtttaatgaccggttcaattggaatcatatttttaaggatgaatctgaaagtacatgttgcaattttaagaattatcaaagtttatggtggaaatttcaggaataaaaagtgtgtgggggggggaaagctgagaatgcaattagtttatggctataaaatcagtcaacccttttcttaacggatataggtgattaatcgggtaaatcgcaatcgcggtacagtaaacgcgaatttgtggttaattccggtttaatgaccggttcaattgaaaatgtatgtttaatgatgaatccgaaagtacatgttgtaatttaaagaattatcaaagtttatggtggaaatttaagaggtaaaaagtgtagggggaaaagctgagaatgcaattagtttatggctataaaatcggccaacccggtaataattagctaaaactattaaaaaaacttaagtcgttcatatttatgttcaaatttagcaaaaccattaaaagaatttattggtttatatttatgtttcgatttagctaaaaccataaaacgcttatctagtaattttaggaaaaaacgtcttccacacaaaataattataaatactacatgttgatgtcattgttacttcaataaagggtttagatccaaaaaatgaaccattctgtatttgtaattttgattactattacgtattttgggctaaatcaagcttgcataaaaaatatagtcgagattcttaatcaactcgctcctggtcaaattctcgaatatcattgtcgttccgaagatgacaatcttggcgtaaaacaattaaacttcaatgccactccatttgtcattagattccatgatgaaatacccaatttaacaagatggaattgtatttttaggcaaggacctaacaattcgtattcatacgacattgaagtatacaaagcaggaccaagacttattcctcgatgtggccagctacgcgtatgggctgccagaattgatgggatatactttgcaagaaaatataatacaccattggtacgcgtattatcttggaacaaaaattaattggtggcttctctttttccaaaagtaaccaatgtttatgtaattgacatttattgcatcttatgaactaagtctaattttgtttagagtattgtgtaatgttataatacaatatgagttcatatatcttcttattatataaaatatggtttttaaaatactaactcgtgtgattgtgacacgcgtcaagtctatcgttcagatgttgacatgtgtcaacaaatatttacttttctcttaaataaataggaaaactaaaaaaaaaagaaacatagatatctaaaatatttaactttaattttttaactaaaaacgaaaactaaaaataagatgaaatgtatagaataaaactatatttgtattagaaaatcaacttgtatttcaattttaatacaatcgaataaagtggattgtattatgataaagtagatatttaaattgtattgaaaaatcgaatttgtaagattgaaatttggtttaagaaaatacaaaattaaattttaaaaaggcgtgtgaatcactatttactattcaaattttaaatattatcgataaaaatttgaatttatatcttacacccgcctatttaagcggaccttatctagttgtttatacaaatactaggggaagtaatatattttgaaatgtgtttttaactacttttaaaataaatttatttctatattttgtagtacaaaagtcttttgtttaaagtaacaacttttagaacttcaaaattaaacacttgtgttaaacctttcggcatgaaatatgaaagatagcttttgttaattagaaataaatctgaacttagggttacgaaggaatttcatgatttgttgttgttaggttgttcgatttgagattttatctattggttcttcatctatgtttgttctcaatacataatctaaaatgatgacctagattaggatcttatatttaattcatcggggaaccaagagtgtcaatgaatctgttgaaaaaattagttgaataaagtgttattagccaacgaaaattgaagttaaggcaactttgtgaattgatcaatcttgaaccttttcatgtttgcttgaattcctaaaatcaaacgagttgttttcagggatttcattacttagataattaaaaactacaagagcacttaactttaccatagtgatttgggttcaagaaccacgtttaatttgatacaggtttaattatctcgtttatgctttcatgaaaccatgacttttttctgtgtccaatgtttttttatcaattgaattcttttttttttttttaatatatttgtggttaatcgattctatcaatccacatatacattttttacaggattttgagcctcaattccttttaatctctttaattcatttgggttgggtattaccaggtttaattttgtttagatcttgaataactttaatggtttgggttattacccggtgtagttgtgttcggatcttagataacattaatttttgaaaaagttactattttctaccaaaaataaaaataaaaacaaaattaattatttaaatatttaattaccaaatttaatatatataatatctctaaactaaccacatttgttacttaccttaactaattttctaaaacttctctacctaatttaaacataaataaatgattattctttcacttttatttgatcttatattgaatttattttgataaatttatataaaatacatatagttaataaattattagattttttctgtatatgatgtgattcaaaaattttaaacacacatatattattcaatcacaagaagtaatatgtgtatgatgtcccatattgcttaaaaatttgggcaatagtttagagtcatactataaaaaggattaaaatgattctgaatacgaatgaacaagaaaattaagttctcaaatgtccaaaactaaacgtattcggtttactctagttctttatttcaaagaatggaaactcttaaaagtttcaaaatcttataaatatttaacatttatactacgggtggagtcctagaattgacaggtttaggtcgatgataatacgagatggtatactacgggtgaaattctagaattaactaacaaaatataattatacaatcttaaatactaaacaaaacaaacaatattaacaaaacaaatacattttttaaacgcatctcaattaatttatagaaagtttaaatattataaatatttaaacttttactagagataaaatcttagaattaacggatttgcgtcgataataatatgggacattatgcaataggtgaaaacttagaagtaacaatcaaaatataaatatacaattttaaacactaaacaaaacaaacaaacaatattaacaaaaaaaatataacttaaatttctttttttaaacactaaacaaaacaaacaatattaacaaaacttaaatttattttcttaaacactaaacaaaacaacacacgttgcaaataagatctcacaatgttccgatccttaaacatacttaatactctcccttatctaatgcaatgtaccactaatcgttttcagccccttttgaacaatgatattaagtacatgagctgcacatctaacatggaaaaactctcctccacacaacaaatcatctctagacataagctgagatttgatc

SEQ ID NO: 776 - DNA, 23026 bp, Arabidopsis thaliana
atctcttgcattgtatcattgttacccacacgtttaccgtgatggagaaaattttcttatcaattcccgagtctttccacttttcaagaatctcaatagctaagtatgcacaagtatgcggaggaggcaaagcacaaaacactaagatcttgttcttcaacttccaatttttgtcgatataatttgttgtcaagcacatatacccttcatgcgtgagtgcagaccataaatcagtagtgaagctaattcttccaagaacttgtgctaattctctctttaacttatctatcctagactcataaaacctataaacatccgcagttgctgtgtttcggctaaagaacttcacatccggattcaaatatttccaaatttctctaactctatcatactccacataagtaaatggcagatcgtgctggataacatgctgatttatctttctagcttgcaatcttgcttccgaattaaccatcatctgcccaatatcaccatttttaggcacaagcttacatttaagcaaatgacgtctaaatgtgtttgtaccaattttgtgagcattgtacgcataattcttcttgcaaatgcatgcattgtactcttcctcaagctattaatcttggtaatcaatgcgaaatgttcccaaacttctgagtattgccttctcttctttggttttgatgactttcccttgtcagcatcatcttcatcatcatcaataaacccctcatcatcataatcgtcgttatcaacatcatcatcaccatcatagacttttatttttggttttctagatgattatggttcatcactacttttctttttctgcattttaggtgtttctgatgcaccactcactttcgttttctgcttttttgatggttctggttcaccactcactttccttctttgctttttagatactccagattcatcaaaagcagctcttccctcttcttcagcattcagaacattgacaagtctttgagtttccagatctactgatctcatgtcgtaagaatcatgtgactcttatcaataagaaaataacaaaaactatgtcaatcacctctaccttgccgcaaattcatttgtttgtgtttcagtatgtttttcagctcactatacacagtttttggaaagagtgaaacgggagacggcatggtgagtcacccattccagctcccaatctcgccaaacgaatcgataagaatagatagaatcagttgagtactttggttgcttctggatcacccgtcttcgagggcgggctgcgatatttgttcaacacccattgtcgttagctcttcacttctgtttttatctttttgagtatgctttcaaattttttgcttaacgatgcatttattgtaaaaccgtcttttttggtggataaattttaaattcataaaaaaaaaaatcaaaacataatccaatctaaggtcaaggttcaagtatgaaacatcaccattatagtcacatatgtctttagatgaatatagctccagccttcaagtcttcaacgttactcacaaaagaaaatctctcaagtatcaaaagctgaattgtaacgagacactgttcagtttccttgttgggcaaactcatatatatgtctagggtttttcattttaactccaaaactctctaatagtgaccaaatgttttaaatactctaagtgaaaaagaggttttaaatgaattgcttctactttggcgggtcaacccgctaatccgctgtccgcaacgggtcaatccgcttcagcccgcaacccatgatgggccaacccgctaagcccgataattcatggacataaatattgatgtccaagcccgccccgccacagtactacttgggctagtcccgtgggcattaggtccgctttatgcatcacaatttctcctctttgcacccaaaagtgtgtgattcatggcttcaacctgaattgactcaaaccaataactacaataaatctttataaattaataaccattataaattaattaaaatttaataaaataagaagacaataaaataatatattttttatgaaactcctatgtaaatctattctctcacaaatatcataaatttagaattaaatacagttattaatatatatatatatgtataattgtaatgaaatatgactatagtgtttttgtttttttttcttttgaattagcttttttctactgtatccaaactttttgatgttgttttgtcgaattacatcaaaaatttgtgaatgattttggatgcaataattttctttacgtgtaattagttttagaaaaatatggattttaacaaaacattcttattttaaatatattattttaataaaattatgaaagtagacaaatctctctgataattatctttaaattaatttatactagtatttttgaagtatattttgtatatggattaggttacaatatatccgaaattgtgaaccaaatattctatatataataatataaatatttagaagatttggttaagatttaaatttataatacactaagttaagagaaatctaaaaagattcatgattatattgtgattcaaaattttaaaaacaaatatatattatctaattaattaaaaagacgtgtgtttaacgtctgtatacattagtttctttcgtaactacctttctgtatattaacgtgagactgtatagactatttattgaccatcttggactaataaaatagcaatgtagtgatatctcaccaatttacctaaaaaatataataacgaatttatttagtaaaaagacagaaccacttcagtttagttgggtttatcgaagacccttcactttcgcgattcaacagtctgactcaagaagatcttctttttgatggtgtctttgttctgaagctctttttgttaaagacataaacaaaatggaggtatcattgctcaattctttccaaatgcatttgctgtgattgttaactcgagttgcgatgagaatcattacgagatttcatcattccgacatcaggagattgttgttgggaatcattgttatagctggttttgttgttctgcttgttcagtgttttggtattccctgtcggaattctttttgcttgtctccaattaaggtttcagtgattgagttaactaactccaatgtcactcaagtttctgtgatgaactacacaaatctttctgatgatgatgatgaggaacttgaaaataaaaaggaggatcttgatagcgaaaatgatgtggtgattagtaaggagaaggtagagatgaatgtatcttttattgctataggaaatatatctttaaggaatcctaaaatggtggttgttagctcagagtcagagtcagatccaaattcggttatgattagggttaaagatagtagaaagggtaatgttttatctctgaggaggcacaagcaagggagtgcgatttcgatatctcagatgaactcattgctgatccagagtctttcttcttttaaatctcctgtaagaattttgatccttgaattctcatttttgatttcaagaaaccatataagggttgaagggtacctatatatcatttttgttttttttcttggccattcttgtagaagcctcggtggtcatctgctagagactctgaaatgctctctgcgagatccgagattgagaaagtctctcttgttcatgattttcttggacttaatcctttggtttatcgaaatatctccaagtttctaaggtgagccatacaatgcacacctctctctcacaatgtgtaaacatcagcttctaatcctacaatggtagtactagtttccgccactcttgttattcatatgttccttgtacttattatgaatggagtaaaaatctagggactaagttagagactgttggttagctaaatttgagatttttggagtgttttgagtaggagtggtgatatgtcaagattttcaatgtgttgcttgtttaggagttatgacttgatggagaggaaactcaagatttatgtgtacaaggaaggagggaaaccaatattccacacgccgatgcctcgaggaatatacgcttcagaaggttggtttatgaaactcatggaaagcaacaagaagtttgtagtaaaagaccccaggaaggctcatttgttctacatacccatcagcataaaagctcttaggtcctctctgggactggattttcagacaccgaagagtcttgcagaccatttgaaagaatatgtcgatctgatagcaggaaagtataagttctggaaccgaactggtggagctgatcattttcttgttgcttgtcatgattgggtactatcattttctttttttttgtctttcttttgtattatatatcagtgagagtcatataaactctttgatgctgtttgttatgttactcgcagggcaacaaactgacaacaaaaaccatgaagaacagtgttagatcactttgtaactcaaatgttgcccaaggcttcagaattgggaccgatactgctttaccggtaacatatatacgctcttccgaggcccctcttgagtatctcggtggaaaaacttcgtccgaaaggaagattcttgcattctttgctggcagcatgcacggatatctccgtccgatactagtgaagctttgggagaataaagaacctgacatgaagatttttggtccaatgcctcgtgaccctaaaagcaagaaacaataccgagaatatatgaagagcagcaggtaaggtcaaggaaaggccttttctatcatcatcctctataaaccatattgattttggttgtgagaagtttagctcccatttcaacaggtactgcatatgtgcgaggggttatgaagtccacactcctagggttgtcgaggctatcattaatgaatgtgttccggttatcattgctgacaactacgtgcctccctttttcgaggttttgaactgggaggaatttgctgtgtttgttgaggagaaagatataccgaatctgagaaacattctgctatccatacccgaagatagatatattggcatgcaagcaagggttaaagcggtgcagcaacatttcctgtggcacaagaaaccggtgaagttcgatcaattccatatgattttgcattctatttggtacagccgagttcatagaattaaaaccaggtgaaaacattcataccatgtaacccaagacaacatataggtgaatgcattgtatagttatctgttatcaccactccctttataaactgtattgaactccgttagtggattctgttgatcctttatgttaaatgtgttgaatattcaacgatgtgtttagctcccatgtactagagatgggagctaaacacgaaaactcttaactgattcaatgagaaacgagttctcaaaccaatcagagtttgtcacatctcctccatggatcaacactttactagtattgtcttcttcaaccttactaccactaagctgaagagaacaagtcctgcttcaaagagtccatcttcttcgcctcactcttctttgatttcccattagacttcccttcacttcatcaaatagacttggccaattcaacatttttgatcatgtggtttaagaaaattaagttttttgaaccctgaagaagcaatattcaattgaaatgatcaagtgattacaaaaggaaccaaacaccagttgctactctgcaacctataagaaacaacaaattcattattacattgatactgcagcaacacgagtcgttgttgcctgaagaacacctttgcctgaagacgacgaatcaacaacagctactcttttgcgtccaactccaacaccattcttcttcaacggatcaaactcttgtttctcataattcacaccaagtggactccgatcacgttcttgtttgtttgatgatctcatactcactcgatccgtcgattcagctgaattcggttcccatgaagacgacgatgagtatccctgtcgctgcaccacgcaactacttcccgtaaaactgttgcttcctgaagattcttgctcttccatgtcatccaacgaagaaccacctctcttaacagtcacatacttctcgaaactcggctccattaaatccgctttcttcgctgcagcggatgtgaaactgacctcggttctttgatgttgattcgtagcagagttaagatctgcaactgcttcgacaatggaacaagccttggacatagatgaacttaacgcactgacattaacactcttctggtggaaattctgaatatcttctaaaagcaaagctgtataagacggaaacgttgatcctgcagttgcattgttactgttaacattgttgatatcgatattgtttgagagcaatgcttcgggactgaaatcgaaatcacgagatttcctcaaagatctgctcctgctcacaatttgtggcttagccaactcagttccagatgaaaccactatcttacactcttccactgcctcttgctgctccttgatggcacgactcgggctcgcggttcttcggattggcgcttgtgtaaccgtctttgtattcatcacaggattcaacttctgaaaacacacaaacattataaacattcactacaacgatacacaaacactaaaacctccttattccaattcattccaacaataccaagtacttgattaggagattcaaatacctgagctacgaaagttccagattctttaaccaatccttgattttcattgtctctattcatcatccttatgttgttaccagaacccaatttatcaccttgagagagtggaaacgctacagagtttggatcaatctcactcagtggattcctcctatacggagaatgctccgttttccggctaagcttcgacggagaaggctgactcgcagctctcgccggtgactgagacctcggagaagccgcttttccaacgtttctcttaacagtaatccgtttcacagatccatctccattgttgttgcttaaagctttatctgttgcaggaacagatacaaatttcccaggtctattgttgttactcgaattcacagaattgccactggaattagggtttatctccgatcttcttcccggagatctactcactcgtcgacttccaccaccgttaccactacttcctctctctctacttcccgatcgattactcttcgaatcatccctctctctactcggagttcgtcttctccgttcccgaggcgattctccaccacgttggcgctgacgatgaatcctcctctcagcttcttcgtcttctccgccatcttccgcatccgcgtcaccaccgttctgatcaaaatcgaaactcctcttagatccagaatatctcctagttttcgcagcggctgagttactccgactcaatctcccacactggatcaaaatcgcatctacatcaaccggattatgattcgaaccggttgatttcacatcggaaacagaagaatcttccggatctgtcgtcgtcttcgatgatttctcatggcttctccgatgttttatcacgaacacttctttcctcggcttgctattattatcttcttgtatcttttcttcttcattccttggtttcgattcttctacttgaatcttcttctcttgtgcttctagtttcagaggtgtatcaatggcggatttgttcagatctggtgattttacggaacaagatccgtcaattagagaagatgaagaagcttgaggaggatttttgctgagacagcaacccatttgctgaagaaattgaagcagacgctcttggtgaagaagatgaagagagcgtttttgagtttgaagaaattcaaaagttcaaattctgaggagaaacttttttttgaaatgttgatattagagaaaagatacaggtccctttagtttattaattaactgaaatatgtctactaactttctttatatgtattatttacatatagctcctcaaataagaaacttatcacttgtttcacccttgagtcttgtctcgagtcgaaattgtagactagattgataactttgaggagttttggggtgaattgaaattgacttttgttggttaaagggaaggaacatttgaaatattcgacagttggcaaaagagagccgttatacgtggaagagagatatagaatattttatcaattagtcctctgaacgttttttttttcaaaagcgaaatcatcttctttaaagttccaaataatctttatattatacgagtttaaatttctaacggttaaatgcatgttatgtgttttttgtctgattatgaaaagaatcttggaagaatttccatggttactagtagtaattttcaagttttaagtagaaaaattttgttttttttctcgatcaaattttatcagggaaatttacaacacaagaaaccaaacttaaaaactattatttttaaactcataatgaaacgaaaacaagaacctatccaaagcccaaacggcaaatggacaaaaggctacaaaatgcccaactctaacaaataagcatgtatgggggatcggagaactaaaccaataagagacgggaaaaatcctaaaatagaatttattcattgataaatattgtatctattcttagtttaatttatttattttctataaccattcaaatcaaaaaatcatgaacttttaaatttggtacgaaaaaacctgaactttcaaatactatttaaattacaattttttttttactttttgataaaatggtcaagttttgttaacttgtcatttctgacatatcgttaaatttttgtaaataaggttaactttcggttagaaatctatgttaaatcaaaaagatatcgttttatgagctccaaaacgttgccttcgcggataccaattgcttggatggatgtgtttgaattcgacattttgtttaaataattaaggaaaaatgtgtccatcgaaaatctaacaactgacctcatgcacacttaagaaactgagctacgacaacaatttgctatacgtagcaatattcagttaattaaaaacttgaattaaaaataataaaactaaaaagaataccaaatatatacaaatattaaatatacttacaagatttttttttttttaatttcaaatatttaattttacatataaaaaattcttctatatttgaaaagatactgaaacttaaagaatatagaatattaaatatatgaaattatcaaaaaaaaaaaacttaatatctatggtatatgaactaaaactaacttggtattctttttagttttgttatttttaatttattgcataagtttttaattaattgaatactattatttattagtatatatatatatatatatgtgtgttgttagtgtatactaaactattgtagtagcttagagagtttcttaggtgtacgtaaagtcatccattagatacactatgagcgatttttcgatattttttaatatttttcccttattagtttagcataaataaattctaatctatcaatttaatgaatcagatcaacctataaccctatttatatatatggttgtcaagttatttggtcaagtttttcgtgattagcaatttaacattactagattgatgttaataataaattatatatatatatattagtttattacgatagaaaacaaaaatataactaaaaaaaataactagtatttacttacaacaaaaataaaaatattacaagaatataatttctaaatatctaaagccacaaatcagacatctcttgatcttcaaaattattttaatactattagctattttgagtagatcttaatcgcatccggaaacccatggatattcataacttcagattccaataattgtttactagatttggattctctgaaattcaagagtatccaatatttctccactcctaaatagtggtaatcatttaaaccaaaccgaaccgatccaaactaaatctaagcctagactcaaaccgttttgttcagttttttctcaaccattcggtttaaaaccaaaccgaaccgataacccaatgtgtttattttattatttattaatcatattaattatattgtacaaaatttcatggtttatttggattattcaatttaactttacaacttgaacttgttgattactttaatttattatcaaattcaaagttcaaatgacaacgaactaaaaaaatttgttttgttacattaattcattgtttgaaccgaacataaactaatccaaacacaaatcaaaccaaacttactttggttgagtttggttagagtgttacgagacccaaataaaccgaactgaaccgaacccaaagcgaacccgaagttagaccgaaatgcccacccttactcctaatcacaaacatcaaaattaagaaaagaattacaaaaatatgaaacgagattaaatagtgtttacaggaaaattcattgataacaatattatatatataaaaaactatgtatagatttaagaaaaattatttctaatgccctttccatgatgccccttttcaactctacccttttttttagtcaattttatttctaccctctttaaatttttaatgaccattttaccctatttgaaaattgttttaggttaacaaaatgaaatattaatatttttttgcctaaaatattcgaaaataaattttccgtcaaaagtttcccgccaaactttgttttccaatattatttttcccgcaaaaaaaatattttggcgggaaaaaaatttacaaggtattttaaaagggttttaaaagatttataagggattttaaaagggtttgaaaataattacaagggattttaaaagggttttaaatatttacaaatgattttaaaatatttacaatgaattttaaaagggttttaagagatttacaagggattttaaagggatttaaaagatttacaaaggttttctaaagggtttaaaattgttttaaaagggttttaaaattgtttttaaagggttttaaaatatttacaagggatttttaaagggttttaaaagatttacaagggattttaaaagggttttaaaagatttaaaagggatttgaaaggaatttaaaatatttacaaaggtttttaaaagatttttaaaggatttaaaattgtttgaaaagggtgttaaaatatttacaagggatttcaaaagggttttaaaagatttagaagggaatttaaaaggggtataaaatatttacaagggattttaaagggctttaaaagatttacaaaggttttttaaagatttttaaagggtttaaaagtattttaaaagatttacaagagattttaaaagggttttaaaaaattttacaaggaattttaaaagggtttaaaagatttacaagggattttaaaaggtttttaaaatatttacaagtgatttgaaagggttttaaaagatttacaaaggttttttaaagatttttaaagtgtttaaaagtgttttaaaagatttacaaaggattttaaaaaagttttaaaagatttacaagagacttttaaaggttttaaaagatgtacaagggtttttaaaagatttttcaaggatttacaagaagaccctttaaaaactgttgtaaatctttttaaaaccttttaaaatcccttgtaaatattttaaaacccttttaaaatcccttgtaaatattttaaaacccttttaaaattcttttaaaatccgttgtaaatctatttcctgacaaaaaaaatttacaaggatttttaaaagcatttgttttggctgaggaaaattttgttaaaaaaaaaaaaatggcgggaatttttttttttggcgggaaaaaagtttggcggaatattttttttggcgggaaaatttcagttttcagttacatgttcctattagatgagggtaaattggttattttgttcaagggaatgagtatttttaaaaatggacaacatgaaagggtattgttgcaaaaaggtagtaaaaaagggtagttttacaaatctccctagatttaaaatattaaaatcaaatgaaaataaaagggaaaagatctttctttttgtcttctatatttattatttattgcaaattatgagaaatgttacatacacaattctaacacggacaatttcttccgacccttattagatccacgatagataacacatccttctccatgctcttgattttaattcatttaaattctttgtcatttattgtcgaaagagtttttctaaatatttaaatttcaagtccaaaactacaggatttataacatccaaaacactaattttatttagataaaattgtcttagttcatttttcataaaatttaaacaattgaataaaatctttataagttaatatcagtatacattaataaaatagcatggtactaacattatcaatttatagatgttttattgtattattgatgagtaaatatgcatatttatgtccactgaaaataattaattgataaatttaaaatatattgaaattatagtaatcttaattttaaatttaatttcatgtaatagtatttgttttgtgcccatgatgatgagcccatataatttgacatcatgttgttttaaaaaatcaatcgttgagttatataaatgattgcgacgtatcgcacgatattaccatcgatagaacgaaggaaacttccatttagcagttttttttattcaaaaaacatatctttcatataatagaagtggaaaagttacaccaaggaaaattgaacctacaatcgaaataaatgagataacaaaagtattacaataaatttattgaaagacaccaaaccagatgaatgatccgttgagctatccaacaagggtctagatgacattgaagaatgttaatgataaataatgagaactgaggctggctttgaggatgaattatgcaatcttgcattgcgcttttttccatatggagtacagtgaggcttgataggcaattcgaagaatcaaagtagttttcttgtcacgacaaggattcttcaaccatctaacttcatcctcaaattgatttagaggagaaagatgggctttatcatagaaatagtgtcatacctttgcaacataagagcagtcgaagaataaatgttagcgagattcatccatcaaattacagagaagacacgacgaaggagtagtcatgccccatcgaatcattttgtctctagtgagaagtctatgatgagactttagccaagcaatgaaagcatgcttaagaatccttcctggaaatcacacagattcaaaccgatccatctttgtgtcaggaggatgaagatgtgcataagtttttttttgaatattaatgtgcctaagttttagcagcagagaaaatatttgatgcatggatatcatcaccttccaaaggtaaacatcatcctctacatcctcttgtaagttaacagtagaataggaaggaagacattctttaagcaactgaataatgggactgcgacttcgagaatttgtaagccactattgtctctttctcaatgcatccgcaaccacaacagaacgagggagaagagaaattcttagtcataaatcttcaggttagctcgacaaatatggtcccaaaaaaatccaattatcagtccagaaattacaagttatttctgaaccaatttcacaaacgatgaaaaacctagttaagggtcttaacttgcaaagattattccaaatccagcttctccaagtgatacactccatatcccaaattttttaaaaattattcaaacaagatccatgtgtattagttttctcttttggtaagtaaaatagtggtatccataagatgttggattatcgggcatctatttgctaatgattgtttctaaattagaacttagatttgcgaatctaataatacatcacttatcaatagataaacctttgaccattttttcaacgaactcataaaagatccaacaaaatattttttgagttattaaattaaatactactataaattatctttaaataaatcaaattatgggagtatttggtgtttctttcatcaatgaatggagcaaaaataaaaagtatttaaaataaacaacgctaacatttatgacaactctattatctctctctcactctctcacttcaaatactataattcattgtccttttcatcgaatccaagacctcaaaaaaaacaattattatttttcaacgatcaagatctcaagagtcaaatccaacggtcaaaaagaagtgactctggtactgacaccacctctcataattctcgttagtaggacctctcttcttcttccttctctccactgtatcggatccgggtcaaatccgggtcgggtggagtcgggtcgggtctcttataagaggaggaaaaccacttactcactttcttcttcttttctctctctctttcacccccacgcactcttcttttctctctctgacacatatctttttctctcactaaccatttctttctctctctctcttctgtttttgaaagccaaagtgtctctcttggacagtgatggaactgcttcaagagatttaattttttacccacgagagaagtcaagttgttgaagaagaaagatttgttcttttgtcttgtttctttcattttttcatccacaaagatctcaaagacaagagtttttttttttctgttggggttgcttcaatgcgtacttgtagtagagagcttgtgttgttgttcatggtttgatgatgagaagaaacagattctggttttgaagaaatggggtttgttctgtttcttgtgtttaagggttttatggatggttttttgattcgaagctttcactgagtcttatggttgtgagtgagatttttgggggtttgaacaaaggagatggagaaagacgagtttgtacttccggagctaaagagttatagctactgtagtagctggaagtgaagaagattttttaatagattgtacggaaaaattagggttttcaaagtttggtttcttgaagttgaattagacatgaagctgtcaacatctggattgggtcaacagggtcatgaaggtgacttgtttactctctgattttcttagttctgtttctggacaagtgttttcttagttcttgtgtctgtgtttgttctaacaggagagaagtgtctgaattctgagctatggcatgcttgtgctggaccattagtctctcttccatcatctggtagtcgagttgtttactttccacagggtcacagtgaacaggtttgggttgttgtttaaaagtatggagctttatttttagacttgtgttatatttgggcatttccatttaaatagaagtgtacttgtaggtagctgctacaactaataaggaagttgatggtcacatacccaattacccaagcctaccaccacaattgatatgccagctccataatgttacaatgcatgtgcgtagttagttccctgtccctttccatattcaatttttacttttgtaaactagttttgggatgatgtgctttgtaagtatgggtttcgtttctactatttcaggcagatgttgagacggatgaagtctatgctcaaatgacacttcaaccattgacaccggtagatacattatacataacaggtttttgagtctgtgaattaataacttaagctttaggattggtgttgtttataggaggagcagaaggaaacatttgtaccgattgagttggggataccgagtaagcaacctagtaattatttttgtaagactctcacagctagtgataccagtacacatggagggttttctgttcctagacgtgctgctgagaaagtgtttcctccattggtattatactttttcttttacttactttgctataaattgttgttgagaaaatatatgtattccttttaatatcttgtgtcttccctgttgcaggattacacactgcagccaccagctcaagaactgattgcaagggatctccatgatgttgaatggaagtttaggcatatctttcggggtaggtttcacctttcctcggtgtgcgttgatgatccctttttaactgtagtcgccagtgtaaaaatttcaattggctgttaagtatgtctgaagcagcatctgctgttattttcactactcatgtgtggtttagttgaagaaaccacggaggctctgtgttcttgtcgttgtctattataacgtggaattatttacttgttcatatgaagttaagttgatttgaatccttcttcttggtttgttaggaataacttacatggttttggtgtgattatgcaggacagcccaaacggcatctcctaactactggatggagtgtctttgtcagtgccaagcgactagtagctggagattctgtcattttcatcaggtttagttcttttgttgtacgttcagtttgtggattgtgattatatttgtaacactattacttgtttccaggaatgaaaagaatcaactctttttgggaattcgtcatgccactcggccgcagactattgtaccatcatctgttttatctagtgatagcatgcatattggactccttgctgctgctgcacatgcttctgcaactaatagctgtttcactgttttctttcatccaaggttgaaaaatctctcccacctgcatctttttcatctctcggtatatccgataatatatcctactaatattctcttcatgttcagggctagccaatctgagtttgtgatacaactttccaagtacattaaagccgtttttcacacgcgtatttcagttgggatgcgctttcgcatgctcttcgagacagaagagtcgagtgtccgcaggtgatgatgccacatatctggaaatgcaatcttgaaactgagaaaactatatcattatgttacacatattactttaacatgttttctgacagtggcatggggaactttccaggtacatgggtactataactggtattagtgatctagattctgttcgttggccaaactctcattggcgatctgtgaaggtaacaacactattaagcctgttaccttatttaaattccatggaacgtcacacagctttctgatgatttagtccaatattactctgaaattccatcaacattgatgaactgtggcattattggtgtaggttggttgggatgaatcgactgcaggggagagacagccaagggtttctttatgggagattgagcctctgactacctttcctatgtatccatctctttttcctctcagactaaaacgtccatggcatgctggcacatcatctttgcctggtatccaccttttggctcttctcctaactgttattaactagtatagtacgttcgtgaagtctcttactgtcactcagtgtttctgctattgtaacttagttgctacttcggataaataacaaatgttcgattgagtagagctctgaagagggtcttactgttataatttatttacaaagaagtgtgtaggtactctccatagctatttactcaaaacattatgatgttacagatggaaggggtgatttgggaagtggtctaacatggctaagagggggaggtggagagcagcaaggtttgcttcctctaaattatccatctgttggtttgtttccatggatgcaacaaaggctggatctcagtcaaatggggactgataataatcagcaataccaagcaatgttagctgctgggttgcagaacatcggcggtggagatcctttaagacagcagtttgtacagctgcaagagcctcaccaccaatatcttcaacaatcagcttcccataattctgatttgatgcttcagcagcaacagcagcaacaagcgtcacgccatctcatgcatgctcaaacacagattatgagtgagaatcttccgcagcagaatatgcgacaagaagttagtaaccaaccagctggacagcagcaacagctacagcaaccggaccaaaatgcatatcttaatgctttcaaaatgcaaaatggccatcttcaacagtggcagcagcaatcagagatgccatctccctcgttcatgaagtcagattttactgactcaagcaacaaatttgcaacaactgctagtccggcttctggagatggcaatcttttgaatttttctataaccggtcagtctgtactccctgagcagttaacaacagagggctggtctccaaaagcatccaacactttttctgaaccgttgtcacttccacaagcctatcctgggaagagtcttgctctagaacccggaaatccgcagaatccctctcttttcggtgttgatcccgactctggactcttcctccccagtacggttccccgctttgcttcttcatcaggagatgctgaagcttcccctatgtcactaacagattcaggatttcagaattccttatatagctgcatgcaagacacaactcatgagttattgcatggagctggacagattaactcgtccaaccaaaccaagaactttgtaaaggtgctggtttgttctaggctcaccgacttctctgtggctctactgtctctaagaaaatactgatatgcttacaaatccaaaactgcaggtttataaatctggttcggttgggcgttcattagacatctcccgattcagcagctaccacgagctgcgagaagagttagggaagatgtttgctatcgaagggttgttggaagacccccttagatcaggctggcagcttgtattcgttgacaaggaaaatgatattcttctccttggtgatgacccatgggagtaagtaaagtactcttcttctatttgtatacattgctttagatttgagatagatctttaaaagcttgttctgcaggtcatttgtgaataacgtttggtacataaagatactatcaccagaagatgtgcatcaaatgggagatcatggagaaggcagtggtgggttattcccgcaaaacccgacccatctctagaagctgcttcggtgttagtctcatcatgctacaacgcgggagccctttgtttcccatttgaagtcgtttccactcatctttatatgccattcgttcgcatctctctcgttttgacgtttttagaaagaaacataatcatatttgtgagtatgggtcctgaaactttaggacgtactttagcttgtattagacagacactctcgtcataaacataagaacctttatgtagctgtctcagggtaactaaacttttctagtatttattcttattctatttttgtaacaacattgttagacattcagtttggtcagaccaattagattccataaggtgtgaaaccaaaaccaaccaaatctttaaaacacaaccattaatcacaaaatgttaccaaaagcttctactagtaacttaggttgaagaatgacatagatgaagtaccaacaactcattttctccctttctttttgacccaaagagtacttaaacgtgcacacacatcagacttatcaaccttggacagcattcatggcatctctcaatctcttatcatctttagcatcatagaagcatttacgtctcttcgagtcacttataaggtttgcccaaatcgaaccactccgagccagtgttgactcatttccaatcacccataaacagtgcctagctcgagtgagtgccacattggctctttgacggttactgagaaatccaaccttcccgttactattacttctaacggtagagatgatgataatgtcttcttcaccaccttgaaacccatctacagaccgaacattcacagtgaaaagctcacctgataaggaactgtacttatctctgattctctcttggattgctctaacttgtcctttgtaaggagtaatcactccaacactcattttcatctttctttccctagaaactgtttcaacattaagcaaattttgtcaaaaggaataatgaaacagtttaaatactatacacttataaatcaataaagattatatacctttgaaaagatttgatatgatttcagaaaccacagcaacttcaaccatgttcttgggactatctccatcaccaaactcttcttttccacgtccaacattgataaaagaaaatgagccaaacatgtttccttgaagaaacctcttttgataaatactttcttgaacatttgcagcatctttgattctcccaccataaaactctttataagggaaacgactaatcgaaggatgcattcggtactgaacatcaagcaaatgctttttatgaccaagcagaaccaatctctcgaacaagcttcttccgaatttcgccttctcgcattgatcgttatgaaccattgcaggtaactgaaactcatctcctattagaatggcgtgacgtagtccaggaagttgcaatgcagcaactgattcacattctttaagctgagctgcctcatcaaccacaagaacttctatatttccagtcctttcctcatttatttctgcagcacctgaggctgtgcatatgatttatgtctgcatttttctatttgacgaacatattgctggtacttagtctctgtgttttcaagaagatctatgattgactccaaactctgcttccatccacaagtagataaaaacagtttacgaagtttgcttatacgatgatcaagaaagacattacgaagataatcagtatctttgatcctcattcttttttggtttccagctaaaaaaatattccccaagccataagtggcatgttctgaatatttattcgataaagccaatagccttgatgttacttctacaatagctgtgtttgtaggagcacacacaactgttttgcaccttagcttgagaaggacaaggagaagagtagcgaccgtctttgtcttaagaggtccccatatgagtttcacactgttcttgtgattactatctcttgtctcaaggcagctcaagattgcagcttcttgtgaagagttcaattttgatgaacggattatatccaaaacattttgtccccaagttctagaagaaacaattggctccataccctgcaatacaagtaattactccaagcaacaaataaaactttatagtggatccatcaagagaatcatcaagaccatttcttatatacataccgcagtatttggctgaagaacactctggatgagatcaaagttgggagcttcatggtgcaaagcattccatattcaaatgttcgtagttgaattcataagaagaacaccgaaaccaagtgactttttctcatcatggaatattaatcttgacaaaataacagagatatttggataagtatcaacagaaatagaaccaagaagtaaaggattcaagtcatcgactcctctaggcctttcctttgtcaaagcaataagatctccacattttggctgatacttttctctaatactcaatgcatcatttattgacatatcgtagaacaacttgtttgataagcttccacttgattcctttgtcattgtctccaaggaactaatttcaaagagatgagcttttgacaaagatttgaagcttgtggacaactcggttcgcgtttcctccagtagatgaggaacaaaacacttcaagtattcattaacggaactaaacttgtctggtatagtctttatctgttacaagaataatagactattgattatagctataagtctctaaacatgtcaactaatgaagaaaggttaaaagaaatgaaaaccttttgcttgtagagatctttgttgagaatatcttccatagaccaagaaaatattctatcaagtagacttgttttctcgtttcgttccatgattctttcactttgactaactttctttcctgcaagattaagacaaagaagaagcaaaagattggtacatatataaaaacaagaaccgagagatgttaatagctctcttaaagaagtcgaaaggtctagctagaatttgaagagtttttttttttctacagttccagtaatttacattaactattattttttaaaaacaaaaaaagaagttggagaaaaatgagaataccacttctatcttcggtctgttattggatcttagtctaatacagtaatctatctatacatataattagagagtttttctctccatctacagtgtccatctaagcaacactatttattatacacttaaataaaatttaaacattcatttactgcatatttatgtcatctaaaaattttaaataaataaaaaaattatgtaaaataaatgagatgttaaaataataaaagataatgctatgaaatttttattagtaataataataattaaaattttaacaggtaaaaattaaaaattatcatacatcaaatttttaaatgtgttaatgagttttagaatggaagtaatttttaaatgcatggtagaatgaaaataaacttatgtagttctatatggaaaatattaaataagaagataaattttaaagtcaagcattagtttctaagaacaatatactacatatttttatttattattaaatttttacttaaagaaataaaagattactaactcaacttaaattataatttaagacgaatatatactaatattttaaataatatataatcaatgatctcattattcatgatttctacaacaaatatatacaaaaaagtatgtaagccgttaaaaaaactatatgtaatttgtgtaacagcttctcaagtggaacaacaattttataacatgatcgaaaagaaaaacacgtttgatatttcttcaattgaatcaaatgcttttaattacccaaaattttgagtattgagagataacaattaaggagaatagttatgatatatcttgaaaatcaattaacagtccaacatacattatctgtgagtcaatagaaggtgaaaagaaagtacatgttgagaatcaacgagtgcatcatagaagatgacgacataattcgtagttgaaagtgtgtgaaagtaaatttctaaaacttaaaaagataatgtacatgactaaggtaaaatcttaa

SEQ ID NO: 777 - DNA, 86121 bp, Arabidopsis thaliana
gatctcattcattctgtgaaacgaaaaaatacttagacaaatacatgacatacattattaaacagataattagattcaaaattgtggttaaccgtttggtcatgtaatcatggaaagtgagataagatatgcacattgtcacatgttttggtccattctcctcaaatatttgattcctttttcagctgatgactttttctagtcgtattcaatgtttcggatgatggtcaatccgtcagtgtaccttattaaaacggttctcaatacatagattaataacacaaaatcaaccctataaattggaaacttggctgaccttatgaacctgaaacaagcacaacaagtccaataacaaaaaatattaatgaaaaattcatctaaaatatttgtcgttctctctataatccttttctatgtcataagttcttgtcatggatacaatccttttgctaaaaccgttgtcacagtcaccaacaatatcagcccgcaaacaaccttgacaataagttgtagatctaaagacgatgatctaggtgagcatctgttgctgcatgggcaagcgtttctatggaagtttagaccaagctggtttagaacaacgttgttcacctgcaagtttctttggaataacaatgtcaaatggtttgatacatatagatctgacagagatcaaggtcattgttatagttgtaattggtctatcaatgctgacagtgcttgtatttcaggaaacttcaacaaaaaatttgataggtgttatccatggaattaaaaacaattcaatttgtaataatgtctagtattttgttaaaatataaaaagaaaagtatcattttctcaattcatatttgtcgaatatgcaataatttttactctatagattgattttttttttcttcccttgcttcctttacaaagaaaaccctaatatttacactatataaaaaaaattcttacattgcttcctttacaaagaaaaccctaatggtgccgaaaaagcttccattagatctggaagaagagatactctttcgagttccacctcgatctctccattgctttagatccgtttgcaaagaatggaacgctctttccagagataagagattaatcaacaaaaactttgcttgcgctcctccagaattcatcttaaagacacgttccaatatttattcgataagcgtcaatctcaacgatgacaatccaactataaatgtgcgtgacttatgctttggtgatcatttacggggtcaacattctctctatgggacctgcgatggtaacttcttcttgtatgatcactttcacgaaggaggcggatgcatggttttgtttgagacagattaaatggtttgccaaggctccgaaaatatgtggcaagggcataggttacgtaggtagtagacccgaaaagagttacaagattattgagagaacgtgtcctctcggtttacaagggagatcggttctcggtgttagaacaatccaaaaaaacaaggaagattgagatttgggtgacgaagaataaaattggtaacggggatgatggagacgatgtggtgtggattaagtttatgactatctcaagacctgacttccccatggtactaattagtcacccgtctacaaattacttcgtggaaaataatatctatggaaaggcctttgttctgtcttgtcctaccaagaaacctaaagcagcttggattaagatagatggagttgtattcgctaagtctgatcagtcatctgtctttgttcccagtttgatcaccattccttgagagactttagccgaagctagtgaacaagaaaaacttttacaagttttatttccattgttgctttcatatttttatttagctatttaataaaacttttacagattggtttccacaatttgtttggcctaattcggttaattaataatctagttcgtgagcatgggaagatatacaaagtcgtttctctatcagtgattcctgtttatatataaactatcggtcgaatctacaaacaaaatctacgtgataagcacaaacacatgatacttgtgcttgtaagaacaggaccagagagacgcataggcataaccaaggaagttagcacataaaccaaaatgttagcacggagtacaaaaacagaaaactaacttagtgcgagccacagagttcttagaatatcatgtgtacaaaatatttgaaccaaaaaaacaaacaaccttctccactcctgaaataacacacttttgtgcccaaccttaagaatggaattacacactttgtgctcagccttgacaatctccttaccattctacgcagacaaacttctattggccaataaggaaaggctttacattctaatggtaatgtgatggcaacagtttttgtgtcctcagtatttcccggatccttgatttgtcaacgccaaatacctttgatgatgcagcttctgcaaatgcgtcttggacagccttcatcatgccaaagtactcatggagtgtgtcctgaaatgaacaactcaaatataagaacagctcttagggaagcttacagtccagcacaatctccatatataagcctgacagttcgctagtctataatgaggatacacactaagcatgaggagatttagaaatcattactaaaacggtttgttccaagtaggatactacatactgacagaatgatgcataattcaactaacaaggatgaaattttacctgttgtgaggcattgataatttgttgctcgagatcatgcatcttctcctttttttccaaaaactttttatcttcttcaacaactggtggttttgacttttgatccaccccagtcattagaaactgactgcatcagctccttgaatccctacctcctctggcaggctgaaccaactcatgcactggcatggcagaggctccgccgttaccaaacaactgttttggaatcttcaccgtgccatccaacatcatagaggccacatcagtgctcacattggtagtggcaagcatctggagaaacactttcaactcgtcactgttcctaataatagggtgtgcacatagcctgcgcaagtatttctacaatgctaatcttctctgctccaaaaaactcttgtttctgtcaaccctgaagagagatgaagacgcaacaggaggaccggcactggttcttagggttctagagagtttagatgcatctagcgaagaatcatctttgaaacacagaaatcgtggagcactgcagatacagcacataaaaacagccatggcgcaacagagagtcttaccggaaacactcaagcaacaaatgtccaatgtttgatctttaaccataataacatttcagagaaagatagctgcatttcttagctatcttcattttaaacacaaattcaggacaggaacatggagattgattgattgatgatgtttcaaatacattttgaaaaatatgttacatttgttttcacactcctttcctatgcaacaaatttctgacaacgagtatccttgtgaatattttgacaacgaatagaacaaaacctcatcccacataaacaacaattgtaacctgcaatgtaaccacaaaccgagcaaaaatagcgacgagaagacgaactcggaggtccaactgctgctttcaagtaagtcggtacatgcgacggtaaagactccaaatttgcctaaaacaaacgattcttagaaccaaacttctaatgccttagcctagccgcaaaatagttagttagtaagttacctcttgcaatagctcaaggaaggatttaggagctttacgagcttctaaagctttcgcttgtcgagttttacgctttgatcctttgtgttgcttcttctgtaagtaacctaccaactcagaaaaacagagcttaaactaaaactacagattcacacacagagctatcttcaaatgtgaaagattgattattcaccgagatcatcatcttcatcaagagaagcttcttcatcatcgttcaaatctatcacttcaatagcaccattatcgttctctaaagcctctagcctagctatagcagcctagaatcaaccatttttgaaagacgattcaattttttccgaaataaaaaaagtgaatccgaaaatcaacaatttcacctgagttcgattgtcgttgcttgtaagagccgccgccatcttcgtagcgaccttacgagtccgatttgatactcgacggttcgacatctcttcctccatcccggaaaatgtttagattgccggcgaacgttggaagcgcagcgacggattttgaatcgacgacgacggcgactatttttaggttgttttctagaaatagtctgttcggcccattgggcctttaacaacttactaaagccaacaatgaaaatgaaacatgatcagctaaattaagctgtttctatattggaagttatttattattaggtcgtaatcgattttggatacaactaaaaaaaaaaaaaaaaaaatcatctcaataatacaagattatacaacacgatattcaaactaaaagaaacctaatcaaatgtttttgattcacaagaatcctcaagaaaaaattaacctaatcaattatgagagtgagaccaaggagataagaacctcttgtaatcaaacttgccattcaagaaaccatcaccacctttttggttcctcacttgttgctgcaccaccaacaccgacccttctgaggcaaagacgctcgcagccacggtgtctccaatgactccgagctggtggtcttcgctccacgtggataaaccttcaagaatctttgggttgatcccttctcttcttccggttatccagagatcgtagtcgttgacattcattgcttggattgcagcgagtgtctcagcaccgttcttgactacaacttctttgtaactaaccctctcgttgctttcgtttttgacccaaaaccatgtgactacaccatcgtctagcttcttctctctctcgtcttctccttcgtggttgtacgataagaatcggatcacagtcaacgttacgtccgggtttgttgacattctatcggctagatgtagagcttctctgttatcagctcctcctaaaaacaaaaccacgaaacggtacgtttcttgcctcatacggattgagtttgttgagtgttgtaggtccatggataacctaaccaccgcgttcttaagccgtcccttgtcaaaatatatacagacagagcaaggtgtgtgttccaagacgtctgcgttcacagatagcatgccggaatcacgtagctcggtaggggcagcgtcttcaagacgctctttctgataaggtaagagaatgaaagcggttttcttgcctaaggcaagctcgcaaatgtcttggtacatgagacgttttggagcatgagctgtgtatgaacgcaacgtcacgcactcatttcttttctcttcgtacaacttaaaggcgctttgcacctgatctatccgtccactttgcttacgttcaggctcttcctcttcctcctcgtattcttcttcttcctcctcctttcgttgttcgtggtcaataaacaacggcgtggctcttcctgctagttccactagctggactgcgaatatagataagggactacttttagtgggataggcgaaatcgagaaaagttatcaaacccgacaaggtttcgtggtcggaaactgcaagaaccagtcccatctcggtgttctgaggagtgtgttggatggtgcggtgcttgctgcttcggtaaggtcgagtgggatcgtagaaaaagttgatgagtggggtcgttacagctgtgaccacaaccgtatgcaaaaccatgacagtgtaaccgggaaagcccacaatacgtttatcgatccaatgcaagtataccaacaaatccatctgacctcttaagttcatcatcaaaccaagtgtaatactttccctagcggggactttgaagaatagagcagcgaaagcggtagagagaaacttggtgatgaagccgacgacggtcatgtagaagagaggagatagctgattgcgccatgtctcatctctaaggaagtggatattggtgccttgtcccactagagcatatgtgaaaggcatcaaaaattcatagatgaaggtctcgcttcggacagccaacgtcgaacccaacggtgggccatgagggactagtaaccctagccaaatgggtcccacggctatagaaagaccgaacatgtctgtgaggaaacaagaggcaagaacacccatgagaatcatgacgatgtagttttggttcacaagtgttccttcaggcgtttgggagactatccaatcaaaggctcgtctaacaaccagaagcataaaagctgcgaagatgaccaccgatactagaaaccagaagacagaataagctcctcctacgtcagcatgcgtcatggcttcaaaaataacaatcacgtagacccctgccatgtctccaaggagagccaccgacatggcgaacttgcccacctcggagttgagaaggttcatgtctctcaaaacggtgtaaatgaccgggaaagaagtgaaagacaaggcgaacacgactcctccaatggacgaaggcttctgcaagttttcatccatttggtctcgcatggccatccccacgcttccaacgcagattatcggcacgataactcctatggcagcaatgtacttgtgctttcttggtgccttcccaatggctccaacgtccgtcttggccgccgtgaggaagaggaagtaaaaaaaccccatcagtcctatgtttgcgcatatgtaattcgcaattggtgggaataaatagtaattgaaatttctgattcctccaaacatcgatggtcctatcatcattccacccttcaaacacaaaaatccatattacgtcaatattagctccaaaacggattttatcaactacaaaaaagttaatacaagataggtgacgacgaacaatgatctcactgactatacgaggttggcgaaaaggtcgaagggcaatgctaacaactttgatgaagaaaatgatgatgattgcttcgatcaaaaaggtcgaaaatgcgtagttcatagcattttcgcctttgaacattccaaacggctgcttactatgaagtttccggcaaaccaccggaattttgggagagaaaacacgattgctgacctctccgggtgtggttgagttacccggccagaacccaaaatgggcaggcaggagactctggtcattgatggggaagtgcctaaccatgcaaactaatctttcataataagatttgacgtaaagtaaacgataatgatcattccatagagatcgaagacaatagatccatgactgatgttttttttttccaacagatgtggacgtgcgtcatttcgggaacaattttagtttactcttcactttttgcatcattaatattattttcattttttctgtatttgttttggaataaaacatatatgttttgcggtatctatgtcacaatctatacttttcactcgatagacgcctatttttagcataattaaagtagccaacgaaagtgaacctctaggatttgttttcgttaacattttctaagaaccaattaatactttttttttttttttttttataaacaacatcgtacctttttcttttctttagcataccgatatgtgtactttcctgagtataacttaatttgttttttttctcggaaaattgaacaatatactttagcggaaaaaaacagtaaaatataaatgtggaaattgaatactactgatttatcctagcttcgttactatattaacagtgtttaagaatcatgaggtgaggtcagatatataagaccatcattaatagtttcttagattagttcttagataaaatagctcttaaatttaatgttataattcaattaattgttaagaatgactcttatataagagccaaatctaatatttcttaggttaattcttagataaattaggtattaaatataatgttttaattcaattaatcttaatttttagataaattaagtattaaatctaattgtttgtcatattttttaatttttttatgtcatgtatgtttcaaattttatgagttgtaataattattaagctttttaaaattataatgtttctaaaaaaaattcaaatttttttctttttaagaactcaaacttaaaagtctaccattgcatattgccaaaatttcaatctcttaaccaaattcttaacttcaaaattttcaaaatccattataaaaatattcataagaattatgtgaagattatgctaagaaactaccattaatgatgctcttagagcatccacattagatatttttatgagtatttttaaatgattattttcaaatataaaagaagaagagagagaaatataaatgtctttagaatgagaattatgtcttcccagaaatatttgagacatctatttttgaaatgtctttacttttaatattattttatatgaaagacatctgtgaaaaattgttgaacgtcgatggtctaagagcatctccatcagtagtatcttggagagtatctggtgattgaaaaaatataaaataatgaaaaagtaggagaaagagttagagacgtttctggtttgagaaatttagagagactgtctttccacgtgtctctatattattggtcgaattctctttttatagtttaaaatttaaataaataatttaattataataaactgatttaaataatattgttgaaaaacctacacagtatctaaccgatggagatggtctaaggagttatatttctacttatagtgtcaatcaatgtctttggttgagtttgcgtcttggagaaacaaaactttctcggtacgcatgactactacactttccagacgtctttcctttacctcttgtagaccaaagttgattaattaattataaatgtccttttaacaaaaaggaaattgcacaagtcttatagtacaataataataatctaataataataataattaaaataaatatattttatacttgtaaatagttgtgtctttttgttgtaattttcattaaaatatttacggttatttttttttacatatattttgttcaactacagtcatatcttttagcatctaaatggttgtgtgtttttatcgtaattttttgttaaaatatttacggttgtatttttttatcgcattttattgttaaaataattacctttattctttttggacaattatatttgttcaactacattcatatgtttttaatttacgaatgtgtctttttatcgcatctttcgttaaaatatttatggttaattttatatttacagttatatttgttcaactatagtcgtatcttttcagtttgcggttgtgtttttatagttgcatctattcatttaagttacatctcttcatcatatttctttgcatttttttcacaaacttttcgtatgaatagttgtttatttaaatgttcgtggcttttgaactctatatatttgtccttcttcataaatagttctcatatttttgtttattcacacaaattatatgtttcatgatgaattcaaaaatttaatctggaaaatggtttcaaattctttactctctaaactatttctacgtatacatcattttaatatgaaagaaattcttcaaattcatgatctaaccaaagcttcttggaatctaataacaataacaataaatgtcttttacacttctaaacagtcgtgtttttttttcacaaatttttgttaagatatttacggtttgttttaaggtcgtgtctttttgtcatatatttttgttaaagtatcgcatttttcgttaaaatatcacatgttttggtaaaatttatataataattcagttatttgaatatattatcataattatttaatacataaatactaggttgtatttggttccactccaatagatatcagtttggttcactttcgattattttatccaaaatacccaaaaaaacaaaacatcaaaatatccgagacttttttgacaaaattgtaatgactcaaaatatttgaaaattaacaaaatttattgggttagaggttgggaaaaaatgtattgggtttagatgtagttttgtataggaattgaccaaataattttggttccattcgggtacttatggatattctgttcggttataaccaatattcaatggataatgtgactgagatccatttagggtatttagtattctctagtgtgactgagatccatttggtttcattattgattttcaggtctaataagtataatcaaatatatttttgtaatttaatacatagatacaaatatttgttgaaaattagtttttttcgcgatatcgtcatatcctagtaataatattaataataataataatattattattaataataataataataataataataataataataataataataatatttcatgtatgcatgtatatataaatatttattgtgactatgggaatccttgaaagtgcagaatattaattactaaaaatgtagtaaatgaaacatatacaattggtaagtgtatgttgaaaatagtgaaaaaagagaattaactctctttttcttagcaaaaaaaacaaaaaaaaactaactaagtttaatcaaaaaataagtatgatttttctttttggaaactaaaatacatttaagtctaaaacctatgaaaaatactttttgttggggtaacagagataggcatattccgctgtaacaaataacggttttgccctcgatcatcttcttctttccttcttcatcgtttctttctcttcttaatattaccaggaattttggtttcaatttttttttttatcacaaacacccaataataacaatatatataccctaaagaatagtacaagaggaacccaaataaaataattaaacccaatgtatccaattaaattcgttttgatgagtgaaatctaaacccttatgagagtatagggaacccaaatgcttcaatcatagacacatatcgaatcaattatgaattttaattaataatttaaattattttgagaactttggatagggagttacttgtataaacttgatccatggagtagggtgtaaacgatgttgcaactagtggaataagtaaagaaataaaagggaaaataaaaatattttttgaaagctgtcaagggtgaaaccgtaaaattatataacgtaaaagtacctaaatttgtgagtactgtactgtgatgttcctatatcgacaaaagcacacactttaatgtgccgatctcgtaattgatccaactaaagtaggcttggtaaaaaaaaccaatgacggacaacacatgaaatattgctctctctcgctctctcttaattctttttaactctctcaatctctctcctcaaattggatatgagtttttcggtgagcgatctctttcttcctcatggatctggttaactttccagaacagatggtgaatccgtcggaaaatcttgcacaaaactaactgtatatcaaaaatgaggagtggagcccatattttcaatgtcaggatagctactggcttctatgcttttgatgaaaactttaatatcatccatgatgcagatattcatgaaagatggatgttagtgagaatgactgtcagaacccctgctattccgggtgttgcttttgcccaatacgatccaactaggttttaggtcacaatacatttacagctcagttcacgagcattctctcttgcttctttacaaattaagtaatagtaatgtttcatgtggttcatacaaccacggcgaataagatttgcacaacctaataattattgtagctttgttttttatattttcagagttcaaaattgaaccataatttaactagctacataaaaaacaatttcattacaataaaatgagcatatgaagttgtggtacaattgtaattaatagaggtttttcatatgcatttgcatatatctaaaggtcgaatatgacgatgtggagagctttttaatggtgattttttttacagaattctagaagatgacgaactaaacgaaatcatattcttggtgagtgcttctaaccttatagaaaatcttttaaatcttgtcttctaatgatatgcaaacttgtcatgttttctttgttgaggaaatgaatcaagccttgtaaattcattatcagttagtgacgatacaaagtggatgttgaaacttcatggctacagagatacttagttctcatatatcaaaaatttgcatatattcatatgttttcttccaacgattaaatgctttgagatacgactatattgtacatctttcagttattgttaattttcttaaaactagattcggaccgcatgttcgtgctggattatgtgtgtagatgtatttgtttggtatagtattcattaatccaaaccagggggaaaaacaatgctttataggagggtcaactgaccccataactttttaaaacttctatgttattagtagcctaaaacaatttttttgaccctaatacaaagattaatgttagaacatgaaacaaaaaaatagttcaaatacttgaaatttagtttcatagcatgcattaatgaaacaaagggaataataaattattaaacatgattaaggtgttcttagttttacacgtgggggttgtcaaagttgaccaaagcgttctcactgtttctttaatgagaaacaaatcaaataacatgggaacgtcagagtaaaactcgtgtcgttttgataatttaacaactaacgttgcgctgttttttagttacttagacacggtgagaaacacaaaaactatagacgacgaaacgattcctcaaacgcagaagtcttctccttctctcgacggattaagcttttacacagaagaggagagatatggatcagatactgaacaaagttggctcttactggttagggcaaaaggcaaacaaagagttcaattccgtcggtgacgatttcaatgtaaaatttacatttttcctctcttttagttatcctcaagactttttgctttgtgggttttagtttcctgtttgagaggaaaaagcatcaatctttgattaagggtttttaatttcgaaggctttttagtctttctaatgcttggttttgtgaacatgtttgtcttattgtctggagttacatggtctagtttaataaacattgtcctgttttaacagaaatttcataactttttaccttaattgaatccttcattgatctttagtggagggttcttcagcttgttatagaaagaaagagtggatagtgatttgctattagtatggattccatttgaactgttaatgctgcaatttgtattttatggtaacatatcatgaaaaagtttggatctcatgagatacaaatgttcctgagtctgatgatatttggattcatttttgcagtcattgtctagcagtattgaaggaggtaccaagtggttagtcaacaaactcaaaggtttgtattatgtatttaaatctccttcagttcttgaaatatctgtatagtttgttagtcatgttttggctatgtgtgttattcttgtttattgataggaaaaatgcagaagccattacctgaattgttgaaggaatttggtctaccagttgggatcttcccacaggatgctacaaactatgaattcaacgaagagacgggtaaattgactgtattcatccctgagacatgtgaagttgggtacagagattcatcggttctgcggttttcaactacggtaacgggttacttggagaaagggaagctagcagaagtggaaggcatgaagacaaaggttatgatatgggtgaaagtgacttgtatctcagctgattcatcaaaggtatatttcacagccgggattaagaaaagcagaagcagagatgcttatgaggtaatacgacctggtgttggtgttgataaattctaaaacttatagatcaatttttatgggacaataaagttacaacttcctaagtaatgtttttgtgtgtatgttgtagtacttcttgtgtaaaaaaaaaatctgattcatcaaacctttactttttaatgtataagaatgttggtacttgctagttgttaccataaatataataaggagcggagcagggaacaacatccttcgaaccaatccagtcattagctctccatacccatctctcttagcatgagctgtgtggttgttggttgggtctaatacacttgaaggcctggcacatttgcagagctcttaagagtgcaccaaggcccatggccgtgacactacttctctgactccaagggacggaacctcataggacgtaaaccattagttatggcttgcatgtgggccaaatggtatttgaagcatatagaatttggattcttcagatagtagataggttcaataaaaacagagttcataataatctcaaaaggaacactaacaaagtctgaatacagagaactcataaacaaaaaaaaataagatgcaaaaccagaggaaacatagttttctgaaactgaagaagaagaaaaatacacagtttaagcggcttgttgagcagaaagcctcttcttagcttcttcaatgatggtaagcttaatacattttccctttggaagagaaacccatggctttgttcctttcccaatggtaaacacattccctaaccttgtcgcaaatttgttgagtcttgaatttggatggtctcactgatggagtggagacggaaattttcatttgtttttgggatatacacaacatctgcaaaagaatgatgatgcataagattgctacttaagtcactgatcatggaagctagtaaacaaaaagcatgaatatcaaatacagacttttagcttgactcacccatgaaaccagcaggtcctcactttcccatctacttgaatatgcctttgcatcaagactgaaatcacctcacggtatgtcaaagcatacttcaatatgataagaacaaagggaaggcacaccctcgacttgtgtggtcatgaagatggtttgggggcctacgcagagtgagaccgcattataagtatcaagaaacacaacatatcaagtgaaagtaaggtaataagattcaaacaattgatttacaaaagcaccaccaagttcctcaagagtatgttcataaaagctccgccattaaaagtcacattatttgacagtagacaaagcttcaccacataaacatcattcaagacttctaagtcatatagaacagagaaataaaatcaagacaaaaccaagaacaaagattgtaaggttcactaaatatcaaatgtttcgaagctaacatagcagaaacactaacaaaaaaaaacctagaacctatttagaaaaagctcaagagctacgaacccatatcactgttaatttactcattatttcgcactttttagcggcttgttgagcagaaagcctcttcttagcttcttcaatgatggtaagcttaatacattttccctttggaagagaaacccatggctttgttcttttcccaatggtaaacacattccctaaccttgtcgcaaatttgttgagtcttgaatgtggatggtctcaaagcttcccttttgttttttcacggttcttgatcacaccaacacgccctctgcttcttactcagtcaccatcacaacattgccaacctccagtctcctgattttttgaatgaaaactcttactcgatcatgaaaatcaaaactttcactccaaaagacacattttaaaacatagactttcccaagaaataagcctaagtttccccaaatctagataaagacacacattggattctctttagcataaatcacaagagagtagatgagaggaaaagacgacgaaccatgtttgcaagtgaatctccgaatgtgttctgattgctcctccggcgaatatgatagagcttacgaagtaaagccctaattgttttgaaattggcccaatatgattttggacaattaagaattgggccgagtttgtaaaaaaccaaaaaatgagccggtccatccttttgaaagtttttgtttgtttgtgggaaaacatgccaagatcttttagcttccggagtgagtactacaaaagtagtctcttgaaattacttagattcatcatcaccatatatagtttatgtgttattgtcccattttactactcatattccaccatcaaattctttttctacttttttttcttcttttttttctttctttttattatcaattctatttctactaaagcatgagattcatggtataatctttcgtccattttcgaaattctttcgttaaatctttcacttaatctacattcttctttgtcgacattctcgctcttactctaaaatcaatagagatacataattacgatgatattgtattttccatgtgattctgttaaatacgaatttgaaggtgacaacaaaaatgaccccacggtcgggtataaacgttgttgatgaccccataaccaggtataaacatcaatgacctaacagctgagtatgataaccgctttgaccttacaaatgggtataaacgtcgatgatgatccgacagctacatataaagccattattttgaagatatctattaccacacatgttaatacgtatgagcttttcagggaaggtattaggagatggagaaccgttgatcgtccgagaccgacagtcaaaaagaaaattccaagatattaaaatcaagaagatatgattctagaagaatctagaagatgattgataaatgttaatattatagtttaagaaattttacattatctctaaatagattaattctatttatgttataccttaatttagaaaacttaaatctattccatttctataaaaagaatttaacttgtatttttattattacgagagtctaatatactttttcctaaataactttgtgttcttactctcatcgatttatcaaaaatcttgtgaattaatgctcaaacagtcactcccatggcacaagccgtttcactcatatcgaactcgaaccactcttatccgatctagctttcaacaacatacaaatgtaatatcagagtggtttgtgatttaaaaatatattcataaacatgttttcttcagtaaaaaacaatagtgtggctttcacttgtgagaaatggttgtgggatgttttcatctgtggttctttggaaatttcttctctttaatggtcccatgatgtgtgtccgtcgattattgatcgtttctatatctagtaattaccatttcaaaagtttttatattgtcaaagattcttccaaggtccctttttatggtaagttcatgttcatcatctggttttgttcatcatgatcaattgttttttagtaccaactaccaacatccatattttgttagcattttgtacttcttctccaataaataacgagaaatagaacatgaaaaatcctcgaaaatcatatttcagtttttgtacagaatagttacatggaagagatattcatgtgatgatgttaacaacaaggaagaatcagaactgttcaagaagcttgtgtatgacatcgttggaaaacaaatcaatgctcacattgaaaaattagaaaataataatttaatataaactaagggaaaattaacactagtaccacaatttctcaaattgtttatgtttctaccactttctctttttattttttttcacttctaccatattatgtatatgttaaggacaaaattgcgctcctttttatgtgtctaaaattgggggacaacgtatgtaaaatttggggacaactagtaaataatcaaatccacacttttattttatttttgtatgttcatttaactggttcttgttcctcgattttaattcatttttcttagattttaatgctcccaatttctaagtacagtctttcatattgtttgatatttatattttgtttgattgttgtcctcgaatagggtttattaaaatcattcactgattttttaatatgtcccttctgttttagtccttagatgtttgtctccaaatattacactttaactgacacaaaaaattaccacaactgcggaaggcaaaacctgtttttttataccacaatggtaggaattgaaagagattatgagatgtggtagaaatgatttttttttggtggaaagtggtaaagttgactaaattccttaagtcaaaaccaaattaatctacttagagcattcttatcggtaatactaaagagagtgtctacaaatatttacttttaagtaaattttcacattttatttgcttaaaatattaaaattaatcaagagttgttacatagaggcttctcactaaagacaatgtctttaatgtctttttagagacacatgtctttcccattttgtattaaattattattatcattttcttttattcattttttttatttgaagacccccttcttttttatgcgatgatgatggtcttagtatgaggtcttgtgaagaagagtcggaaaaaaatatctatgcacgcttcgacacttgacccaaagcggacaatatcatagtatataattagagtcttctctccatttaaggtgtccacatcagtaaaacaataaatagatcaaatcaaaatgtatcaaaaatatcattcaattcaaatttatttataataaatgaaaataattttaaatacataacaaaagagttaagtataataaatgaataataataatattatatacaatatatgaagtatttatcactataatatttttaatttaaatattgtatttgaatgtaatacaaactttatgcatttataaagtatcgaaataggtaaaacaagcacaagataagagtattagatccaaaatatgcataaaaaaaaataagagtaaattattaaaatactgaaatcgagtgacaagattaaaatcaaaaccgagaatttatggaataacgaagataaagatacaaaatgatactaacatttccattatagataacaaaataaattgactaacacttttttatttatagatataaaagattatagtttagaaaagacagaaacattttaaaaggttacaattgagttttctgtagtagaaaaaacttcaaaatcattctagaaaaactcaatattatacactaaaagagaaaatgaataactatgtgtcatgttattctttagttgtacaacgaaacacaataatgtgcaatatgtgcaacatatcttacattaacgcgtaatcaatattaagatccaagcaaaaaatacgcttaaaaattcacaatttggtcaaaaattcagtagaattataacattttaagtttttgagaaaaaatgttggattacaacactatattgatatctaaaaaaagaaaaaacatgaacgctagatcacgatgaaaggattaaaatagcattgataatgttatgcatagacatgaacaataaggaccacattcttttggttggatgtatcaatatcgttgaataacatattaatttgtttttttatctaaacattatattaggtcatgaaatccttaaaacataaatataagatgctattatctgagatttttcatatattaacatagtataatattttattattacaatattttatattattacaatattacatataaattatttttaaatttaagtcatttaacattatcgcaactattatcatttttagcatttttattgtttcttaccactacaaatgtcaatactacgtttaaccacttcaattcatatatagtatttatatatataaaattacaaaatataatttaatagaattatttacttattcatttttaagggcacattgttcaataaataaaatctataaagtttagctttacattttttttaaactaattataattttaaaacttatgaagttttgaaaattataaattgaattttacaagaaatttaaatattataaatatataaaaaatatattaattcgagacgatatactacgggagaaattctagatataacaatcaaaaatttcacccgtcgtataagtttaaatattataaatatttaaacttattataaagaatcgagatgtattttaaaaaaattaaagttttaagtgtatttgttttgttaatattgttaattttttttagtatttaagattgtataattatattatgatttttaattttaagattttttccgtaatataccatcccatgttattatccacccaaacccgtctcacaatataatcccgtcccgtaaaattaaacataattttgtcattttcttataaatttcaaatatttataaaaattgaaactttaaaataaatttaatatcgatatgaatattgttttctggaatttttaaactattacaattaaacatataatttacataatattttttaaaataatctacagattctataatcaatatgtaaacgatattagactttacagatcttttagtaacttcaccttaattatgatagaccttacaaacaaataaacgtaacaaaaaatagacactaaaaagatctcaacaacaaatctaaacaataaataaataaataaatatatttatatatatatatatatctttaaattataaaaaatcacataaatatctttgggattcaaattttaataattatttgaacaatttttctaaactacatcaaaaccaaatatattgaagataaaaaatacaaacaggaaatatattaatttaaaagatacaaaatatttaacaagaaattgtgttattttttgttcaacgaattcgatataaaatcttcaaaatgatccgatattgattcttattaaattgaaattgtaaattgactctataaaaatattattaaaaagaaaaagaacagtttgatttttagttatcacgggacggatttatatggcgtgatgggtttagaggagacgagtttacatggtatgacgggtttggatgagacgagtttatatggtgctatgagtttagatgggacaaatttggataccacaggtgtactcctaaaattaacaatcaaattacaactatacaatactaaacaaaacaaacaataataacataacaaatacaatttcaattttaaatttttagttacaaaaaaatacataaaatcaacattatagtatctatactattaagagagaatgatgagcagtaaatttccaagccacataagccattttttaatttcacgttacaggaaaaaaaaaagacaattaagggtataagcgtcattaaccatgcgttttcgagccgacccgagccgcgtcctgattcgatccatttggcagacgcgcggatcctgattcaaaaataatgggcctcgattcggtttcttctttggcgtttttatcacagttggcccatttgcactcttaaaattcatttcttgctcaatattttgcctcctctccaagatattcactgcaaagtgaagatattctgcaaatcacaaccaattagggaagattcctatattctattgagatagtatatttagttatgatttcatatacctaaaaatctggtgtcgctctcgggtttcagaactaagtcctaaccgtataaatacacaagcaatctcatcaattctaaagcatcacataatcaatgactttacctttaggtttaacgtatcttagtgatgtcaagcctttcaaaacgaattggtgtgtccgagtcaagatccttcatctgtggaggcaaaccaaagatgcatcaagagaaacgttagatgtcattatatgtgatgaaaatgtatgatagaatgctattgattaaatatatgaatctatatatatttcggtttgaaacatttaacatgttcttatgtgtttttgtttatttggttttgatatagggatctaagatgcatatcaccattagaaagcattatattggcaagtttcacaggtcaataaaggtcggtgattggaagatcattgataacttcactttgagtcctttgactggcaagtacaagatatcgagtttgacctatcgaatggcctttaaccataacacagatgtgattaaatgtgatcctgtatcggatagtgtttttcttgatctagcagattttgaaggggttaagaccgagagttatgatgagaatgttctaattggtacgtattttctaaattccctatcattcttttaactcaaacaaacaagtgttatggattttaatattaacagagtatcctttacaatggcagacatattaggtcaagtggtcagagtgggaaaagtggatgagattatggctcaaaacaaaccaaacaaaaaactagagtttcaaataagagatgccaggcaagtcttctcaattattttcatataatttttgattcataagaactatattttcaaacaagtaatattgaaatcgtttgttactatattgaagcaatgaacgtttgccttgtactttgtggggtgtgtttgctgagaaagtatttagtgctttaaaaagtataaagcatgatgagaagacagtggttctgatacgctatgctaaaatcaataattttaaaggtaatcagtcattgctgttctgttaaaatgtctaaagtataaataatggatgtatatgtgcatgtcttagttaacatatattgtctaattctgttaactaggtgagattagtattacaagtgcttttgatgtttcggaagtcataatcaatccagttcatgttccggaggttgaactgttcgtgaaatcgtaagtgcaaaatatattttgaccttctttgttttgtttaaattcacaaacatgttaaccagacaaatgcttatttgcagactcccaagtgatggtcttgctctcactattcaagataattatgtgaatcgtgacttaattaaggtgaaataagataatttttttgattatcctgccaaaacgattgttgatttacttcatgggagagacgtaagtatatttccactaattcctaaattactgtgtttagtttaagtacctataattgtgattgtattgtaaatcaggttgggcaatggagaatacttggttccatttttgccattgataccgattggggatggttctattttggatgtcctaaatgtaacagaaaaactgagctggttaaagaatcaaccagcactggtaagatggtcaagacacctatgaaacctaagttctggtgtgacaaatgtcaagagagcatcactaatgtggaggcaaggtaataatgttttctattactcttttatcttgtacaatataacaaaattgtttctattggtatacagaaaatataaaggtttataagtgtatattaattatatatgtacaatacattttactccaggtacaagcttcatgttcgtgtaatggaccagacagctgaaattaaactcatggtgtttgaaaataatgcaaccaagcttattgggaaatcttcagaagagttagtagatggacaatatgaagaggtattaaatatatactgtcattcaagtattagctatatgtctatggtagaatgaagagtactaatgtgagacatgtctatagattaaggatcctacgatcatatctgatgtcatcacaaatttgtgtggaaagacatttcattttctggtcagtgttgagaaagccaatatttatggtggtaaagatatttacaaagttacaaaggtgcattttggaacagacatagccaaagaagaatcaggtttgcttgaagacactcagtatgatccatcaacaattgggtctgaggaacaggtatgatcatattcaccttaatacaatttgttatgcttattaagtgttttgtactcatagaccaaattatatttctcaattttgtgagttagggtcaattgatgttaattaatagcagcgaaaactgttctgatgctacaaataatgaactgtctactccttcatctaagcgtggttcagctgagttgtctgatatggctgatcaatcgagtactactaagaagttatgctctagggttaactcagaaaatggagatgatgagattggaaccaatgtgataatagaaaatgctgatgaggttaaagttatttcagatgatgctggaagtctactgatagaaggagtagttaaagagattgagccccaaacctcaaaagctaaaggatcaaccaaagtgaagacagaatgatacaaggaataaaattagttatatgttttcacagtttttttttggttttggatttaataaaagtcagatttttctgacttcgtttatgtttttcaataagtattaagaacattttcaattggtgtgctgctttatacatttacatgtattgctatttgttttgagagattttatttctggttttcactatctttgttctactatatatttatactctttatcctaactctattttcttattgaatagcaaagaactggtttcgaaattatactgaaacagatgaaaacatcaaaagatctttggaattttatagttaatatacttgcatggtatattaaataatttttgaaaagtaagatgtgatatatcagaaatataattggtatatctgaatttttaaaaataaaccaaatcaatggatcttgaaaccctcaaaagaagctgtctaaattcaaaaaagtaatcattcattggcgaaaatttgaaattcatttctgatataattattttcgaaaaaataagaagttacgtttattggaaagatcaatagattctctccttatctcattcatcttccacacaagaaataacagtagagaagaaaactagtttttcttcaatgtcaaacttcaagaacttctctgatttgcgtcctaaaaaaacaaaatggtttgtctttgttaagctactgaggttgtggaattggcctcctaattacttcggggaagaacctactatgattttagttgatgaaaaggtatgaaacttctatttacagttttgatttctataattgttgttatttaccggatctcttgaatataaacatccatgaaagatttgatgagattttatatatgatctcagggacatcgattcgatgcattgtctcctctacatgcatacaaagaagaaatgatttctacactaagagaaggacaatgatatctactctcaaactttgaagtggttgtagctaacactaatgaaagattctcttctcatgtgttccaaattaagtttttacgaaagactacaatggaacatgttgctcctaagataagatgtcatttcattgagtgttttgatttctatcggatcaagaattcagctcctagttgttggtgagtattttagtagttattttccagattttagagtagagaatttggcttacagatataaaatttaaacttgaatctttgttattatcaatttacagatgcaatgggagtcatcgaatcagtatctcccattgggaagatacctttggttgttagagagtgggaaagtgactttgcatcgagataccttactttcacaattaaagatactctgtaagtttttatactttctatactattaacagagatagttaggacttttggaatatttactgagttcacttcatattataggcaccaatacatgaaatgtgttgctgtaggaagttcttgtgaagagtttgaaagaaaatggtataagaaaataagtgatcctaattttaagatggagcctgtgatgattattctgcatttttggaaaattttagagtttcaaggttagtttcttattacttcttagtctgatttttctcgagatcatgacatttatgattttcaaattcgtgtgattgtttaacaggaaatccatgcttgataaatgtttatggttgttcaaaggttcacattgatccaaatttccgaggaatcaacaagaacaactatctgtaatctacagccttattcttaagcatcgtttattccatatgtattatatatagatattaactttgtttgtttttggtatctgtttcgtaggcttaactttacaggatcagatgatgaagatgatgacattttcatggagagtgtggagtccaatttctaagttatcgatttacaatttgaattatgagaaaacaattgtgctatgctttatgaactatgtttattttcttctattataagttttatttcctgtgactactttatattattttgcttatgtttgcttatgtttaccaacttctagcatgaaatggattacaacccatgataactaaaatgacaagagtaaaagaagaatcatattaccttaatgcagtttgctatcttctccgacttcaaattcctaaaattatagtaagacaacaatgttagtatatttactaaattgtttagattaaatactgaataattcgtttgggatctaaaacataagcaaccattatttatatgtctactgaatccaaatattttatcatcattatctacttaacatatcagcaatcattagcaaagagacatttctatttttttgattggctacagaatcggttagcaaataattatatattgactaaaggatttgaacggttatattatatggaaacctttcatatagattcactgaatcgtttcaacttttctctccattcaatatatatatataagacaaagattaggttaacttcagtcaatctatcctctctctgaaatctgtatcaaaccattcaaacttccaatggccgacacaaactatatccgtgacttaagtttacacaggaacaatcatgtcctatacgtgaaaatcttaagcatctgggacaatcagtctatgatctttggaactcctactaccatgatcctctatgatgtgaaggtttgtgcgtaaacaatctttttggtttcttattttggtttttggtttctattatagtaaaaagaattttatatgtttgtctttttattcagggaaccagaatcgacactagagtaccttggggggattatttgaacaatttcaagcctagcctatttgaaggaaagtggtattacattgctgacttccgattgaagagagcaacttcaatacctaagtactcatcatttaattatgaaatcgagtttatgtggcacacaaaaatgtggcctgtaagtgatagatctgatgaaagttctctccaattcatccatgctgatgaaattgaatctgaatctgaggattatgtaactggtagtctaagacttatttatatagtttatgctttcttgcaattgtatttcctttgtactaagatttataagtatctgtttgctctgctgttattgttagatgctattggagtcatatcaagtgtctcaactgaggcgaggtttccatatgtctgtcgtgaaggggaaacagactatgaggccagatatgtgacatttaccatcagagataatctgtaagttaacaagtaatatgtatattgatattaaaattcgttagtaacagacatatatttgtattatggtaaatttgtattttggttggttgtagtgataggatcataacatgtgttgctagagggagtgcgtgtgagtcgtttctgacaaagttttatcgacttattggtatgaaaacttataactacgagccaatcactacagtcctccggttctttagagcctctaattttaaaggttagtgaaaattcgtgaatatgttagtcacattcctttatgatgtgagacgctgtgacctataactaatcaccagaattctttacaaatgttctaggatctaaggccttaatcagtgagcatgggtgttcaaggatcttcattgaagaatcttttccagactttgatgtaactgtatacatgtatgtgaaagacattagataaattgtttttgttaattagatactaactattcaagtcaaaatgacatctttttatatttttgttacagcaattggtttgcatgtgaagatgatgggtctgttgaagggaagattgagtattttgttgagaactaatccaagagtcagattcatcttcccaatgatttgtagaagcaatttacattgctgttaaaaatcaaacttattatttctaagttgattttggttttatctgatgaactatggttggaatgtttgtttgaattatcatacattgtgttctttttttattttatggtttcagtttccagttatcctattttatgttgcaatttacatgtttattttcactatgttttgtattttctttaagcatgtaagactcataagcgtttaagtttcaaatttctgttaaaaatattaaatttccggttattttattttggttataacttagttcatatttacagagcattttcttatataatctaagagttattagtatctaaccttagatggaaatgatgagttccactctttagctcttcttctgtaaaaaaggaaaaatatgttaataaattagtaaatttaattcaagttctattacataaaaattaaaattacaatacattgaaacctccaatacaagacaaaattcaaattacctatatagtttcaatatgtatatactctttccataataatatatgatatcttaactaaaatattcttagaatatactctctaatatattaagttcgtataaataacaaacttggcgattacacttaaaaatagatattttaaaatattattaatatttaatcaatatataacgtttcagtttctcgattcttggatgttaaagaactgttttctcaatgattgcaactcttcctctaatataaactagccaattccaactttgtgtttacagtttgattttagttttttttgagtcttcctctaaaataaactagcacggcttatcaatctcaatggagatgatgaaccttttatctgacataggaaaccctaatttataattttgtaatttttatgtagtataatcgaattgatgcaactattcaagaaggcatcattcagtggaactacaaggatgtactcaaagagggtttttggtattacatgtccgactttcaagttgtggttaataccatgcctgttagatactcattctgttcaaaacagatcaagtttctgagaggaacaaacatgtggcctgttccttctctttcaacaagtagattttttgagtttgtggctccgattgatgttaagaatgctgcaccgcaagatatggattttctatttggtaatctcttattttctatttgatatcatttattacactgttttctataacttattagaaacccttacatttcgaaagtatatcattttagacaatatagtttgtgtctaatagcgacactagtgtgtaacatttatctgaacttacactatatttgttgtatcagatgcagtaagtattattataagggtttctaacagtaggagattcccatttgtctgtcgtcaaagagagacatattatcaaacaagatatgtgaaattcacgattgcggacaacatgtaaatcttttcttaaggaacaatattgtagtctatttctactcttagaagataatcattaataatgtcgttagtgatgatattgagttttctttctagggaaaaaaagataaggtgtattgctgttggacagatgtgtgagtggtttgtgaaccactggtcaaagagaatcagtttgattacttacaattatgaaccaattgtcgctgttctccaaaactggagaatcacaaattatcatggtcattactttgaatttgacttctaaataatactaaagattatgtcttcattataatcttaacatgtttttttaattttacaggtaagaatgttctccacagtgagtttggcttttcaaagctatacatcaatcctaaatctaaagaaattgatattccaaattacctgtaagtatctatattttggctttttagaaactttaattgttaacattactaattcccaagatgattttgaaatgtagccatggatacatgattgaagatgatgaggacgatataatgatggaggtcgttgagaagaactaaagctatgatgaagtgtatgtttggtttttttttttataaagttaaactctgttctttttgtttctttctttctctcttaattttttgattctattatattttgtaatggtttaagaatgttttattttatgaatcttaatctatgtgaaaaacaaaacgttgataacttagttcttataaaaaaaacaagaatttaccttaaaataagtagtcattgggttatagacttgagagaattcataccaagaaagactctcccaatctcaattatttcctttagtgctcgagttctgtaaaaaaaaaaaaaagatcttcatagattagaaaatttagataaagttctctttaagaaaacaaaataacaaagtttataaactgtttccatataaataggtgatatcttaatcagtttagttaaataacataaaagcaaatattctgtcaatcttttctggccggagaacaaagaaaagagcacataactaggttaacatattatagaaaagttatttctcataaggttttgagtgtttagctatcacgttttcactggtatcttttctttgttctccatgtctaaaaggaaaaaaattcttgaaactcaattttcagatttgtctaatgttattcaaaacacaactaataagcagtttagacatgaagaaacttctgaaaatacacccccgtcattcaatggaccaagtgtgaagaattcagtgccagttagttctgtttttaatagggttctaagtgatattacaaatcaaagagttcatacaccaagcattagccaaacgctggcactttggagtcatgtttaacatcaaaaacaagttaagtttactgatcaatctatattatatatttaagctttataggttttcctatataacataactacatttaacaagatttatttatgaaatgttaacaatgccagcaggaatcgatctttcaagtcctattcaatcatatcgaaggcatttaacatatgatgataatctaccttcagatgcaaaatgattctcagtatccgtttagtaagtcatggtttacaacttggtgagtctcatgttgtttaatactatctaacattttgttatattcaggaaatcatagaccaaattccaacctaagttcttcattcacaacaactaatttggaacaaggagagacatcaaacccgtctaaagataaaagattgtttagaaactttaccaatgacattccaattaagataaatgacatcacacattgtagacgaggagacagaaccgatgatcccattcttcctgaatttctgcaatcaggaaatcaaatgaatttaagagaatgtgacagtaatggagaaacatatggtaaatattaagcataactataatgatttccttattcttcactgttaaaataaactatagtatgtgatgtataatgaacttttcttattttataggttcagagtctgatatatatgatgatcttgaaaatggttttcaagatgaagttgattatgattcatataccaactacaaacaaaaaggtgttaagattactgaactggttaaaaaaaattatgagtttttggatgatcttgagaagagtttgcttgccactttcggcctgggatgtcgtacctctaatgaaaatatagaggaacattcttacggtgtgttatattcaataaactttgtaaatgaattacaataaactttttgcaaatgctaaatcaaggttgtaacaaatctacaagctctaatgacatctatgtttcacaggaaaagaacatgaagactttgagcgtcaatttaatatgaattcaagaaaaaacaaaacaggtatgaatatatattagtactctgtgtatcctctatatttaacattttatgatttcaaatgcagtatacattgatcatggtgatcctatttacgcatgtgaatattgtggagctataatgtggcatggtgagcgtattgaaaagacagtcaagaataagaagtccaagtttacatcatgttgtttgcaaggtcaagtgaagttaccttttcttaaaaattcaccagaattactttatgcattgccaaccaatgacgatgaaatcagtagacattttagagaaaatatcagggcttacaatatgatattttattttacatcacttggtggtgatacagaaaatagtgttagagccagtggtggtcctcaaatgttccagattcacagagagaattaccataggatagggagtttgaaaccagacaatgatatacctccaaagttcatgcagttatatattgtagacacagagaatgaagttgataacagatcggaagcactcaggtgagtccattccttatagtgttactaatgtttttgtatatgacattgatgttgttttaatattggttactgttctaaatttgacttatttgattcttaacagtaatggtgttaatgctgacaagtataaaaagaaagagttgagaaaggaaattattgatgctgtgatcaaattgctaaatagtatcaacccttatgtatcacacttacggactgctagggacaggttcaatgctaatccagaagagactttgcatatgagaatagttagtaaacgggaaaaggatggcagggtgtataatgtaccaacgacatcagaggtagccatgttgattccaggagatttcactatagatatgccaagcagagatatagtagtgcaagagaaatcagggaaactacaaagaattagtgaaattcttccgtgttatcttcctttacaatatcctcttttgttcccttatggtgaagatggattcagaataggcattgagaaacatcaaacagggtctggtaaaaaaacgaagaacaagtgcatatctataaggcaatggtttgccttcagaattcacaaaagaaaacatgagaagcatattttacttaggtcgagaaggctatggcagcaattcttggtggattcttatacagcaatagaatctaactggcttggttacatcaaacttaaccagactagtttgagggcatataattacaattctgtgcaaaaggcttcagaggaaggaaagagtgatttgaaagatcaaggattagcatgttatttgccagctacttttacaggtggtcctagatatatgaggaacatgtatttggatgcgatggcattgtgtaaacattttgggtttccagattattttatcacattcacgtgcaatccaaagtggccagagctgattaggttttgtggtgagcgaaacttgagagctgatgatagacctgagattatatgcaagatcttaaaaatgaaacttgattctctgatgcttgatttaactaaaaaaaaacctattagggaagacaagtacatgtaagaagtttttaattcgtttcatttactcttatattatttctattattatttttgataactataataatcattatgttttctgtgtaattgcagctatgtatactatagagtttcaaaaaagaggactccctcatgctcatatactaatttggctggattcaaagagtaagttgaccaaagcagagcacattgataaagttatatcagcagagattcctgacaaattgaaagaccctgagctatttgaagtgataaaggaatcgatggttcatggtccttgtggtgtggtgaacccgaaatgtccatgtatggaaaacggaaagtgttcaaagttttatccgaaagatcatgtttaaaaaaccattattgataaagaaggatttccaatatacagaaggcgaagaacagatgactttgttgagaagaaagactttaaatgcgataaccgttatgtcattccttataatagatccctatcactgagatacagagctcacatcaacgtggagtggtgtaaccaatcaggttctgtgaaatacatattcaagtatattcataaaggaccagatcgtgttactgttgttgttgaatcgtctttaaattcgaaaaataaagaaaatggtaaacagaaggacaatgctgatacagatggatcagagacaaagaagaagaatgaagtcgaagactatttcaattgcaggtatgtttaatgcaaaatttaatagtattatttctgtaaaatacatttatttatgttccttatgattgtataattttgcatttcagatatgtttctgcttgcgaagcagcctggagaatattaaaatatcatatacattatagatctacggctgtgatgaagctttcgttccatttgccaggggaacaatttatttattttaaaggcgaatagaaacagtgttaaaccgaagtgatctagatggctccatgttccttgcttggttcgaattaaataaagttagtaagattgctaggaagttgacttatgcagacatccccactagatttacctatgattcaaaagaaaagaaatttaatctcagaaagaaaggttttgctataggaagaataaactatgttcctcgtgatatagaagatggatattatttgagaatactcctcaatgttcaaccaggtccaagatgttttgaagagctaaggacagttaatgatgtgctatataaagagtggaaagatgcttgtgaagcattaggcttattagataatgatcaggaatacattgatgatttaaagagaacaagtttttggagcagtggtgggtatctacgtcagttattcgtaattatgttagatgctctaattagtcctgaaaatgtgtgggctgcaacgtggcaacatctctctgaagatattcaaaacaataaaaggaaatatttcaacagaccaggtaacatctaatatcatttcaaaacctcaattttatctcattttgtttgacaatgcaatattcacataacttgcgttgcttaattgtaactcatttagttatctgtttgtttacagatttaattttgtctgatgaggagaaaaaattatatgctctacaagagatagatcacattttaagaaggaatggtacttcacttacatattataagactatgccacaagtacctagagatcctaggtttgatactaatgtcttgattttggatgagaaagggtatgatcgtgataatttgacagaaaaacatgccaaatggattaagatgcttactccagagcagaagtctatttacgatgacattattggtgcagtgaatgaaaacgttggggtagtagtttttgtttatggatttggaggaacaggtaaaacatttctttcgaaaacactctctgttgcacttaggtcaaagggtgacattgttcttaacgtttcttccagtggtattgcttctctccttttagaaggaggtaggacagctcactctagatttggaattcctcttaatcctaatgagtttactacatgtaatatgaaagttggttcagatagggcaaatttagtcaaagaagcttctctgattatatgggatgaagctccaatgatgagcagatactgttttgagtcattggataggagtttgtcagatatttgtggtaatggtgataacaaaccgtttggtggcaaggttgttgtctttggaggtgatttcagacaagttctaccagtaatccccggtgctgatagggcagacagagttatgtctgcccttaattcatcttacctttggagtcattgtaaagtattgactctgacaaagaatatgcgtctttattcttaaggtttgagtgttagtgaagcgaaagatattaaagagttttcagagtggatattagcagtaggtgatggtagaattgttgagcctaatgatggggaggctttgatcgttattccttctgaatttctgattacgaaagcaaaagatccaatagaagccatatgcacagagatatatggagatattacaaagatacatgaacaaaatgatccaatttttttccaagaaaaagcaatattatgtcccaccaacgaagatgtcaaccaaataaatgagaccatgcttgataacctccaaggttattactaattcagaagcattgatttgtaactttatttacttatataaatagtgtttctatttgctattccttctttaactgtaactaaccaaaattttaattttcaggagaggagtttacattcctaagttcagacagtttagacccagctgacattggtggtaaaaataatccggcattgactcctgactttttgaatagtgttaaagtttcaaggttgcctaaccataagcttcgtctaaagattggttgtcctgtgatgttgctcagaaatattgatcctataggtggtctaatgaatggcacaaggttacgaatcacgcaaatgggtccattcattttgcaagcaatgattctaaccggtgacagagctggtcatttagtattgattccaagattgaagctagcaccatcagacacaaagttgccatttagaatgcgaagaacacaactacctttagctgtttgctttgcaatgactatcaacaaaagccaaggtcaatctttgaaaagagtaggaatttttctacttaggccttgcttttcacacggccaactttatgttgccatatccagagttacatcaaagacaagattaaagattcgattgtggatgatgaaggtaagccacaaaagcaaacaaaaaatgtagttttcaaagaagtttttaagaatctttagtttccatttgttttttacttctgttggatttttatcagagcagttttatatctacaatattcgttgaacatttgctacttcaatctaagaatttacactatcaaatacagattctaaccggtgttacttagattatctatatatcaaccatatcatacaaatgcagacattctacttgcttaaagattaagaaccatgtaccttttcaggattgttgttgtctgagaggtttgtgaagaatagtatcgattctatgactgcaaccatgaaacatccattgtgatgccctccaaacttcagatcaaccgtactgcagtgaaagaacaattctcattattgtattttggcaaattgcataaatctatcaaggaaaacagaacaatcaagattcataattccattaaagtttgtttaccttctcaatatcacattgaacataacaaaaggtaatcagcggaagatgaatcagaattcggacaactccaaacatcaagactccaataaccagattttgatttgatgtccattatcctccgccttctccattgatcaaaatttcaatcgaattcgattagatctgttgaaatagtgtgattaattgatgaaatggtaggatcagatttgttgacatccaaaaaacccagtaaagcttttgaaattagaatcgaattgaaggaacctcaatgtcaaaaaaatgaacttaagctcgacaatttttttttccgatgggagatgattttcaattcagttatatcactctttttttttattggttagtcaaagtgtcattaaacataggttgtttgttttttgttgtctttaattaagtatagatgattttgaaaattttacagaataaaaggtttttacatttaaaaatcacatattgtttttattttatttggtgattttgttttcaacatatagagttcttaattgcaatttataatacacaggaaaaaataaattcagtttcatattataattattcataataaaattaccttattttcattattaataaaataacaaaatgtaataaacaaaatatctctaacccttgacaaacatagattatagtatataatactatactaaattcatatataaaattccttccaataaataaatgcatatcaaaacaaatatactcagaatactataattaataaatctaacatttcaaccatttgctacaatattattatatatacaaaataatgagtgtcaacacatatatattataataaattagtacaatagtttccaaaaatccccgcaacatgtatttatatacagtaagtgttaatcttctttgacacctctaaatgttattcttctttgatacatttaaatgtgtaattttaatacaaagttactaaattacatatgttccacggataaaatttgaaaacaccaaaagtttaaattatataattttcttaaaagcaaaataaaataaaatattattccgtggtatggtctatcacatgtcaaatcttagaagataaaataacacatattagacttactaatatcataattatgactcaataaaaagcatacacaatcttatcgataattattaatcaacacaaacaacaacaaacaacaaattctcttttgtgataaaaaaaataaataaaatatttaatccgcagtataccgcgggtcatatcctagttgtatctaagaatccagcaattattgtatctaaagccaaaaacacaacactatctaaaatccctgttctttgtccttctctttgtccttctccttctcaatttccttctctttagccttctcctttcctttctccttcttttccttcttctccgtttcttctagtttttatcattcaaaagcaatctcataatatttggttttaatatatttcacaaaccatctctgtagaacaaaattcaaaatccttcaaatcccaattgtaatcataaaaactagtcacaatagctattacgagaggctattaagaggacacttttgattttaaatcccaaatgtaattcaaatccgaattgcaatcataaaaaatccaaactgtaatccaattttcatccaaaatctatctatttcaagcaaattaaaggaaaaagggatcaaatcatcaaatctaataagaaattgttatggatcaaaatccaacatagtgcttgggtcgtaaattaagcgagaaacccttattttatttatcttttactatttttctcagaattaaaataaacagataaatatttgtttttttataacgggggctaaatagaaaatgttttgagctgaggaagtcgaaacagataatttcctaaaattctaatccatcataatccggttttgtctgtttggatagggggtccgggtttttttcgggaaaaatatcgtttaatacgcgaactttcaaaaagtgaccatttaatacgtaaacttcgtatatggccatttaatacgtgtaaaaatcgttgaccggccatttcacataaacttaatcgttgaccaggccaaaatccacatgacgttatctgaccgtcgattatagtgaaacgatgtcactattcatctaattataggaacaatccacatgtgaccacacgacgttattaaatgacattttcattgtttcgattatagtgaaacgacgttgtgtagattcctatgttttcatgttttagattcttgtaatcttgaaaaagatcattgttcatgtgttgatgaagctaaggaacaataatcacattttcaaatgggttgatgaagctttgatcaatgagatagagacattgacagcaaggcatggtgaaatcgagaaggagctgaaagagcttagaacagagaggttggagtttgagaagatggtttccgagaaggtggaaatgaacatggagaaggagttgaatgagaaagttgaagaagctttgtctgaagcgaaaacaagcaataagaagatgatgattgtcgtagtgttcgggtgtatgatcatgatcggattctctaaacttgtaggatgaatgtgttaggtgtggttaatgtatgtttgatttaggtttggaaatgtgatcttggtacgtttggtcaatgtatgtttgttgtagctttgtgtttgttcgtttatgtgtttaagtgaatgacaatgcatgtttaagtgaaatcaagaaagcaatatccaaatttgtgaaagcaatatccaaatttaaacattccattcgttcaagtcaacaatcatccaaaagattcaaaataaataagttaagaatacataagtcattgtggtcgaaaaatacatcaaagacaaccacaatataagtaccctatgtcttctaccctagttcttctaagctatgacgatttcttctcaagtttgagtgagtgaaccttgacttggttcaggctgagatagctgcgaagaagaaattgaagcctgcaaaagaagaccaagtgtttgtataatccaacaagagtgaaccaaaatgacataaattatctaaccacaaaccttgtctttcttatggtgtcttgaattatgatcagctgccccacaaactccacaatgcatgattcttttcttaccttttggctgcttcttagtaggagactcattcacaccgttcttccttttcttctcagcctttgtcattttcttgtcttcttcgccttctgttggaggaggtacatacactctcagaccattactctcgggccagaacttagggcccctttgtggaaaaaggccatccgtgtaattcttcctccacattgctgtcctaaaccagcaacatacaaagttctctggttcaagcttcttgtggatgatgacgctatatgcatgctcacatgggatgccacaaatttgccactttatgcaggtacaagtgtaagcctgcaagtctacacggtgaagatctccaccatgcctcacttcatacatcccattggtacttggagacaccttcgcagcagcagcgactttgtgctcaccagctaagaactttgtaacataaggtgtacaaacacctacaaagtaagagaaatatatgctttaaagggagtcaaggctatatcacatgttaagaatctgcaaagaacaaggcttaatagagtagctaacctgtgtgagtatgggattcaacagatcttttagcaatcctcaccatagccattcttctgattgtctctaacatcgcaacaaatggcttctctcttgccttgttcaaagatccgttgaaagactccactgagttgttgtcaacgtcttcacagaagctgcctatcttctggaatgccctaacccaactccttggttttgtcttcatcacagactcatagactttagtgtcatagcaccgtatcttctccaaatgctgcttatactctttctcattgtaagaccaatccaaattccatagcagtggttttatcattgttttactgccataaatcttcttcgagttcccataaatgtgttgtacacacatccggtgctctatcttgggtaactcaagttgaaccgctgctattaaacctgaaacaataagacaaacatttttttttgggaatatctggaagttcaggcctaaaggccctacatctccgagaggcgggacccacaccaggttaaattcatctcctttggagaagagatccctccctacgtgcctcgaacccaacacctccacctggaagatttaccactaggccaacaacaccttggtaataagacaaacattagctaacactaaagagacacaaatgacactaagctaccttttgcctatctgatatcatgatgaagccttcaccatcacttaatctgaagtcttctttcagcagcttcataaaccacacccagttatctgtgttctctactttaacaaccccccaagctataggatatatgcgattgtttgcatccctaccttaggctacaagtaactgtcccttaaccttattctttagaaaacaaccatcaatgcctattagaggcctacaagactccttccatgtccttctaagactgtcaaagcatacatagaacctattgaacatgtctttaccatcatcactcgtgagacattcaacttcaacccgtgaatccttgtttgcttcaagtatctcagccgcataatcccttaatcttgcaaactgatcatcgtactccttctcaatccattgcaaagccttctttctagcagactgacattgattcctagtgacacttatcttccattgttccctaatgatttcttctatctttgtgggcatgtaaaattcaggactatccctaatcttatcaacaaataaccgagctatatgcggcaccttaaacatctcacattctccattagggatacagctatatgtatcaacaaacttcctaatcttccacatattatcactcgggagaattgccgcataaattttccactcacacttagctccaccttttttaccgtcacaaccaacacaaatgaacccaattttatctttatcatacctgtattgctttatattgcatccggttttgagagcgtaatcaacaaccgcctctttgaacgcaacccactgaaaaaactctgcttgtggtacaaataaccatcaccacgccttatatctgtgtcaaatctttcggttttttcttcatcatcactctccgggtacatatcgtggcgaattggtggttcgtcagtccactcctttagcagttcttccatgtgaaactcatctctttcttcagcttcggaatcgacatcaccaacaagatcagggtcgtgaaggactaatgacatcgatcaaagcttctagggtttgggaaaaatcgatttgggtttctagggttcgtcgtgagaaatttgggaatttttcgatttggtttcgatttgttttttggtcttaaacgggttgtaattcgggtttaggctggttctaattagatttatttggttaaatcatcggtttggtatacagtaaaccaattaaacccagagctatggggttttaaatctcgaacttacgattcatggacattaggctctcgaactttcaattagtggggaaataagcgtttaacttctgtttcatgggtatatagatagaggtcaaagatcggggtttatttagccagatatgatagttatcgtggggaaatagaccgtttttctgccaaaaagatataccgttatcggtctggtaacgttaaataacgtcgtgtggattttgacctgattatgattacgtgaaatgaccaatcaacaatttttacatgtatacgaagttcacgtattaaatgactactttttaaaagtttgcgtattaaacgatattttctcgttttttttcccagctctaaccatatatatctcacataaaattagggttacgaagtggaccttttataaatagaggataagagaccatcatcgaaaactcaaagaaaaaggagacactagctaagaaatttaccttgcacttttgatctgtgttctcagtagattattcgtaccaccatggtcggcggggaagttaaaattcttcgcgggtacgaactccgtctcatccggtgcaccgtctctttgccactatcagatcctcctctcgatgaatcccaacccggaacccatccacacgactctcttataaagtcccttttgtcttcaatcgaggctgggaactatcttgaagctttagcctccgaagctactaatctaatactcggagagtacgagttcgacccggttgattccgccgagcgagtttactccgagcttctcaacaaagtcgaatcgttcgtgttgaacgattcttcggatgaaatcgataaggctcggcgttcttttcttgtgatgtgcttagcaatcgcggctgctttttggttcacttgttgcaatttgaccgggtaagttgcctattttaactttgaatttccaatattgagaaattttggactcgaattggattctggttatttgcattgagtcgtttgtttgcttttgaactcttaggtcgacgcaaggatcaacaaaatgttcgttaccgtttagagtaccagaaagtaaggaattggttgaatgggagaactgggctaagattcatctcatgtctgcaggttctgacttgctcgggaagttttctaatctccaggtactatctcccttctgtatcttttcaagttcgttgcctagttttttctccatagtctgtgtgatgattatatcctgcaagggtctaagctgtgtatcctaggcattcatttctgtatttgtttgtagtgaactcttgtgtaacccaaactacttttttctccttgcagcatttagtttttgctagattgctgctgttaaagttgaaagatttgttgtttgagacaagtgcctctgaaacttttcaacttaggagtatttcatggtggcttgtcagagtcttacttattcatcaaagagttcttcacgagccatcttcatctttgtttgagatgttgcaagtttacatggccgaagctctagaccattttggagcattggaaaaagtcgaaagctactggggtgccaagttgctacaagacgaagcttcatccatcacgtcaatcatccatctggaagcatgtgtactgcaatatatatatcgaaggattgacccttttcggtaagttaatggttttgtctttgcctacatcttacatgttttatagctttttgtgacaagattactttgctttcgccttatggttccttttgcggctcatgtagttacgaaattgagcttgtatggcacatgtgtatatagttgttacttttctcatttatgatacctattacataccatttcctactctcctgctttagtatattggtcttgattcggagtaaatttgtcaggttgcagcttgaatctgctaaagcagcagcagggctagagttctctgttactggggctctgggatttcgtactattcaccaagtaagctatgagatatattttgtctgttatatagattcagctatgttattctaatctcctctgatcttgctatataggtagtgccaaaggcacagatggtattggtagccaatactagctcatccaatggggctgtgaggttggcctctgagaaagctgatgttggaccttatggagcttgggaaggtgaaacacctcaagtgtttatgactcccaaactagtgaacaacgagagtgaagctggcacagattcagtgcccttaaaaccagttgaacaggcattgattttggcccagtgccttctaattgaaaggggtagtcggcacgatgcaatgcaaagtaagtgaactcgaattcaaaagtatttgcaatgtttatttctcaaaaccgagcttaggtggaaagatagagaagaacattaacaattctgcctacaattaagtcactaggcattagttgtgactgcaattcaagaaccttgaatagagaagatgcaattgtctactcttgtttctgtgtcgactagtttcactcacttgtgttgaatctaataccctttttttctttctgcaggttgggatatggctccatatattgaggcaattgattctcaaaagtcaacctattttgttgtaagtcttcagtctttcggttaattaaagtgactgaatttaaatgttgatgtatggagctgttcgtttttcattttgtgtcacaacctatccaactaaaacaaactgactgactttttgtccttccaacatagaatagctacggtgtttttgtgacttattgcgtgttcgatgggaatcatctcgatatcgtacaagggaacgcgcccgggatatgatggataagctggtatgtgtgaacagcccttatacttatcaatttggttttctttttggattgtatatcctcctggctcaaacactcattttgtagcattatttcattccgtcctttattgtagctctgatagttttcctttatcaggttggagctattagcaagagcgatcctggagtatcaaatcggatccctttatgctatgcagtgtatcttcctactattcctgctttgagaaagtaggatattctgtttatgtgcatgtatagatatcattttcgggtttctctgcggtcttatttatcgttccattttgattttatcaatagggaatatggtgagcttctggtgagttgtggttatgttggggaagcaatcacaatatttgagagcctggaattgtgggataatctaatttactgctactggtaaactaaattatgaatactgcgtctgtaatggaattcagctttcgcttgttttgattttatgaatatggctttcatcttctgttgcaaaacttattatattcttgtgtaattttagctccatgggaaagaaatcagcggctgtagatctcatcaatgcacggcttcttgaacgcccaaatgacccaagattatggtaatctattctctgatagtactctttgtctgttcttttcctgttgcttatatatcgtaattattaaatggttgtgaagtgccacaattatctactttgaatgtactcttaatctatgtgcggatatttctttgatcactaggaagttattattgtatcataacattaaagtaaatttgatgataaaaattggtttcaggtgttcattgggtgatgttacgatttccgattcctgttatgaaaaagccctggaagtttcaaatgacaaatcagttcgtgctaaggtagtttgagatacaaaacagaaaaatctttttttgtccatctcttttagtccatgctctaattatcttcatcttgcagcgggctcttgctcgaagcgcatacaatcgcggtgattttgagaagtcgaagatactgtggtatgtttgaacattttggttctttccttattaattttttctttctctacaagggaaatggagttatgaacttggcccttcaggctgatttacttgtgagatgtctcatttttttctcctactctagggaggctgcaatggcgttaaattctctgtattcagatggttggtttgctcttggtgctgctgcgttgaaggtattttacttcatcttctcctatagcttagtagcaatatatttccactccaaatctaacttgataaacaattggaattcttgtcatgctggctgagagatatactaatttaacatgtccgacatgatacaataggccagggatcttcagaaagcactggatgcattcactttagctgttcatcttgatcctgacaattggctggcttggaacaacattgctagtctgtaagcatttcagttacactagtctgctctgttggtgctgaaaattaattgttttcttcacgaatgccttactatttaacttggtgtctcactgctcacctactttatgtttcatatactatggatggtgctgaatgtttaataataatctgtgagtgcaggcatatgattaagaaaaagagcaaagaatcattcattgcattcaaagaagtgcttaaattaaagtatctctctatcctttacggtctgttacttgagctaacaaaatcagaattagtaattgaaaaatattttgtatcaacagccgagacagctggcagatatgggagaatttcagccatgtagctatggatgtgggaaatactgatcaggtaaatgcagcaattaattattctactcttgtatatttttttctattttagcttaggatgtaaacgagttggtttcatctttgtgctttttttttttgtttcttccaggcctttgaagctatacaacagataatgagattgacccaaaacaagagtatcagtgttgttttattggaccgtttaatgacagatttggaaaataggaatatatcatacgaatcttcttcaaatgaattaataaagacaaaaccaacaacgaccgaaagactctacatagagttgtttgggaaaattattcagcaggttagcaaaatatctcaaaacttttacatcttttttctttttcttcgtcttatgtgtttctcttttttatagattgtcaaaacagaaagtacatttgaaaactggggattatacgcaagatggagtagaatcaatggagatcttacgatatgtagcgaggcactgttaaaacaagtgcgatcatatctggtaatgattgactagtttgtaaagcttttttttttttttgatatttgagtagcttttgatgacatatcggtaatgctttcagggggtagaaatgtggaaagacaaagagcgtttcaagaagtttgcaagagcatcattggaactttgtagagtgtacatagagatctcagcgtctgtagaaagcaaacgagaactgtttagtgctgagatgcatttgaagaacacaatcaaacaagtaataaactgaacttgtggtcaattacttgcaacattactaagatttttgagcagaataaataaatggcgatatattttcttgtgtttgtgtctaggctagaaagagctttggtgagactgaagaattgaaggagcttgaaagttgccttgaggaggtcagaaatgttacgcagaagtttgaagggactacaaacattaaaacataaaagaacgcagacttgtgagagtttcagatcataatgtaatggttctttttttttctttctgagttttgagtttactttgtatttgaaattcccttttgggatcttcattaccgaaatataacttataaagtgaagggtgaacctttttattcaccaccttttccgtgttaaccaacaaaagcatgcttagttaaatcatgtttaaattaaataataaattaaattataattacaaaacagaaaagaaaaatggaaacaaaaaatcttgttattcaacttacgttgacgttaacgtcatctactcttatttttattttattttaaattttgtttatgactaaatttagcaattgttttaaaagaataagattttaataaaaagaaacaaaatctgacgtcttctcctcccttttttatataaaaaaaagaatatagattaaggttatgtattatttcttttaacccaatttattttttgaagttcttttcaaaagtacgacagattttctaaaggagaaaacaatattttatttttaaattatcaaatccaggttaagtttcaaattttcttatcttcgttaaaaaaatatttttgaaagctggttgtgaaagaatagagacagttaattataattgatacatgtgtgaatttttatattaattcattttgttgtttgttattgaacttgttaatcaggatacgttaagaacaaccttcgaattttgtggttgttaaacaaagatgaactcacaactttacctaaggtaaaccacaaatatcaattaactaaatatatatatatatatatatatatatatataataataatattaataatattagatgattaatgcagttgcaatggagagtaatcatataagtgaagagttttttgtcgaggaaaaagatgacccaataagtgaaaacgaagcttcggccaatgaatttgaagaagaagatgaaatagctaacaacgaggatgacgttgtaactgaagagactgctgctttagaagcaaataatgataatgagaagaaagattaaatacatattagaatggagttcagtgctgatgagattgcatatataacttataaaaagtatggagacaatcatggtttcaatgtaagaaaacaacggaggatgaaaacaagagagaaggtagtaaggcttctttatgtttgctcaaaacatgggtatagaaaagaacctaattgttgtgcttctttgaacactacgagagggtgttgggggatcaacgatataaggaattacttgctgattttaatatgatgcatacctctccggtattatgtgctactgtagagatgttctaacatgcagaggaactgtatacacacaaaagttttagcttgttccagaaacaatacatagttattggtgattatgttgccaacaaggttagtaagtctgagatgatatataaatataaagtatcttatcgtggtgtagcacgtgagcatttggtcaattatgatgttgcaaacgagacaatatgttgtagttgcatgaagtttagttttgctgggattttatgtcgtcattgttggggtcagattcccccacaagcaagaccgagccaaacagtctaagaattacaatcacctcatggttaaacatatgattggcccctagcctagaacaaaacacctcgggaccttattcgatcaaccgtctcagagagagttcaaaaaatggctcgggtgttaatcctatgaacacagcccgagccaatcgtgagaacgctgcggaaaacatctatatcgcctcgggagacagccaactgagtttaatggacagtcatcaagcgcgccccaagccggtacatactgtttgcccgaagccacctctcaaacaccaccgagccgtgagaaacacccgaggcaaagtcttgtaaaaatcattcattctcaaaggatcattttcggtaaaataggatcttttatgggactttcggaaatgataaaggagaatctttgaaaataatgtcgaataaggaaatcttcccaaagccttcggagaataaggaaaatatttttaagacgaatatcctctagaaccgacttaaagataaatggaaatctttcaagaatatcgctagagaggcggtttaacgaccctatataaagcgcctcagggacttcacaaaagggagatctttggatactcacaagaaacacataattatatacctagtgagaactacgaatggcttgatcccttcacaaggtacgtaggcaatccatcacggatgcagcaataccttttaaaaaccctaattctttctctgttcttgatcaaaaccctaatctattttacaagagattagaatctccttcgtaatcgagtctttgatgaaatacctaatgaagaaaaattactagatttgttttccccttttaaacaaatctattgtgtgaatcctttgttcaacataagttcttaaagagaatattttatttcctttaatttatcttacatttacaaaatatattgttgattatttagtatctgggtagtgatatgatgtctttcagtagatttattagagtttatatgatttattttttatttgaaccgacattcggaaatctttagtcaagttgtagggtttttttatattgaaaatcagtttaaatcatacgctttaaatttttgaatgtgaagaaagtttagctattgtttcgaatttagataattggtaataaattcatttccattttcaccaaaaaatagtaatactgaatattttaggtttgttttttttattgtaaaacataccattttcacaaaaaatgaaaataaaatttagtgcagcgaaattttttaatcaactaaagtgtctttttaaaacacactataatttataaacatcaaaattaatatttttaattatttttgaacgatatattagcaattatatataaaattttatatataatttaatataaatgttattctatattcaaaactaaaccaaatatataaaaactttctagttaaagatacatgagagtttcaaaaattatgttattcatatagatgaaggttgtagttaaaatgcgtattcatatgatggaaaaccgtgtgaaaaaaaaaaatatgtaaaaccatatcgtaggcacgcattacacatatcttgcaagttagaaagggcatcattatcagaatttgaaaacgtaaacgaaagcatttataaacgatcaagatctaatatttgtttatacacctaaatctcatcgtgatacaaagcttaatacttgctatttattaaagtaatagtttctctaaattataaactcaatccttttgtttgattattacaaaaaaaaatattctattctttattagtttctggttgagagagccagaaagaggactagaagcggacaacttgtgtccactaccatgaatgctttgttctcaaaatcccgacctttcttcttccccatgcgaaaaatcaacattacggtttattaaatctctcttgaaataaaaagaaacacaaaagaaagtaatgatttttaaatgcaactctgtatgtagactttatgcatgagaactgaagtgacatgttcgtttcattgatcactacatattggaatctaaataaacttttaaagaaaacaattccattaataagattttcttggaaagtgtcaaaatttaagatcatgctcaagatatgttggacctttcgtcttcgtcttcccttataagtagaccaattagatagtgagagttcacttcggagttcagagctgtcttcttcatctcttgtcttgtcctctaaaaaaaaattgctttcttcttgtcgttctattttcttgcttgtaaaccaagttacctatttacattcgtctagatcgatgtcttatcttgaaatggaccaccaattcaaggaaacttcacttcagtttggtgttttcctcatgaatttaacaaccaacactcgaatttggaacgctttgcacaacgaggccgccaattccaccctaatcaagagtgtgcttcaggaaaatactctggtacgtgataacaataatctttttttattttacattcttaaaactgttgatcataaaatatgtaatatctgtactttctctcttcgtagcataatcacatagttttgttttatgcttcagttaagtgatagatagttatgcttatgtttcagacaacagaacaatgcgtttgtgaaagtggtgctcatggttctgaccgtgttacgaatataatccgttccgctaaattgaactcttcacaagaagctgcaatcttgagctgccttaagataaggaactgtaatcacaagcacagtgtgaagctgatatggggacctcctggtactggcaaaacaaagacggtcgctactcttctcttttgccttcttaagctaagctgcaaaacagttgtttgtgctcctacaaacacagctatcgtagaagtaacatcgaggctcttatccttatttaaaacttcttcatcagaacattctacttatgggctaggtaatattgttctctctggaaaccaggctcgaatggggattaaagagaatgatgttcttctcgatgtgtttcttgatgagcgcattggaatactcacaagcctgttttcacctacttctggatggaagcagagattagagtcactaatcgactttcttgagaacacagaggccaagtacgagcattacgtccacttattgaaagaagttgaaaggatgagtgaagaagctgaaaaaaagaagaaaggagctgataagaagccgaaagcaataaagattcttacatttggagagtttgtaaagaagacttttgatggcttcagtgaagagttggagaaaggtatggttgatttatggactcatcttccaaagtctttcattacgtctgaaaatgtgaagagtatggtcacagctcgtaaagctcttcagcgcgtaagatatttcttgaaagagaatttttctagagatgattttaaaaagggaagtttgaaatttgattgcttcaacggagtcagtgcttattgccttcagattctacgtttacttcctgaacgttttgaggtttcagacatgctggaaaacaatgatacaaaaacattttgtctacagaatgcggacataatattctgtacagcctcaggtgctgcggatatgaatccgataaggacaggatcggtcgaccttcttgtggttgatgaggcggctcagcttaaagaatgtgaatcagtggctgctttgcaactttctggacttcgtcatgctgttctaataggagatgagcttcaactgcctgcaatggttcataacgaggtagtctcttaaaactgtctttatattttcttagttatatatactatagttttctaatcttagaataatgtggtagatatgtgaaaaggcgaaattcggaagaagcttgttcgagagattggttctgcttggtcacaacaagcatttgcttaatgttcaatatcgaatgcatccttcgattagtcgtttccctaataaagagttctatggtgggagaatcaaagatgctgctaatgttcaagaaagtatttatcaaaagaggtttcttcaaggaaacatgtttggttccttctcttttatcaatgttggacgtggagaagaagagtttggtgatggacatagtcccaaaaacatggttgaagttgctgtcatttccgaaattatatccaatcttttcaaaggtattatcttttattgattgattagtgagtatcttaatctataatctgttttttcattaattattcttctgactaatttgcttattttttgaaacagtttcaagtgaaagaagaataaagatgagcgttggagtggtttcaccatataaaggtcaggtcagagcaatccaagagagaaccacaaataagtacagctccttatcaggtcttttcactttgaatgttcggtcagtagatgggtttcaaggtggtgaagaagacattatcatcatctctaccgttagaagtaatggtaacgggaaagtgggatttcttaacaaccgtcaaagagctaacgtggcactgactcgagcaagacactgtttatgggtgattggtaacgagacaactttggctctaagtggttcgagttgggcaaaactgataagtgagtctaggacacttggatgtttctacgatgctgctgatgagaagaatctaagagatgccatgaatgaggctttgctcgaggatgtatctacgagttttggttctctttctattaggaatggctatgggaaaagaaatgcttggtagtgttttgtttatcttgttttatgtttttgtatgttttcctatcaaactatctatggtatttttatgatattttatggtatttatggttttcaatttacttaattataaaattcgattcacttttcatgagattacaaattttctaaaccttcttttttattttatttattaagttgtcaaaaataagttttgagttttaacttgggtcattgagtcttcaaaatggagtcgttttgaaccatttgttcccggaaaaatacatgatgcccgctaacttgtttaacactcccaatacgaatgtcggctaaaggccccaaatttatctaagtatgtgctgatcagcctacaatcacaccaccgtggcaacggctccttgcggtaattactggcataacctcccccgcattttctccatagaaaccctctcttctctggtggataatttcaattacttgaggagcagataatatatttctagaagatgctaaaagatatacaaaaaagaaataaaaaagaagaaatacaaataagtcaagttagataagtttgtaaattttgttttaataatagaattaagggtagctaatcttattatataaagtacagttttgaaagttactaactcacgagatcatgacacgtgtcaggtctatcattgagatgttgatatatgtcaaaaaaaagtttctttaaaaaaaaaaaataaacatatttacatatactaatttatatttctatatctaaaaaatttaacttataactttttttaattaaaaaggaaaactaacaataagatgaagggtatagaattaaattgtatttgtattgaaaaattggattgtatttgaattgtatacaatcaaattatattgtattgtattatgataaaaaagatatttaaattgtattgtaaaatcgaatttgtaagattgaaatttagtttaaggaaatactaaattaaatactgaaaaaatatgagttactatttaaaattcaaatatcatcaataagttggagtgtatagaattaaaaagcagtttattatgatgaaagagatagttaaaatgtatagtaaaattgaatgtgtatgattgaaattttatttaattcaaaaattactaaattaaatatcagaaaagtgtgtggatcactatttactattcaaattttaaatattatcgattaatatttgaataaatttatatcttacacccgcctaaataggcgggccttatctagtatctatataaataaggacttatagagacttattccataagactcaagaaagacataagagagaatcgagagaggtttaagagagttgttctaaagacctagagatttagttttgattagtttctaaatcataataaagaaatgttgctctttattctcttttgttcttgaatcacatctcgaatcattcagagactaagtcagagcaagtcggttttgatttgagttggtatcagagcttaagttgcagactctaggcaagacatgtagtacgtgactttcgtaagcaagatggcggacaaaaatccacaaccaaaaaccaaggacctcgcaattccattcccatgttgacatcgacaaactacatggtttgggcgatgtgaatcaaggtgcttctccgagttagtgaagtatgggatgtgatcgatccaggatccgctgatccaaagagaaacgatgtggcgatggtgcttctcttccaatcgatcctgaagccctaatacttcaaatcggtgagcaaaacacgacaaatcaactttgggacaccatcaagtctcgacaccatggagtagactgggtgaaggaagcaaggcttcaacccctaatggcaagtctagacaagttgacgatgagggagacaaacacaattgacgagtttgcgggaaagatctccagtatcgcggctcaatcggcatctctaggggagatgatcgatgaaacaaaagttgtgaataattttttgaagggacttccaagaaccaagttcattcatattgtagcttcctttgaacaagttcttaacctaaagtcgatgggattcaaagacattgttgggaggattaaggcatatgaagatcgggtagggggagaaacccaaagtgaagatcaaggaaaactattcttttcaaattcaaatcctaagtgtggaggctatggaaattagagaggaggttataacaagggagattgtaaccgaggaggctctaaccgcggaagttccggtagaagcagggggctaagaaggtccacctggcgatctcaaggaggaaaaaccggtgatcacaatcagaggcagaagaaggatctatccaaagtgatatgatggagatgcgataacgcgcgtcattatgcatcaagttgtccagagaaaatagcgggacagcaagagacaaacttgcacaagatgcaagaagctgaagcactttacgttcatgaagtggtgtttttgaacgaggataaggtgttccggaagaactataataccaacaatgctagtgtttggtacctcgacaacggagcaagcaaccatatgacgggaaagaaggagttttcttgactctagacaaaaaactcaaaggaagagtgaagtttggtaatgactcatttgtcaacatagtcgggaaaggatccatgttctttgtggtcaagattggagagagaaaagccctcaaagagatctactacacaccgaatttgaaacacaacattataaatcttggacaagcaaccgaaggaggatgtgaagcatacataaaaggagagtcattggtacttaacgatccaagtggaaggctgcttgtaagagttataagatcatcaaatcgttcaaaacaccaatggacataagcaatcctacacgtcttctacaaactgagggactagatgaaggacgtgttgaataactttttgagggacatgctggtggacttgctactgaagctacaaggacatggcatgttcggttaggttatgtaagttttggtgttatgactaacatgctgaagaaggctctggtcgtcggaatgccgcaatctttacacaagatgagtgcatgcgatgcatgtttggccgagaaacaaacaagacactcatttccaaccaaagctacttatcatgcaactcaagcattggaattgattcacatagacttgtgcagacctatctcaccaccaacaatggcgaacaacaggtatgtgtttgtcttgatagacgacttcttaagatacatcgagaagtttaatacaagtgtttagttttcaagttctagaaactatttacttgaaacaacaattttttgtaacataaaattccttaaattttcttttaaaagtggctaaacatagattaatattttattttaaatactaagtatgtttagtataataattcccctagtatttaatttgtataaataaaagatattgtcttataatgtaatatattattacaatattcattatatcaaatgaactcatattgtatagtaatattttgaaatatattattaaaaattaggcttagttcataagacactataaatgtcatttacataaacattggttagttttaagaaaacgagaagccaatatttatttgttccaaaataatactcgttttaatggtgtattatactttcttgcaaagtatatcccatcgattcttgcagcccaagcgcgtagttgaccacatcgaggaataagtcttggtcctgctttgtatacttcaacatcatatgaatactccatgctattgttaggtccttgccttaaaatacaattccattttgttaaattgggtatttcatcatggaatttaattgtaaatggagtggcattaaagtctaatcttttcacgcctagatcatcaacattggagtaacaatgatattcgagaatacgaccaggagcgagtaggttaagaatcactacatgattttttatgcaagcttgatttagcccaaaacatgtaatagtaactaacattaaaaatatggtcactaacattaaaaatatgggattattcatttttggatataaactattattggagtaagaaggatatcaacatgtagtatttataattctcttttttgtgagatattttttcactcttttctttaattactagatactcgttttatgattttagctaaatctaaacataaataagaaccaattaaaacttgtaacggttttagctaaagcttatataataaaataaagttttttgtaaacacaaattttgagaagctaccatttgcctctccttttgacatgtgttttctttttttctcaaatcaaaatatttatacaataatatgatatttattaaatttagttatattattataccaaaatttatatcaaatacactttttcttatatttgtttatttcatttaaaaatatttaatgctaaaataactataaatatatgacatttatgcataaacacaaattcataatcatttttgttacatttatataattgttacaaaatctgcaaaacaaaacaaataactgatattaattgttcttcttttgttatttttatattaatatgttatgaaacacttttttcttattaataatatgtgatattttactattttgtaatagtttttcccctctctcttcttatatttgttttatttatttattattatttaaaaataatttatgctaaaataattttagatataaatataggacagtgatgcataaacagaaattcataatcatttttgttacatttatatatttgttacaagatttgtaaaaaatcaaataactcatattaattaagttattcttttgttatttttctgttcatttgttatgtaacacttttttgcttcttaataatatgtgatattttagtatttttgtaatactttcaatcataaaagaattccaaacttctaattcatggaaaacagtaaaatacccaaaatgatccatatcgaaactgtttataaacttttctagtcaaaataccaaccaagacatgcaagtcgatatcacagttattgtctaacatctttgtgggacaagtggtaggcaaaagaagattctcattttgtgtctaaagccctaaaggtgcaaacaaaagtttagagaaaccagtgccacggaaatgaccaccttcttcagcctatccactagtctcaaaattttttatatccagatcttttcgaaagacgttagcacaaagaacgataaactacaaaatattgaaaattttcctatacattagatatatgttttggcatttcaaccatttaacattataatctaaatccctttggtgataaacatagcaaggttttatatatatagtggtttcattgggctccccaagtggaactgatgaaacacgaggcaatgggtgtgaatgtgacacattgtggatatatatattttctctttagtgaaatttatagtctacaaaaaaatttcaaatctcttaatcggtgttctgaagaaaaaataacgtccgatttcagatctcttaataagttctcacaaaagattatcttttaatcaaaaagcctaaattttcttcaaaaatgatatatatatatatatatatatatttgagaaattcccacaaatagcacactttaaagtgttttggacaaaaatagcattacaaagttctttacacataaatagcactcaaataattatttcagaaatttctaaaagtgacaataataaaaccacaattttatattaaatatattcaaccaaaataaattagaaataaatttaaaatgttatatttgggttctctatttccaagttagggtatatatttcaactatttaaaagaaattttgattcattttaatattagtttatgatattatatttaggtttcctatttctaatttagggtatatattttcaccatttaaaagagatttttcattttaaaattagtttgtagtattatatttggggttttttatttccaatttagggtatatatttccactatttaaaagtttttttattcaatttaatattagattagtgtttgctctcatttttatttgggagattaatacaaatggtaataaaaaactttattatttaattaatttttagaggattaaaaactttatatgctatttttggaagtttcaaaagtatgtgctatttttggaatattaaagttttttagaggtatttgtgtcaatccccctatatctatatatataactcaccataaattttgatatatataaagagtaaaagattcatgagaagaaagatgaaggatcccgtgttaaaataaaaagaaaacatcttaatgaatgttcttaggaacttacattcaacaagatgttggtgattgactttaatgggtatttaaaaaaaaaaaaagctatttacattcaaccaactgatgaagatgttctaagttgttttagagatttatgtttttttcaggtaagattcttggtgtatgcgtaagatagatatcagagtaggatgaattggattttattaagaaatgtaaattgaatcaagagtacaaaggagccttaagatgatgtgcttgagagcatcttcaacctacctctatatttgcctctatactctattatagagatctctgtataactttgttatttgcaaaattgtacttttacttttatttctgattaaaatatataaaactaataatttggattgattttagaagttttggtttaagtatctattttaaaatttgagacttctatatgcaaaagagaaattatataaaatcttaaatatatagtttttttgtttcattccattatatttattttttaaaattatgtaatgtttctgttttctcaataaatatttaatttaaacaataacaagcattcatgaaaataaatgggttaatttgcaacttttgtaatttaaaggtactaatacaaaaaaaaaatagaatctatttgaattattcttttttagaggaaaaaatagagaataccattgaagtaaaactcatctctattatagatttcatctattttatagacaaaaataaggaaatgggttggagatggtctgagtgctactccttagaacttaaaagtaaaggtacgaagaggaagaaatatatacttatgctgatgtgatacattttgtaaaataacaaaacttaatgttacattactaatattcacttatattatgttttaaataattttaatatatctgaagtaatatttcatacctatattccacattgttttatataaaacataacgaatttgtacatatatgacattttgttatatatcataaatatagatgaatagaataaaggtatttattacatgtttcgtaatataaaaacaaacttcggatagcaatacaataatctatatttatatttttaattgactattgtcatatgtatttatctattaatattacaaattgtttttgtggcttctaaagatggtaataaattgattttgtttataaatttgattaattgctaatttcctaaattacctctacctaatttaaatattaatatataattattcattaatttttatatagtacgattttatatttaatttattttgaatttttataaaatacatataattaataaataatagattttttttatatatgatgtgattcaaatttttaaaaacatatatatatatatatatatatatatatatatgatgtgattcatgtagaactttttctttctcaaaaagagaaaataagaaatactagaaaacactagttaataaaactcaattattagggaaaaaaacaacaacttaacttttagtttttggtactcaccaaaaaaacttttagtttttggtgatgacgactagaagcggacaacttgtgtccaccactactatgagtgcattcttctccaagtcccgacctttcttgttccccgagccatttggatttttttttttttttgttaaaaggccttcttccatttggaaaattgacattactagttgacataatctctcgctaaaaaaaaaaagaaaaaaaaactaatgatttaaaatgcatgcacgtaatgtaactctgaatgcagactttatgcatgcaaattcaattcattggtcattacatatttaaattttaaataaattaaaaaagaaaatcgaattatattttcttggaaacggttgaaaatttaagatcattttcaaagtttttttggacccttcgtcttcgtcttcctttttaagtagaccaaactgatagtgagagtttacttcagatttctcttcttcgtctttgttgaatcctctataaagcttagctttctacttgtcaatctattttttcgtgcctactaagccaagttacgtatttaggttatttccaaagtaactcaggttagttcttgctgttgctttgcttcgatgaataatctcacagaaagacgaagggtcatcatggagcagaacgagaaaacaagtctggtcgatagagtattttcttggtctatcaaagatattctcaataaagatttctacaaacaaaaggttttgttctcttctaactcttttctttaatatctatcttattattttgatatttagagattagcgtttctatattttgtaacagttgaagacagtaccggacaagtttagatccgttgatgaatattatcaatgttttgttcctcacctactcattgaagcacataccgagttgttctcaagcctcaaatctgtatcgaaatctccttttgttcaaatacgttctatggagacaaagacgaagcaatcaagtggaagctcatcaaacaagttgttctatgatataacattaaaagccacagagagtttaagtgccaagtaccagccaaaatgtggagatctaattgctttgacaatggataagccaagacggatcaatgacttgaaccctttacttcttgcctatgtattctcttcggatggtgatcttaaaatctctgttcatttgtctagatcgatatcacctcttgagaactatagcttcggtgttttcctaatgactttaacaacaaacactcgaatttggaatgctttgcacaacgaagctgccatatcgactctaaccaagagtgtgcttcaggctaatactgtggtaagtgtttagaaaaaactttctttggcatttttgcatatctgatgactatctgaatctgtttttacaaatattttgcatatgatggatacgttgttcttgatttctctgatgcataatggttgactaatattttatgttacaaacttacaattgactatatatatttatttttcttgtgttctagggtttagaacaatgtttttgttttggtaatgattgagttatattttatgttacaattgagtaatttttgttttgctaattgtgttccaggatttagaacagtgtttttgttttggcaatgatttgagttatattttatgctacaatttagtaaattttgttttgcttgtgttccagggtttagaacaatgtttttgatctggtaatgtttttagtaatattttatgttacatgagtaaattttgttttgcttgtgttacagggtacagaacaatgtttttgttctgaaaatgatgggagatctgaccttgtttttggatataatccggtcaacgaaattgaactcttcccaagaggatgcaatcttgggctgccttgagacaagaaactgtacccataagaacagtgtgaaactgatatggggacctcctggaacaggcaaaacaaagacggtcgcgactcttctctttgcccttctcaaactaaggtgcaagacagttgtgtgtgctcctacaaacacagctattgtacaagttgcatcgaggctcttatccttatttaaggaaaattcgacatcggaaaatgctacttacaggctagggaatatcattttatcaggaaaccgggacagaatggggattcacaagaacgatcatgttcttctcgatgtgtttcttgatgagcgtattggtaagcttggtaaactgttttcaccattttctggatggatgcagagattagagtcactgatacagtttcttgaaaacccggagggtaagtatgagagacatgtctacgagttagaagaagttgaaagaatggaggaagaagctgaaaggcaagaagttgttgttaacattcctacgattggagaattcgtaaagaagaatttcaatagcttaagtgaagaagtggagacatgcatcgttgatttgttcacacatcttcccaaggtttaccttccatatgatgatgtgaagataatgattgcttctcgtcaatctcttcagcgtatcagatatttcttgcgggagaattcttctagggttgatttcgaggaaggaaatttcagatttgattgcttcaaaagactcagtgttgattgcctcaaggctctacgcttacttccaaaacgttttgagattccagacatgttagaaaacgaagatattaggaaattttgtcttcaaaacgcggatattatcctctgcacagcctcgggtgctgcggaaatgaacgtggaaaggacaggaaatgtagaactgcttgtggttgatgaggcggctcagcttaaggaatgtgaatcagttgctgcattgcaacttccgggactgcgtcacgccattttaataggagatgagtttcaattgcctgcaatggttcataatgaggtaagcacttaccttaaataaaaaactttctttttcttagtcatatatgctatagtattgtaatatgggaataatgtggcagatgtgtgaaaaggcgaaattcggaagaagcttgtttgagagattggttttgcttggtcacaacaaacacttgcttgatgttcaatatcgaatgcatccttctattagtcgtttccccaacaaggagttttatggtgggagaatcaaagatgctgaaaatgttaaagaaagcatttatcaaaagaggtttcttcaaggaaacatgtttggctcattttcttttatcaatgttggacgtggaaaagaagagtttggtgatggacatagtcccaaaaacatggttgaagttgctgtggtttctgaaattatatcaaatcttttcaaaggtattaatcttttattgatttgagagtatattaatctgtttttcattattcttataaaaacaaattcgtttattctttgaaacagtttcatgtgaaaggaggatgaaggtgagtgtcggagtggtctcaccttacaaaggacagatgagagcaatccaagagaaaatcggagataagtacagttccttatcaggtcagcaattcactttgaatgttcggtccgtagatggtttccaaggaggagaagaagacattattatcatctccaccgttagaagtaacagtaatggaaaagtggggtttctcaacaaccgtcaaagagctaacgtggcactgactcgagcaagacactgtttatgggtgattgggaacgagacaactttggctctaagtggttcgatttgggcaacactgataagtgagtctaggacacgtggatgtttctatgatgctactgatgagatgaatctaagaaatgccatgaatgaagctttgcttgaggatgtgtcttcgagtcttggatctctttcgattaggaatggccatggaagaagaaatgtgtggtagatttttatatgagcttgttttatgttattctgtgtttcctatcaaaactctgttttggatttttatgatgttttatggtatttatgtttttcaatttttattcgtttcactttgatgaatgttctaaactctgttttttgctttattggttcgttaagttgtgaaagattttgcttaagttttggcttgggtcgttttgaaccattttgattatttcttcttcccttatcaagaacatttaaacggaaaatagcaaattgtttactttttaatttttttttataaaaagagtctaacactatgatatagtgcaagagtaaatatctaaccctaccatgtcctcaatacacatcttaaattcttaattcaattatgcttttagttattatgtctagaagcgagttcatgaatgctatgttcttaaaatcccgacctttcttcttccccatgcaatttggaaaatcaacattacaattgtaactcgtaaacaaaaaaagagaagtaatgatttaaaatggtttaaacaaaaataaatctttacactaatacgttcactttacgcatgcaaagtctcatacatggttcatgatctctacataattcaaattaaattgactaagatagaagaagttcaattaacaagatattcttggaaaatgtttttatttgacatcattttccaaagtctctttggacctttcaccttcttttaccttttaagtttaccgaaactgatagtgagagtcacaccagatctctcttcttcgtctccattgattcttctgcaccaatcctctaaaaaagttacttgtcatgtcttgaaagacaagtaaagccttttcgtaatttctaccgttgctttgatggacactaaagagatacgaaagctcttggaaaaaaacgagcaaacaagtcttttcgctagactatgttcttggtcactcaaagatatcctcaacgaagatctctccaaggaaaaggtctttgatcttttttttttaaccatttcttcagtagctttatcttcagtacttacttatttttgtatttttgtaacagataatgacaataccagacagatttagttccgttgatgaatactctcagtgttttgttcctcatttactcgaggaaacacgaactgagttgttctcgagcttcagatctttatcgaaatctcctgtctcacgaatactttctgtggagacaaaagtgattgaatatagtggaaggtcatcgatcaagtggttccatgatattaaattaatggattatgcagacgataaaaacgaaatatatgagccaaagtgtggagatattattgcactgagtcctctgagtttgacagaagaaaggccaagaatcgatgacttggatcctttacttctaggttacgttttctctgtgtatggtgattctaaaatctctgttcacttctctagatccatttctcagagtgagaaacatacattttgcacaggtgtttttctcattaatataaccacaaacactcgaatttggaacgctttacacaaggatgctgccgattccactctgatccagagtgtccttcaggaagatgcttcggtacgcattaagaaatagtcttgatccaattcaaatttctttgtaacataaaaacagagctctatcttatgcttcaatggagtgatttgtcggttaacttgtcttgcaggctacagaacaatgtttttcttgtgaaaatgatgttgatggttctgattctgaccgtgttgtcgatataatacgttcagcaaaactgaactcttcccaagaagctgcgattttgggtttccttaagacaaggaattgtaaacacaaggagagtgtgaaactgatatggggacctcctggtacaggcaaaacaaagacggtcgcgacacttctctctactcttatgcaactaaagtgcaaaacagttgtatgtgctcctacaaacacaactattgtagcagtagcgtcaaggttattatctttatctaaggaaacaattgtgtgtgctccaaccaactcggctatcgcagaagtagtatcaaggttcgaattctctaccttattctatggaacttctatattagaacgtaccacttacggtatggggaatatagttctatctggaaaccgcgagagaatgggaattacgagcaataaagttcttctcaatgtgttttttaatgaccgcgttagtaaacttggtagactgtttttatctacttgtggatggaagaagaggttagagtcaatcatagattttcttgagaacacagagactaagtacgagcaacatgtaaatgaactagagcttgaaagaatgacagaagatgaaaagaagaaggaagaagttgaagagaggacgatgcaagaagttgtaaacattccaacatttgagagtttgtgaaaaagaagttatatgtcttaactgggaattggggaaggatatggctgatttgagcactcatctgcctaagtctttcatttcatctaaagatgtcaagaatttgatagcagcctgccaagcgcttcaccgtgttagatatttcttgcaggagaattcttctagagatgatttcaagaaaggtggttttagattcaattgcttcaacaaactcatcagtgttgatgcccttcaggctctctgtctacttccaaaatgttttgggatttttggtttagcaaataatgaagatattagaaagttttgtctacaaaatgctgacataatattctgcacagcctcaagtgttgctaatatcaatccggcgaggataggctctgtggaccttcttgtggtagatgagacagctcagcttaaggaatgtgaatcagttgctgcattgcaacttcctggactttgtcatgctcttctaataggagatgagtatcagttgcctgcaatggttcataacgaggaatgcgataaggcgaaattcggaagaagcttgtttgagagattggttttgattggtcatagcaaacatttgcttaatgttcagtatcgaatgcatccttccattagtcgtttccctaataaggagttttatggtgggagaatcactgatgctgcaaatgttcaagaaagcatttacgagaagaggtttcttcaaggaaacatgtttggtactttctcatttatcaatgtgggacgtgggaaagaagagtttggtgatggacatagtcccaaaaacatggttgaagttgctgtcatttccaaaatcatatccaatcttttcaaaggtatttgcattaatatttattgatttgtataatctttttttcattattctttttggttaatttatttgatattgaaacagtttcaagtcaaaggaagcagaagatgagtgtaggagttatttcaccttacaagggacaagtgagagcaatccaagagagagttggtgataagtacaattccttatcagttgatcagcttttcactttgaatgttcaatcggtagatgggtttcaaggaggagaagtagacgttatcatcatctctaccgttagatgtaacgttaacggaaacgtgggatttctcagtaaccgtcaaagagctaacgtggcattgactcgtgcaagacattgtttatgggtgattggtaacgggaccactttggctctaagtggttccatttgggcagaacttataagtgagtctaggacacgtggatgcttctacgatgctgtagatgataagaatctaagagatgccatgagtgatgctttgcttgatgatgtgtcttcgagttttggatctttgtcgattaggaatgggagaagaaatgattggtagaattttttttggtcttcttttatgtttttgctttccctacgaaaactttgcattggatttatgatatttatcagcaaatcttagttatttatttctgatgggcttagctcaagccacagtattaagtattaacactttgaaagagaaccatatttttttactacaatgaagtgatttgcgggtttacttgtcttccaggctacagaacaatgtgtttgttgttggaatcatgttgatgttctattagaataaaacaaaacagatcacaaatctctaaaatcaaatggtttgatcccaacaatttttttttgataccaaaaagggattttgtatcatttctttgggttaggtattgctaaaaataacaacactagttatatactatcatgaatatatatcttacttggtcacaacgtaactcatatgattcaactgaaactaaacaagaaacttaagagcaaaggtgcaaaacataaagacctgttcaacagttcaagactttgagcttgcatatttgatattacaacaaaaggaattaagcacataaacacagtggggtagctacatagtgatgcctaaacccctaatcacaataattttttatgcttaatttcccgagaatccaaacatacgtaagaggaaggtaagaaactaagaaagagtcgtctccacatatctttataaaaaaagagagataagacatgattttgttctcttgctctcttacctccaaaacgtgaagcttgaagctggttgttctagaatatatacctaatcaacaaaccaaacgaaattcgaaccagatttgtgaaccgaaatccggatttattaaactgatgtattttaggagatgatgccaatgtatttcatacttatgatccttggtgggatgaagcatgcttgtatctgtgcaggtcttggtttgctttacaacgttagcagattcttttactttaaaggctattctactcgtgaccctaagaatcgtctcactatcggatttgttcttcatctttcttttatgtttttaacaagttcttggagttcaaaattgtgatgtagtgatactaaattgagttccagcagaatctagtatagttgaaatttaacttaaggaaacaaaactacaaaatttgctatgtatagatgttggaatcctaggcttatgtctctatattatgtgtttcaaactttcaatgacttggtagcagttatgatctctgatgtagcatgatcagtgatttgttttgtttttcttagcttcatgtacttttggttaacaagcctagtttactgttgaagagacttcactctcatggctcagcttttttggttctgtccttctaccttgggaaacttagctttttacatttttgttcatcaactaactttcacatgatgcagacattgaatcttaaaacactttcaagcttgtgtaaaaattaagcctccatctagctggaaagtagcaagagaatgtctagtagttgttatgagaattatggataagaacaagctaagggaattagaacacgagcatgtttgatacgtatctaaattctcaattgattctgcatcaagtaggtgtagtagtagtagtagcctgttgatgaactctctcttcctctgtcttgcaggaaatatgccttcttagcaatgctaggtctggccgtttgcactactcatttgctattaccttacttcgcagctgagcctagcccctctttgtaagtttattgtttgatactttgattaatcttcactttgccatacatcgaggttgctgcttgatttgtggctcgacactttggttttgcaactttaaaactatagtttgtttttatgatttcgtaacatgtgtatactttcttcagataatgctttcaaaatgttgaatatcatagaatttgttaatctactcgctcaaactacaaattcacaaggtgatataacttttgattttggcgtgttacatcagtaagcattagtcctattctaaactaagttaaatttgccacttccattgacaaaataacctctcttgaaactcaaacaattaaaaatcatcaatctttgtaatagcatgattaattataaaataacaagaaaatactacgtatctaaattaatcttgaattatattaacacaatttttctttgctcaccacacaaaaaaatatatataaaaaatcgttttaccaaacaaggcaaataaaaaagatggatcagaaaataggcttggattttctcaaaaaagagaaatcaattcgctcagattgttcagcttcgatcatttggagaaataatcctcacttccatctaattatgtgaaactagttataaaattgattgtatataaataaataaaaaaagggatcagaaaattggcttggaatctctctgaaagagagaaacataaaatcgctccgtataatcagcttcgatcatctggggaaataatcatcacctcccaatcttttttccaataatataaaaactaatcagaacgaaaaaaaactaacatgcaaaaccaagaaaaaacaatttttgatacaaaaaaaacgattagggttcgtagaattaatgaaatgattaggtgatttatataggaacgttggtggctctgaccaaaaaaaagaaaaaacctacatcctccaagaataaaattagggtttatcaagtgggctgttctttgggcctattttgacctttttgcccagtaaaaaaataattgaagatggacctgaaccaacaaagtgtttttcaattttctgtagacgtacgagcctacgaggtggtctatagagaatgattcctcatcgtattactgatcagtgatcaatgtgacaaatgtgtataatgtatatgttataaataaaaggtaaatccaagaatgtataaaattaagtattgcattgtattatgttttttctcattatgtcgaaatgaagaatataacaatgtatgtttgatgactttttcaaacactccttgtataccagtaggggtgggcattggggtaagccgtttgtatttgggtaaaacccaatcggataccaatccttcggataaagaagtttaagatccaatagggtaaatctaaattatcagttcggtttcggttcggttccagtcgggttcagataagtttggtgtagaatttcaggctcttttggaaccgataccagaattttcgatttttaggtaaatatatggattttcgggtaaaattttgggtttcggataaaatttagattttcgaataaaatattcaggtattttcgggtagaggaatttaggacccaatagggtacatcttcgggttcagttttgggtccaattttttgggtcggttccggttcaggtaatcggatccagtttttttttccccagccctaataccattatcgtcaatgtttcctacttacttttggatccgctctcaagtgtgattcaagtaacttatagtttgaatatatatttaaacaatttttactattcagaatctaaatgtaaacattattaatggaagtctaaagattcaaattagtttaattgttgaagtattagagtatctccatcaaggagaaatccatttagtttctcaaacaaaaaaaaatattaatattttattataattttgttttatgattaaatttttattttagtaaaaaaattgaaccaattgaaagtaaagaaatattatgattgcatgtagagagtatctcatagtttctcacttgagaaactttctacattctctcttttttttaattattattttattagtgagaaactcaatattaagatactcctaatggagatggtcttattatctatgccggtttcactttttcgtttgcctaacattactcaaacaaaccaagaagcttaatccctaaataggtctatgcataattaggtttgctattgatagcctccacttagaaccacgtccgtcttcgtagattatcacgtgggttgtccagccaaagatatcactttaagatggttcacattgtatccatggtcaagtcttcatgaattacattagtcccttattatttttgttggtcatcaaaataaaagaaaatttgtaaggttatcatattacctcgagaaatttgagattttgcataattgtttgatatcaatcgatgcaagcaagatttagacgtttcttcaacataaaatttgtagacataaggtgaatttttagactgatgtagataatgctttcgttagcccctatgaatataaaattttaggcacaaatcgtagtcatgagtcaccaaatcaaatgtcggtactcggtacacttggtttgagatctctccctataaaatggaactaagtttacctgttgacaccatcctttctttccgactctacctttgttatccatcttattctattttctaaccaacgacaacaatgacaaaccatcatcaagagtccttaaccacttaccctaaaccgggtccaaccagagaacaagaacaagttgacgaagaaatgatgagcatgcaaatgcaagcgttgaggatcacaaactcattggcttttcccatggttttcaaagctgccttaattggagcttggcgtcctccatacgattgttgcccttgaggagggcgtatggctctcgccttccgagatagcttttggtctccctaccaagcctaccaacccagaggcaccgatgttgatagaccgtatgttacggttactcgtcagccactcgatcttgaaatgtcgtttagttgaaaccggagaaaacaatcgaaccgaaagtacccaaagggtatatgcagcggaaccggtttgcgcttttttcgtaaaccgtggagtcaactcaggttctctcatgtcccagttcatgttgctccaaagccaagtctttttcaaaacttggtacgttatacgtacctaaatatttgcaaatcagccaaattagtagttgatcctcatttgtattaaaccggttaataacctctttactaaaccaatatgcgataaaggtactctatatatacacgtactttcaatgaacaatagaagatttatgttacaggacacatctgaaggatgtgatacacgaagaaaaagatgcattcagttctgcccatggcatgggactctacgaatacgttgtacggacgaacaattcgctgctatatttaaccaggcaatgtcagattcctctaccatgatcatgacgaagattttagaagtttacaaaggattaaaagatgtaaatactttagttgatattggaggaggacttggcaccattctaaatcttgtcatttcgtccaagtatcctcaaattaagggtatcaatttcgatctagccgcagttttagccactgctccttcttatcccggtacatcatttgatcaattctgacaagttgaaaattgatttaattttatttagtcttaccaaaattaatttttaggagttgagcatgtacccggagatatgtttatagacgttccaaaaggagatgcaatcttcatgagggtaagttatatacatatacatacgttatacatatacatacgtatcttgaatggaaaattttatgattactataatttacaaactaaaattgtttacgtagcggatattacgtgactggaacgacaaagattgtgtaaagatattaacaaattgttggaagagtcttccggaaaagggaaaagttataatagttgacatggttgcaccatcagaaccaaagagtgacgacattttctctaaggttgtctttggtacggacatgttgatgttaacacaatgttcgtgtggtaaagtgaggtcttttgctcagtttgaagctttagcctctgcttcaggttttcataaatgtgaagtaagtggtcttgcttatacatattctgttatcgaattccacaaatagattcagagtgtttaccaaaacaaaaagaagcaataatatgatttcgtgggaggaaattatgaactaaaaatgtttttcttcaatggtattttaattgtgtgtgataaatatttgttgtattggttgtttgtatttcactcaagattgtgttgatcgtttaatgtcaacaaaatataataattctgaatttctgatgatcaatgtaaaaattgttttcccttgtactttatactaaatcattgataataaataaaaattatatttaaattaaacaatacaaaaaaatccgaaaaaaccacggcgtagcgcggatgatcacctagtaattgataaaaatggagtgtttgttggaagcccatataacaatatttgatccgttttttaaggtttataagaattaatgtaacgattaggtctctttatatacgaacgctgatggttttgagtttgactgacaaaaaaaataaaaaaaccttaattctcagaaaacaaatttaggctttcttaagtgggcttttatttcggcctgtttcacatttttggcctaataagtaaataactgatttttttcatattacgaggtgatggtctatagatacttttttttttttttttttttttgcaaattagagaatgaatcctcatcgtattacggaattgtattatggttcttttagttatgtcgaaacaaagaatacaacatacatatcgattaagtgtgaacataagtacataacaatgtataacattaactacgacattgtcttatgattttttcgtcatgtcgacatgaagcatacatcatttcctacatatagattgtttatatagaggtaaaagatacgattgaatgtaaattggaagtggttccttttcctataccagtatcgtcagtgtttcctacttacttgtgaatctgacatcacgtgtggttcaagtaacttgattgtaaactcgaagttttactattcaaatttaaaactatatatagtatattagttgtgatattaccagtgccgactcttggggtgtgctgggtgtgccagagcaccgggtcccattttctaaacattttttattttaaggtcctttaattttccataattgcaaattaggacataagtttaaaaatattaaataattaattcttgttcttagttcttgttttctaaatttaggattgaattttttcataagcgaaactaactaatctatttgtctatgacaacaaaaactaaagccacatggtttgatccaaaagaattcgtccaatgctctccttcatgctctagttataatactagattgaatgccataaagctgtaacactatgtataatgattgatttattctttcttttttgatcaaagtttctaattatcattaataagaaagatattacaaaacagaaagcagagcgttcttcgccaaaaaatccgcttggcgattaagagccctaagaatgaaattaaaggtgcagacagtaaaattagaagatagaagcaggatatcgtgtagaatctcatgaagttccttctggtggatcttcaaattgagagtttggactgaattcatcgaatctgaagtgaagaagaggttttgaagtgccgattccaccgcaactctaacagcggcgagagttgccattgcttcggctaacaaaggtgagccgacaaaggaggtggagcctgagccttccaagagggtggtgccgtgtgggtctttgagaacccagccaaatccaggattaccattttccttccatgaatttcgatttatttaacatcatattttcaccttctaaacactagaaatcatcttctctccatttgtcctaataattcaacataaaattttaattttaacgtgttcaatagttttttaaaataaaattcaatactctatctcattattttctttcattgaaaaataaaaatatattagtttatcttaaacaattgatgtcaaataattatgaagaaataaaaaatcttataaatccaaacctccaataaaagaattacacgtttcactatccaaataaattaatccagtagataatttcttgctcatttcaagtgtgttgcggccgggtgcgtgcatactcgcacacaacctcctcctttcgacgaccactcatggtactagtggtctccaattttgccattttgtttttttcacaccctcattatatatatattaaaatgctcattgctcgtagtttaaagcccacataaattctctagtaatcaattggaaggatgataaagaaatagtttgagtataaggaagatgtttaattgaatttaagtttggtttggaataagagcttcggagaaatgtacataagttttctcaaagaagtaaagatcttacataacgatgacatgtaaacatttgagcttcaaatacaatgatcattatattgttttgcagattggcgattgcattgaattagaaaccaaaaaaaaatatatatatatatatatgttctttacttcatttgtatggtccacttttagatcctttacttcatcgtgctctctacttttggaatttcctttgcttttctcctcttcatctactacatagaatcaaaaatgaaaacatcttttttttactcaatatttactcgtactgaccttgtcttttaatctctttgtattactaagtttatgcttcatgtgacaaaaaaaaaacaaagatataatagactgcctatttctgtatattttcaggtgatcatattcttatttcaggtgaaagagaaggagaaacacaattttcaaccacaaaaaatacttatccgtaattcttatattcgacaaaatatttgttacactaccactaatctgataatcatatattacagtttttgttttttgggtatgaatcatatattattgtttttaggttaatgttacgacatctaaaacctaaaaagcatattggatatatactaatggatcatttgtctagttcaatattttctcaaaaaaatatgatttgtgtgaatcttggtggattttaacatatgtaactaagcaaaattttgcagcaatttagtgagataattagaaaacactaaaactttgaattgatatctcgcttcacattcaaatgtgaaaacatatattttttactatttaaaacattaatcgaatttacacgttttcaactgaaaaataatttcattctatgctataaattaaacttgtcgaaaatatagctaggtacaacgaaacatcacaaatatacataaagaaaaaatcccagaaaaaaacattttgaaagtttttaatgtgattttccctatactaaattaatttagcatttaatgattgttttgtaggaattttatctagctaaaatgttcttacctagtagttagaaaagcatactagctggatcacttttgaaaatgtaatttttttggtaagcgttatgaatggtagaaattagttgagttatgttttcgaaacataaatattaatttgtaagggtgattcaactaaattagtttattagttacattgattaatatgtgtgaatataatgaaccataactatgaaaacatcccagcgaataaaaatgagaaaatttgatcccaaattacaagtaggtgagggcaagtttaccctgactaagttacgtaccgtgattataattctctcatgtggcaagatatttatttggttaagtcgttctaacaaagaagagaaagccaaattaattagttggaggacaaaacatgaccttgctaaaacgaaaggtatatgacccacacacaataacatattcatagagatatgtcgtatcttaccatagttctcctataaaagtagacaaagctgccattacgaaaccaatcaaaaccaacgcgaaaacctgcgttttattcttcttgtaattggtctcaaggtacataacacaatggaaatgacatctggatcgttaggcaatgggatcccagaagcgatgggacaaaaccgcgggaatattaaacgttgcctcgagaagtatattgagaatggcagaagggtgatgaaattgaacgagttgatggatgaaatggaaattgttatcaatgatgtaacacaacgaaggcgagtcatggaaggcgatcttggcaagatcttgtgcttcactcaggtcataccatactcttttgatttttcaatcttctttttggtaggaagtcatatgatcgactcaatcatttcaagaagttttcttcatttataaaaggtcttaaatggaaattatagtattggaaaatgtttattttatattatttatattattttacaaataattatttacttaaaaaaacaaattaaattttaaacaaaatttatcaaaattatagtattggaaaaaacgatatctcatgaataacagtaccattttcatttctttggtacggtaaataacatttttttcttgatcaataaaaagaaaaccagtaactcatgatgaataataattatactaaaatgtacaaggttagaaattattgaaaaccataaaattaaagtattatagacaattgtataccaaaactcaaactaattttgtttaatggttattctagagggaaaactatttcgttctcttcatttgtgtattcactatatagagatatgcataagaaaaagaaaatggtgagctaaattttagcattataaatgtgaattaatctgtaggaggcagtggtaattcctccgaacgtagcgttcgcagtaagaggaaccccgggaaattggcaatacgtgaaagttaactcttccaatctctcggtagaagctctatcgagcacgcaatatctcaaacttaaagagtttctcttcgacgagaattggtctctcctctttttctttaccaaaatatattttccttttcttgatctcatcatgatatctaactagaagtttgtaaacagggcaaacgatgaaaatgcattggaggttgattttggagcgctggatttcactcttccttggctttcgttgtcatcttcaataggaaacggcctgagttttgtgtcctcgaagctcggagggcgtttaaacgataacccgcaatctctcgtggactacttgttgtcacttgagcatcaaggagaggttagttttgtccccatcgtatccatttcttcattgttttttgtttccttgtgtaaatgacgttttcgtatttgtgttttcgtatgaaaagaattaagaaaataaaaccttagatttctgttgacattaatatagatagatatctaatgtaccaaaaattcaaaattttcatttaaaatactcctatttagaaaatattataaagatgtgaagtagtactacatatacgaccctagtaatgggaacatttcataaactttaggattgttagttttggaataccaaatgtattatgtagcatttcttaaaataatttcccaaacatttattttccttttataataatagtatttgcttaaatttaaatttgtaaaacaatttaagtttgtaagacattgtagcctaaatcagttctatctcaatgttgttatataattttcagaagcttatgatgaatgagactcttaacacggctagaaagcttgagatgagtttgattttggcagatgttttcctatcggagctgcctaaggacacacctttccaagcctttgaactcaggttaaacctttaataatttacattgctatatcgtatagtgatattaccacaatatgttttgttgcagtaactcagcaagtcgtgagattgcaacaaaattgagacacgtttggccttgttgcattttgaacgttgcaaattcatatttgttgctagtcgctgggtttgttaagcggtttaattttgagttcaaaccgaaaacaggtttaaggaatgtggttttgagaaaggatggggagaaagcgcagggagagtaaaggagacaatgagaatcttgtcggagattcttcaagcccctgatcctcaaaacattgatcgattcttcgcaagggttcctagaatctttaacgttgtcatcttctcggttcacggctactttggtcaaaccgatgttctaggtttgcctgatactggcggtcaagtcgtttacattcttgaccaagttaaagcccttgaagatgaattgcttcaaagaattaactctcaaggccttaatttcaaacctcagattcttgttgtaagttatctttctttctatttaaactgagtcttgaattcttgatcatgaatatttttcaaattttgtagtacttttcaaactagaacttgttacatggtattttgtaatatcatctttgtttccttggctaatacgatattgatgttgcacattttatttaggtaacacgattaatcccagacgctaaaaaaactaaatgcaaccaagagttggaacctattttcggaacgaaatattcgaatattcttcgaattccatttgtaacagaaaatgggattttacgtcgttgggtttcccgctttgatatctacccatacctagaaagattcactaaggtaaaatcatatataagaatggtagatttttttttccaacaattatattttctatgttttattctcaagatatttcattatgaaactataaaatattatgagtaggatgcaacaacaaagatattggatattttggaaggaaaacctgacctaataatcgggaactatacggatggaaacttggtggcatcactcatggctaataagcttggaattactcaggttctttacctttttactttggtaaatttagaccaataaattactcattcttatgtcgaaacaaatttattgaaatgaaagaaaaaaaatctaggcaactattgcacatgccttggagaagactaaatatgaagattcagatatcaagtggaaagagtttgatcctaaatatcatttctcatctcaatttacggcagacttaatctctatgaactctgccgatttcatcatagctagcacttatcaagaaattgctggaaggtattttaactaatttcatttagacaatataatgcatttgttccatttgatcaaaaccagcctggtttgacactatcctgttttttttcaatcttgttagcaaagagagggctggacaatacgagagccacatgagcttcacagtcccggggctatacagagttgtctccggcattaatgtcttcgatccgaggttcaacatcgcagctcctggcgcggatgactctatctatttcccttttaccgcacaagaccggagattcaccaagttctacacttccattgatgaactcttgtatagccaaagtgagaatgacgaacacatgtacgtctctattccctattttacttttccacaatactacacggtctcaagaagcgttatagattgttatagaatatgaaactaactattaatattatttgtaagtaaatgttatagaatgttatctatgtgtattaaaaaatactaaccgatatttttcttgtgaacaaaagcggttatttagtggacaagaagaaaccgatcattttctcaatggcaaggcttgatgttgtcaaaaacctaaccggattaactgagtggtatgccaagaacaagaggctacgagacttggtgaacctcgtgatcgtaggaggattcttcgacgcttctaagtctaaagacagggaagagatctcagagatcaagaagatgcattctctgattgagaaataccaactcaagggtcaatttagatggatcacagctcaaacagatcgaacaagaaacggtgaactttaccgatctatcgcggatacaagaggtgcttttgtgcagcctgcacattatgaagcctttggtcttactgtcattgaagccatgagctgtggtttggtcacattcgccacgaaccaaggcggtcctgctgagattattgtggatggtgtctctggtttccacattgacccgagcaatggagaagaatcaagtgataagattgcggatttctttgagaaatccggtatggatcctgattattggaatatgttttcgaatgaagggctacaacgcataaacgaatggtaatagttcaagtcattcggatagtattagcttccaaatttcaagcttaaagcatcacaatacatgatcatatatgtgcagctatacatggaagatatatgcaaacaaagtgataaacatggggagtacatatagctactggagacatttgaacaaagatcagaaactggccaaacaaagatatatccattccttctacaatcttcaataccgaaatttggtaaaactattagtcttttatttttgttttcactttgtgtgaatgttttttttaaccatttgtttaaaacaggtgaaaactatacccatattgagtgatattcctgagcctcctcctcttcctccaaagcctttggtgaaaccatcagcatcaaaagggtaagttaatttacatttagaatcactacggattatataagagtaatatattcatgttataaatttgtaaattttcttcatatttttacagctcgaagcgaacacagccgcgattgagtttcaggttgtttggtgcttaagctctcttctgaacaagtgagctaatatcaggaaaatctgaaacatgttgatgcttcagttatatttatacgcattgtagtttcatgtgtaagatactcaagttgtgtgattgcaagtataataaagggaaaaagaaacacaatgtatttgatttttaccattgattcttagtaggttttgtatgatattactgatgttaacatgttgaagttgaaggatttgttatcttgaagctcaagaaatctgggattcaagtattatggaaccaaacacgaggattaaccgagacgagattaacatttagctgttgcaatacctcttataaagcacttccgattaacataaaatgtcagagaagaagcaccataccagaattagttagaacaagcaaaaccgtgatttgaagattttggtcaaaattgaatccaaaaggataatcaataaaacttagatggcggcttggctatctgggacaacatttatcccaaggctctcatcatcgaatgcaaccgattgtgatagagaagctgtcagtttcgccgccttgtaactttttgagcttcttaggatatcttgcaggctccctgataacctgttcacaagacgagtaaaagagttcatgacagtagtctgtgcagctaagattgaaaataataataccctgaaccggttacttacctatttgttcctccaacgagattatttcctgttgaaaccaagaatcgaaattagcatatctggttgagagaacgtgtgatcaaagttatattcagatcgataaaataccttgcttcatatacatagaagaagtcacatcactatcattgtctgatgaactatctgatggtgcattagaggagtcactcgaagtcgtcttagattcatcctcctcagcatccttgaagaaattcgttgtgatcttgttcgccgtgactgagttagagattttcttcacaacttccttcttgttgttgacattcaccttactattgttcactgtaaccgaattagagcttttcttcacggcttccttcttgttgtttactgtgcctttcatggatgcatcagaaagatcaacctttgatccattgcgatcattcttagcccttgactgcaattgactagtacctgaactagatggttgaactctaccttttgtctctttcactttcattgagccatcaatggaaccaccaggatgcaaatcaaggcttttcttctcctttttagatttagctccaccagtcacttggtcttccttgttagtaccaccaacaatatcgtccttttggctagaaccaaaattgtctcccatatcagcgttctctttcagtacttgcatggaacggttaagatc

SEQ ID NO: 778 - DNA, 7150 bp, Arabidopsis thaliana
ctcagtattatcggtgacctcactaatctttttcaaaggcgaagcattgctctcagtagttttcttagctggcgtgaatgatgcatctgtgtcttttgggttgttgatgggagaagcctcctcctgagcaacattgtttacctcaactgacaaaacttgggcttcctccacaatgttcaaagagtctttcttctttgttttcttgcttgacttcttcccacttttttccagattttcctcagcttctttcttttgctgcaaagaatctactacttgggcctcctccacaatgttcaaagagtctttcttcttcgatctcttgcttgatttcttcccacttttctccatattctcctcaacttcggtcctttgctgcaaagaatctaatacatttctgatatcattaacatgtccttctccatctacaactttgataggttcaacattctgtgcaccaaaatctaccagagtatcttctttagctggggtcttggcttttcttgaacttttcttcttagtagacttcacagatttagcctgatcagcatctatttcaactctttcctgaggaactttatgttcagtatccgtaactttacctatgtggtccagcgttttcgattcctggacaaaggcatgtggggtgctcgccataccagcaacttgtagattactcgcagcttgtatttcgtctgcaccgataagtgtggcctctccacttcccaccttgtcaaccaatatgtcagccatctcatttccttccaaaaaaaaaaaaatcaccagttatgagttgataataactccctgtgacattaacatatgattgaaaagaagaactatcttcgaccaagaatccaatttaccattttgtcttaccattttgtttgatgtgatcttttgagctcttcattcgctttctcttcttctctgtagctggaccagttgtcaaactactgctagcttccaactggttatccacgttagtcaccacttcagcagtttgaagattatcgacagcacttggagccaatcttcttccctcacctctctcatcaacttgtgacgtaatctgcccatctacaagttttgaagcaggtggaagatccttctcttggtcaatcatgactatatcagcagtttttcctcccttttcaagatctacagaaattcagaaatgttatcaagggtaagcataccataactctccataacaactaataaaggatcccaaaactcaatcatagttaaaaaaagaaaattcaccttgttctattgttcccgtaagatcatctactttttctagagcttctttaatagtttgattgtctggtacttccttcaccacaccaccggtatgcccatctacaagctctgaattaacagtgagatttttctcttccagtagcctttccgtaacagaagtttgctgcttctctcccatactaaggccgcttttctcgccgctttcaatatctatacaacatcagatattacaaccaaaggtaattcaactgacactctccaaaaacatctgaaaaatcactacattccatattaaccaaaacagagggtacctgctctcgtaacaacatcatctagcttttctcttggtgaaactgcacaagattgagagacaacttcaccctttacttttccacataactcggtagtagcagcaacagcagatggactgagatcaaccttagatttctttggacttgtattcccacccggacttataattctcctcttccttgtcttctcctcaactacttcggtttccaaaccttctccactagtcaaatccttattattcatatcatctacaagtactaaaccatttgcaatctcttccttcttctcaaccaactcaaggttttgatcagcagccattatagcatacatcttacccttgtcaactctaatggcatcaatatacataaaccagtttctactaatgccatcaaaagccttacacacatgcaaagaatctgagaaatgataaaactttcttcgtcttttaaccttgaaacaaaattaaaccaatcatcaattatacttgttcctaacaacaaaaatgtatgaacaaagcagcaaaatccaattaccttcaaggcagagatttgaatttctccaatttctgggaaaacttgtttatgctccttgagtaatctgtctataaaccaaaccaaaaaaaaaaaaaatgatcagagaaactcagtaataataagtttaagtagtagatttcagtggagtatgaagagatttagtaagccgattcagtgataaatttgagaagagagacctttgaaatcggagatgatttcatctttatgcacatgtaaaatgagacgagtgtcgaggttggtttctacaaagacgcatcgaatctccggtgaggaatttgtttcgcgattagccattatttcgaaacgagactggaattggaaggagacgagcgaagaagaagaagaagaagaagaagaagagagcgtttgggagaaagaaaaaaggataaaacttttctgtttaatggtccagccctatataagcccaaaaacttttcagcaaaaccctatttaagcccaaaactttctcgttttgattgaatgcgaaagtggaattgtagcaaatttaggatggtacagttctcctcttgaaacaaatgctcatatcctcttgaatcctcctcgtctcacgcgacttattatcactcaactccttgatgatcaatttttaggtcaaacaatcgctcattgtgttaaggattcacttgctaatgataactctcttcgacaaccgtctatgcatgtgaaatatatcaaacaatcgctcatgatttttgtgtctccaagtagtcgccaatatacactatatattagtgtcacactctagtcgcaaatttgtgactattgtgcgaccatcttgttcgggactactcataatagtctcaaattagtcgtaaatagcatacatatttgcgattattataggactcttttggtggttgtgttttcttatattatatctaaacggagagatagaacatttgaatgaagacgaaagtggataaattgataacaaatacagttctccacttcaaacgggttctcacatccgccttgaagccacgaagcttcaggccacgttatttatctcacttcattcctcaactccttcatgaacaagaggtactggttctattgtcgagatttaggtttaaaaatctctgttgacgtttattattttgtttctcactaaaccagaataaaccgaaataataccaaacaatgttttggggatataattccggtacagtgttaaatatgtagattaacttaacttacaagttacagcggtagagttttagaaaaggaaaacatgaatcttatcgattaaaaaaatgaaacaacaaatgatattgtacaactcgtctctatataaattgatgagacatgtcatctgaagaaatctatttcattctcttttcgcttctcttactcttcttttgcaagttagggtttcattaatttttgtttgaaaaacttctactctgccatatggagactgagacgttgagaacaatagaagtctctacgatggtatcaaatcgacctaaaattgtaggggttacgaacacagtcttaatctaccaagaagaagaaattgaagaattgattgaatacgaaagtggaattgtagcaaatttaggatggtacacatctccacttgaaacaaatgctcacatcctcttgaatcctcgtcgtctcacgcgacgtgttctcactcaactccttgatgatcaatttttaggtcaaaaaatcgctcatgatgttaaggattcatttgctaatgataactctcttcgacaacctgttaccgtaaccgtctatgtgacatatatcaaagagaggcgtgtaatttttcctcatggtccgtcgttgttgtcgagaggtgcttccggagaagtgtttcatagattggttgaagaacagagagttgaatctgctgatttggaagaagaagatgagacatgttcgatttgtattgagaagttttcggagagtcatgaagacatcattcgggtgcctgattgtttacatttgtttcaccaaggttgtctattcgagtggcttggtcttcaaaactcgtgtcccttgtgtcgcaaagttccatacgaggaggaggacgaggacgaggacgaggagggttagggtcttggaggtgtcttcttatgtttaggtatagaatttgaagtccatttgatttcttgaggcgtaatcattattatgtaatcagttctgtcttaatgttatgtataaacatttaagatatgttctgtcgtaatgcacaagtatcatgaaagacattattacttttgagttataacaaatgtgaatcaggctactcttttgatgcattgctcaaaagcattattggcacaaagtcccttgagaagatgatctctctgtgtgttccacagaactattgcacaatggattagatcaagtttgctaatttaagcttcttctttctcaatggtttgcatgtatcctatgaactttaataatcttcgatgttgagctttttctttgttatgatcaccagctcaatcccattcagctttcttttgaacctttcgcttttttttattagtactattgtgttgaaacaggtgcttgatgcaaacactttcacaagtctgcttctcacagttgttgcattctagatctgtctacttcacatctcccttgtcactcatcatcaacgcatggagatctacgtatacttcgaaagagctaggcaaacgaagctatgatatcagagttgcacgattcttcttgtttatctgtactttaatcttgttactcaagcctgaatatatatatttgttgattcaagatcagtggacagaccagtattagactatactccttacaacagaatacaaattcaataatagtatttcatacaaccagagcaagttccatcaaggttgcctctctaaattaagcaaacaaacaaaaaatcattcagatatgctccaaatgaacatccaaaagttgaaacgaacaagattcagatggatcatttggatacattaattaatactactatctatacaaacagtggaacaatatattgatccagagcacttgaaaactattttgtatggacaacgcctcttacaaagggagcaactaggtcgagacatatgatggttattcggcagattatatagcattttacctttcaaatacgacgatgtaccgaacttacctttgtataaccaccatgaaccgggatccatgtatttgtccgccccaagcatacagttaatgtgtagggtgacacaacaatactcatcacacatataaaaccttttctttggatctatttctccctcgcaagcttcacaccaataggtcatggtacttgtctccttcccataagaaagagtgagcatatgcttatcatacttatacctcaccttttgaggtaatgtggcacatccaaaacacaaagcaaagtcacactcctcaatgcaattaaatttttcatttgtcaaagaataatttgactctttgcagacactacaatctttccactctcctggtttggatgtcaggaataaaggatgcatatgactttcatggactaatggctctgaaactgtggcgcactgcacgtgtagttggaaatcacattcttctctctcacaccgatagaagaaaccagttgtgattaaccaaggacaagctgaacagcaacgtctaacgccgttgcctcttgctacaaaactgagcatatgtggatgtatcggatgatgtattttgcgagaaagttctgcacatttttcgtggagaacaaaaccacattgcatacaagagtacaagttgccaaaatagattggcgtgatgcacgcttgacacagcctatcctcgtcgtattctctacatgtattctcatcaagtcgcaagtgatgatactgatgaatgaaatgttgtatgattccatcacttatcctcacaaatggcggaatttcttcaatgtcttcttctggctctccctcaagttctacaccatcccacacattgctttgtgtggcacaccttgaatgtgccgcatacgaacaaccgtacttaacgcaagaataacccccgaaatcattttcaatctttctgcgacaaacaccacaaaaccaatttccttgatgaaaagaaggggtaaaagagatacgatggggatggcgggagatccttatgacacgtggtaagtctatgcatcttccatggaccacaaagccacaaggtggacatatatagaaaggagatgttgaataggccaaggcacagacgtcgcaagttaaggaagttgttctcgaaaacagaacaagtgtatgctcatgccacttgggatggtctatagataagaccggtggtttctccacacaagctatattcagagtgaaatcgcaagccgagcaatgataaaagaaagttccgagatcttcgtcgcaacaatagcatttcctctctctaggatatatttcaatattgacaagcagaagtgagtgcttgggatgaagatggtgtttgatctcaactggagcgttgttatgttctttatggttctggccttcgcaagctctgcaaagaaagtgcgtttcgtcgtcttctcccataaaccacaacataaaccagtttttagggagacacgcccacttgttataccttctacacgagacttgttcatcattcatataaattttgtctcttcccaatctgtgtactacttgagggcgtacagaaataagcttctcccactttgaattcatagagctgacgagggtgaatacttgatagatgagtgataggagctccggctccggctcgagattcaatataaccgcaatatagtcttcaaaatctgaatccaaatagatatcggaatccgaatctgtatcattcacgcgatcagtaatgagtgatatgaccttggacagtgcctccggctgggaattcagatccattgagttgaagacagagattatttgacttgtgactgacatgagctccgactccggcttcggcatcgaatccaaatccattgagctcagcagagagattatttcaaagatatgtgacgg

SEQ ID NO: 779 - DNA, 88128 bp, Arabidopsis thaliana
gatcccccaaccgaaacgagtcgtgtcgagagatataaattgagtaacgagtgatatgagcttcgactctgaatccgacgaatccatagagttgccaagagagattatctgagtagtgaatgataggcagagattttgagcatttacaacataacatggagtatatgaaaataattaatgaatcacaagacaatctcaagctgtccgaattcaaagtcaacgatcatcttacccccgtagcttgcggatcgtgcctaggagttttaatttagactaatcaaacgtttcttaatgagggttagattggcgttggcctatgcaacgtgcacttttttactttaaaaaccatttgaaattaggcgtgggctgagtcagaataactgattcaaagcaaagtactctctggaaatatctaatataagtggtaccggcaaagggaagatataaaattgtcaaccgaattacttgtgcatgatcaaaatttatactgtacttactttcaactaaggttgtggactatttagagaaaaaagaaaaacagagaagaaaaagaagacaagaacaaaactttgttttattaaaacagaaacttgttgttattttattaagacaagacacactcttatatacatgttcacataactactctacataaccgttggtaacagttgtaacttctccaacaagttacgtctcttactgcctccttttgtagtcacatgacattcgttgactttacatacaaactaatgaaactataacatatatgatactagataaggcccacctatttaggcgggtataagataccaaaataaatttttatcgatagtatttgaatttgtatagtaatcaatatattttttttgatatttaatttaataattattgttttaaacaaaatttctatcttatgcattctattttaattatacacacttaatcttatcaatgatatttgaattttaaatagtaactgacccttattctatatttaatttaatatctaaaaagaaaagaaaaacaaatgtatatcttaaacattcaattttgtaacacagtttaactatctatgtcatcataataaactcgatttaaattctacacacttcattttaagtttcatatcaaaataatatttatgacatatcaaatctatatcctagatatatgaaagtaattgaaaagtaaattgtttctatatatttagacatataaattagtatatgtaaatttgtttacttttttaaattttcttttttttaagagaataaaaaagttaaatctttaatgacacatgtaaacatctgatcgtttgaattgacacgtggcacgatcctatgaattagtacctttgaaaactatactttatataataagattacaagatttaatcatggactcaattctcaacatgcaatgttaatgaggtttgaacctacattgaacaaagaaagaaagagggttaatttggttgacagttagttttatcctactggaccgaccatactggttatacttctcttcacactatatctctactattcttcctatgtaacaacaacaaaaacaactaatcagattaacacagagttcctaaactaaatattgcacaagttaaagcgtctagagcaggaatgaaagttatacatacacagtgtatgatacacttgttcagatgttgattatctggtcaagtcttgaagaacttaattctgtcccaggagttttgtgaatgggtttcttcgatctcctgtttaccaattgcaagttaaacattcccggtttgcaaaaatagaatcttgagtgtttaagcaccgagttctgagaatgcaactgtgaacactacaaaatttacgaggtttgaacatacaactaatcagataaacaaatgttataaagcatgcaagaaacaaagagttcataacctatattgcacaagtcgttaaagtgtctagagcagggaatgaaagttatacaacatacttgttcagatgttgattctctggtcagatgccctgttttttatgacggatgactcgctcattataatagtcttctcctagcacttctgtcccaggagttttgtgtatgggttcttcaatctcctgtttaacaagttaaaacattcctgatcagaatttgcataaatagaatcttcagtgtttaagcaccgagttctgagaatgcaactgttaacagtcacttccatatagatccaatgagcttgaactatttacaagctaattaaaaacagtacatgtctcatgatatgtccctataggttcaacaaagtaccatataccatatgaagtatatgataatctcatgatatgtctcttacgtgttagaaagtgtctatattcattcaatggtaaaaattcatcaatgtatagagaaagaactaaaactcttttctcatatttctcaatacaaatacatattttctgccgccatgaataccaatagatcaatgaaagttaaagcaaaagcaatatttcgacctcaacataaagggttcgttaacactatctacgccaatctatataacgagaccaaagagtttcttgaagatcaaaacggtgcgataacacttttgagatcgtaccgtggtccacacgtttctccaatcaaattgaaaccacattgcttctctccactttacatctctcatctccttcaacaatccatctcccatactcggttttgtcaagatttgggtgaaaagattgctcataattgtgcttatctcagcggattgcctttaatttttgaaatgttcgtcgtcgtagagttgacccaagaagttctaattacgttgccctctgcctctgttgctgtcccgtcaaaagctgcttcgagtgatgtgttacaaagactggtggaagaacagaaggtagagtcaattgatttggaagaagagaagaagacatgttcgatttgtatggagaacttgaattcggaatcatcatcggaaaacatcattagttgtttacatttgtttcatcaaagttgcatctttgagtcggagagttccgttcgaggaaatatcatgaaaccgtgtgaagccttgaagattaggttacgttacggtttttagatgttaaagattaggttagggtttttagatatgaaatttgtttgatttttttgtatgtattttgcatttgatgtgtttgtgtgagaaattgatccacttgaccggaacaaaccgtagccaattgtcaaactattttgttggtttcggttccaattttctttttttggttaaattccggttattaaaccatatccagtggaccactggtttttatgttttccttttctcggactacattggtttcaaaagaatgtggaacggttttgagagttaaccaatacagagatatgtaatgttccctgacttcagttaatttaaaataaaaattaaatgaaaaacttgaacgcgttttgttaatctaaatttccttttcaatcttaaactcgagcgttaattggttgtgtcctttttattgatttacactaaattcatattttccttttttaaaattcgaccaaattagttatttccctttttcgtcaacaaatcttttatgttttcctttttttttactgagtcggccaaacgtaaaacctatctctctatatatattgatctcttctctttgatttcacaatcttatctcttcatatcaaaagttagggtttgaatcttcttcttcctcttccaccatggatacatatagtaattgggagtccgtagagattactacaacagcaatgatcctaccacaagatcaagggtttagaaacaccgtgttcgtcaatctacacgatgtggtcaacgagttagctgaagatcaaaacggtgtcgtaatatgtctgggaacgttcgcggctccacttatgactaaaatcgaattgaaaccatcatgcctcagttcacaccacatctatcaagaccttgacaagttcatcacacatactgagttttgtcgattgttgagcgaaaggatcgttttggattgtgctcatattccccaaccttttagcgtgtccttttacgtgagagtgacaagagatgttatgttaccgtctattgttgttcggtcgagagatatgtttcaaagattgcttgaggaacaaacaatggaattgactaatttgggagatgaagaagaaaccacttgttcgatttgtatggaggacttttcagagagtcatgatgataacatcattctgttgcctgactgtttccatctgttccatcaaagttgtatctttaagtggcttaagcgtcagaggtcgtgtcctttgtgtcgacgtgtaccgtacgaggaagatcttgaaacagagtgaagccgtctcagagtcttgaaggtagccttagggtttattatgcattactttttctatgtttcagacatttgcttttgatgaattatttgtatgcaattggtaacttttggtacgaaacctaatcttttttgttaatcccgactatgaatatgtaacaacaatttagagttatcaagaagatttgattgatcaaatgaaaatgtaagtataaggatctcaatttctgagtggttatatggaaagacacgaaactttggagtgatcttacgaatctaatccaaaaaaactttccccaattctctgacattatacacataatctgaagttgagatcaaaagagttacacaactgactttacacaaaacaaacatctccccacaaaggatatgagattttcacattgtcaatgttttcttccacctttactctctttttgtaagtcaccatatatttgttctgaaacttgcaaatgaatttcagacactaaatcaaacaaaagcaatgtccagaataaatccagtctttcactgacctttccacgacaaaacggcagagaaaagtcctacattgctaccaactccgagaactagggagaatgcagtgcaacattccacaaccaaaagtaagcttgtaccaatggagtttaataatccaaaaccaaaagtaagcatgtaaccaaaagtaagctgggacaccaacatgcaaataacgttagttcaggtaactacgacacttacaaaacctttagttggacaacacatccatacgctgccataacttgtctatatggtactgcataaacaataagccttggatcagagaatattcaacaaatttcggatgatttcgatgcgaaagcaatgcaaatgaaaaactcggtgtgtgaagcaaaatgatcggctttcaaaacgcaaaacatagacagatggttcatataaaaattcaaaagaggattgtaataccaggtcatgatgagctgtatcaagacacgcataccttcaactcatttgcaaaagtatggactgatccgatactgaagacgccacttaaattggagatccaatgtctagcaccactcttccattctagagtagataaacttacactccatcaattcttattgcagaagcaatggtctctccttcagactgaccaggagttcattgagacccactcacacttatttctctacaataggaagcatactagtctacgttactctcacgaaataagacaacaatgtctccactctctacatatcatattaagaaattggatatattgagtaacatgcaaatcaaaggagcatcaggcactactcgccgcaactttagtgacggttattagcctcttcaaacacatctacaaaagtttgaacgaaaaatttacaactcgaaagcttaaaataaatttccacaaaagaatttttaagtttagacaagaaaagaacagttccaatttgtacaacaccttcaaatgaggactcttaaaaagcctttaagaaaattttgaaactgaggtcttaaccactctctttggagctgcagtcccctagtgaacagaatataaagaagattaagtagagcaagaaaaacaagaaataaaaaattaagacagtccacacacatgtaccctttgaagtctgaaaaaagaaataacacagtttgattcagttaataagatatgttagttagagaaagcagaagcagcttaaaggaattcttaactacctgaaccaacatacttgtgtaaagctcccaacagtttgattgcaagatttcaggtgtcatcagtaacatccttacaaaaatctatcaaatcatgtcccatggatagaaaaagctcttttgtcgtaacgaaattaactgcactgcagtttaacaaacatggatatcaggggctggaaatttctaagtagaaaaaatttcaaaaccgtaagtttcaaaagttagacaccaaagtcatcaactggtgaacaatccataacaagcattcactaaaaaccttgggattccttgtgctctttcatgtttttcaaagctacaaacaagagccacaaatcatcattttgatcagattaataagaaaactcaaagaaaagttactgaaccagctcataacctcttgaaaccaaatctaggaccaactgcttcgtagaattcagtagggtacttcatagcaaacagctcataacctcttgaaaccaaatctaggaccaaaccttaggtggttcaactttcattccttacagatccatctttttttgcctccactagttttcccagtcccaaccttcctactcacaggcctggaaaaacatttcttataaaagatacctggtttaaactgaatatattttcaaccatcacaaataagaaaaattggtaaaaagagttacctctttctgcaagatgccatttactattgcaatcggtatacatatgaaaaagattatagaaaagatagtaacaaaattaaattattttctgtttttgttttgagcttccttttgtgtgtgtttgaatttgttaccattgagtgttttatattatgttttttgttgttgtgaacttgactttgtatatgcgtgttttttgtgtgtgtttaactttgtgaatgcatgttttgttttgtgctctgttttttttgttgtctttgagtttttattgcgtttgagtattttgtgttctgtttttgaggttgtgtgagagagacagagactctaccttaaccttcgggttctcttggctacccaatcgtctccccagtgagttgtctctatagtataagaatccattctcctgaaaccgaaacatttaattagcaacatttttggctttcgcatgtacagaaaacgagtatatatgccttatggaaactagttacattatcatgcaaccaaaaaaggtctacctttccagcatctcctcaaataaatctagagaaaagcgtacattacattacacctcctgtaagttaaaatttagcaatttaagagctcatttcaaaaagaagacaaagccacgaaaacataaagtaaaagcgagaaatagagaatcaaattagctcatgtgaattacataacttgtctatatggtacttcataaccaacaaaatctttaagtggaatgcaaatgaaggaccacttaaaatgatgaagaaccacttaaaatgaactaatcactaaagtaaaacgaaaaatgtgaaaaaacttagaaagaggtaagaaccagtgatgaagagagcaatctttcaagtctttatttccatgcagagagctcaagtttctggttttacatgagaacctactgttttcaatctctttatgacccatttctgcattctaaaaatgaaaagatgaataagatattaataccacaaaggtatgaaagaaggacatagtcaaattacataaacgattataagtgtaccttgacacctttaggtgattcaactctcattccatacaaatccatctttatttgcctccacttggtttcccagtctcaaccatcttgcttacaagctataaattgtcagctttttaaatgaaatctcgagtcgctaactttataacttagttgaccaggggttgacgttagagtcatagtggatttaatataaacaagaaaaagcctgaaaacaaattccttataaagagactatgtttttttttttttcttggttgtgtttgattattttgtgcattcgtgttttgttttctggtttttggttgtgtttaactttatgtaagcgtgtttggtgctctgttttctgttgtgtttgagtgttttgtgttttgtttaggttgtgtgtgtgtgtgtgtgtgtgtgtgtgtgagagagagagagagagagagagagagacactctaccttaactttcgttttctcttggctacccaatcgtctccccagcataaaaatccaatcctcctaaaacggaaacaatgaattagcaacagttttggcttttcccatgtgtataaaaccagtacatgcttagttattttgacgtaagcaccaaatacatattgttaccactagcgaccaaagtttaccctttcagtattatctcctcaaattaatccagaaacaagcacctcctgtgacttacagttgagcaatttaaaagctcatttcaacaggaagacatgaagtaaaagagagaaaacagagaatcaattagcatgtagtcaaattacaagcatccggggcatagggatacacttcactggccatcttgcaagacgttatcaaagtgctccatgttcagagcctgccaagagttttgattgatataagatagctgtaaataaataatttcaactaaaataacaaaccaactacagtaaaaagaaagcttactacatactcttaacttctcaatatcttaacttctttccgcgtataacttttccttaaatcttccctgcttgcacatcaacatgcagatgcaagttaggttaggtacctacgatacttacaaaagcttgagttggacaacacatccatgccttgccataacttgtctatataatacttcataagcagcaaccttggatcggagaaatgatgcgaaaccaatgactcgcatgcaagtgaaggactcagaatgtgaagcaaaatatatgatcaagacactgcatgcctacaagctcaattaaaatggagatcccatgtcttgcacaactcttcaattccgtgttcaatgagcctccattaatatgtagataactgatataaagtggaactgttagcattatagagtagataaacttaccctccatcaatttttattgcagaagcaatgatctcttcttcatattgaccaggaggctggctattaggaacgtctattgagacaagctttcattacattacacttgctgtaagttacagtttagcaatttaagagctcatttcaacaagaagacaaagccacgaaaacataaagtaaaagcgagaaacagagaatcaattagctcatgtgaattccataacttcataaccagcgaaacctataagtggaatgcaaatgaaggacttagaatgtaaagcaaaatgatcagcttgcacaacgcaaaacctagacggatggttcataaacaattcaaaagaggattgctaataccaggccatggtgaggtgtttgtcaagacatgacatcccttcacctcatttgcaaaagttatgtattgatctgatactaaagaagccacttcgaatggaaatccaatgtctctcctcaataccatgttcaacgtcaaaaggagactcaattaatatggagatcatatcaaattatcacttttaacacaaaacattgacatcaagtggtactgtcagcattctagagtagataaactaattatcaggtggctggcgattaagaacgtctattgagacccaaattacacttattttccctacaataggaagcatactaggctacgttaatctcacaaaataagacaaaaatgtttccacataaagacggttttggtgacttgccaacatctaataaaaaaactagaaacatccagataagaacaagaacaagaatcaaaccggagacacagtaatgcaaaacaaaatctacaccggaaacaaagcaacacaaaaacattatatctttgattacctgccaccatgtcctcctctaccgtctatttctctttgctagcatcccatggatttattggtcgaaaatcacgaatcagaatccccttcatcttcgagtctcggaatctgcaattcaaaagattttttgttactatccaacagtcatacacagaaatggtgtatatataacaataaatattcctgactaattttggaataaaaaatctaaaataacagagaattatagaaaagatccatccagcctcttcgaaagttttctttacagcttcagttgacttcaaacgcatctacataagtttgagagactcaatatcaactctaaagcttcaaataaatttccacaaaagaaaatttccaatttgtacatcaccttcgaaggatgactcttaaagcctttaagaagatttgaaactatcgtcttaacaactctgtttggagctgcagtcccctgatgaactgaatatataaacagaatataagtatagtgaaaaagaaaaattccaaaaattaaaataaaccctctaaagtctgcaaacagaaatttttttaattcagttcttaagatatgttcttctaacaaaacaagttagacaaatcaacttaaaggaattcttctccacctgaaccaaaacttgtataaagcacccaaaagtttgactgtatcatttttggtcgttacaaaaatctagtcaaatggacataacaaactatttgtcgtaatgaaaataacttagacactgaactgcagtataaacagggaaatcagaggttggaaagttctaagtagggaaaaaatcagaaccttaagcttctgtccattcgggattcatgacgaaaccatccataacaagccttcactaagaaccttcagattcttgaactctttcagtttttttcaaaagttacaaacaaaagccatgaatcagcattgtgttcagattaatatgaaaggtcaaagaccaagacataccttcttgaaaacaaatccagcaccaactgcttcatagaatgcagtagggcacttcataggagaggctcatgtcaacaaacctaatgataaagaaaacaatagttgagaataaaagagtcttcaatgccgtcaacaaaccttaaagtttttctttccatacctctagagctctagtttctgattttactagagaacctactatttttatcctttaagacccatctacgtagtctaaaacagaaaagaagaataagatatttacaccacaaaggtctgtagaggatagagtcaaattacataaccatttataagtatatttctatgtaccttgacatcttcaggttgttcaacttccattccatatggatccatctttttgcctccaattggtttcccagtcccaacctccttgcttgtaggctataaaatgccatctttataaaataactctccagtcgccccctttataatgttgttgatcaggggttgacgttctagtcttagtggaattaataaaaagagaaggcctgaaaaatagttccttacaaagataacaagattgaagatattttcaaccatcacaaataagaaaaaaatgtaagaaaagttacctctttctggaagattccgttttctgtattgctttctctttcttttgttcagtttcttgtttgagttcttagtatgtgacaattcttgagttcttgtttttgttttgagttttccatttttgtgtgtttgaattttgtttttgttttttttgttttaacttgactttgtcttttgtgtgtgtttgactttgtgtaagcgtgttttgtgctctgttttttgttctgtttgagtttttattccctttgagtgttttgtgttctgtttttgttggtgttgaggttgtgtgtgtaagcgtgttttgtgctctgttttttgttgtgtttgagtttttattccctttgagtgttttgtgttctgtttttgttggtgttgaggttgtgtgtgtgtgtgtgtgtaagagagagcgagagactctaccttatccatccttttctcttctccccaatgatttgtctctacaacacaagaatccattttcctgaaaccgaaacctttcattagcaaacacttttggctatcccatgtgcaaaaattgagtacatgcttaatggaaaaaatgcacttgcttaattacatcatcctaatacatatgttaaacactagcgaccaaagtttacctttccagtatcacctcctaaaataaatctagagaaaagcttacgttacattacacctcttgtaagttacgggttagcaatttaagagttcatttcaacaggaagataaagccacgaaaacatgaagtaaaagagagaagaagagaatcaattagctcatgaattccagaaaaaaaggaaatcataccacaataatatgtagtcaaaacgcgagcatccggggcatatacacttcattggccatcttgcgaaacatcatcgaagtgctccatattcagtagctgccaagagttttgattgttataagaaagctgtaaataagtaagtacaaccaaacgtaagcttgtaccaatggggtttaatcctcaatatctcaattctttccgcatgtaaatttccattgaaccgtccctgcttacacaccaacaggcaaagaaaagttagttcaggtacctctatcaatttttattgcagaagcaatgatctctccttcgtattgtccattaggctggctattaggaatgtctattgactattgagacccaaatcccacttatttctctacaatatgaagcatacgaggctacgttaatctcacaaaataagacagcaatgtctcaacatatctgattaagaaattggattagtgtaccaggcaaataacatagcaaatcaagacggttttcgtgacttgccaacaactaatcacaaaactcgaaacgatttgtaacataagcataagaatcaaacattatcggtgatgcagaacaaatctaaaccaaaaacagagcagcacaaaacctttcacggtgaagctacgaccatcaaactctttcccgatcatctctttcgatagcatcccatgaaagatttattgttcccgaatcagaacccccttgatcttctaattctcgtgatctgtcaaaaccaaaatcacagaactatcaaagagatggtatcgatgaaattacaaaatcgattgacctctgggttcgattaacatatcaattgagaccaatttagtaacaaaggtgagagaataattatcgaattaagaaaacctatcaatcttggaatcagaatgatcggaattgccttgacggaaccctaaatcggagagtcgtgtaactgaccttaatcgcgaacgctctttctagtgtttgatcgtcgattaaggagaatttagggtttgagaagaaggaaaatgatcagagagagatttgttaacgtctattttcttcaaacggtcatttgctaacgttatatagaggaatttgaaaaagaagaacccaggacaaaagaaccgtttaaatagatattcaaattcgagctttgtacacgtcataattgtgagctgcaaagacctaaaccaggattttaaaattttggtttagtaaaggcttgaaattttgttggttaagactaaccatgatgtaacaaccgtgatctcatgaacaaattaagattggttcggtttggtctaaaatgtgatatcaattctaagttctaacccaaatgattggtaaccggaattaacgagtcaaatgggaaattcaactcgtgttgacttagttatttatgagaaagcacttgatgaaggcattgtaaagtgtttgatgatattcctgtgagagagagttatgttttgtatttggtgaagtgggttttgaattgaccatgtttttgagcttatgcgtgcgtttaatgatgctagagatgacagctctgtaggagtcatcatattcaccggcaaggtaaatgctatgaagcaataaaatgtaatagaagaagtatatcagagttaatttgcgtatgtgtatgaacatggaagatggagtctaggaagaaaaatagggatttaggttatgttacttaagtcagtgtgtctagctatgagctttgtgttgagtctcataactgccacagccaaggtcaaatcctacttttgagttgatgacaattgacaaagagttcgattgtattcctctgttttttttttttttttttttttttgctgtttgtgaaacgattgttctggatagtgatattgatggtttaaggaatttggaaaactcttttgaattcttaagtcaccaattctgaaaacttgggaatgttagtcttaacttttctcaagctgtgccggatgggatgctgatatttttctcttcttattaccttgtggaaagttgcactgcattccctagctagttctcggagttggtagcaatgcaggacttttctctgccgttttgtcgtggaaaggtcagtgaaagactgtatttattctggacattgcttttgtttgatttagtgtctgaaattctctaaatagacaagaaacagtgctcgatctcgggtaaatatatatatgctcgttttgttctgattattttgaatgttagcttattgttgacagatttggcgatcttagcaacataagatatcactctctagatacgaccttatgtcagggtatattttctggtagctgagggttaagatagtttcttaaatttgatgcagaaacttgcctgcacaaagaacttttcttagataaattactaagtaagatctctctgtgtcttgtcaaaaatattgtatatatatgagcatttggcatttcagcattgtaattaatgatcatactacgatcctcaaatcatgcctttttagattgatttcgggtttatgaactcgtttacttcacttactgccttttttagatagttgtgttgctgacaattggcaacaatgaagtaaagtgttaatgttttttgagatgaatgagaatagagtttcaatttctttccattgatcacatttaccattgaaagaacattaacttagaagattttttttgtgaaatccttccagagtttcgtcgttacctttctgttttttttttgcgggaaaaatttgacggatattttttggcgggaaaatgtttacaaaaaaattttggcgggaaaatttgttacgaaacttttttgtcgagaaaatttgacggaatgttttttggcggaaaatatttacttttatttattttagttaaattagttatttatatttaatatttaatatttaattaaagtttgtaatgctatttgtgaaattattcgaaagaaatgctgtttttggaaaaaacaaacttttttagtattatttttcttttctttaaatatctggaagttcaagcccaaatgcctacatttctcagaggcgggacccacaccaagttaaattcatctcttttagagaagagatccctcccaacgtgactcgaacccagcacttccaccggggagatttaccgttgggccaacagcacgttggtctttttagtactatttttgtcaatcttttctcttaaaaaatcagaaattaagattttctctctataggagaccgccgctacgagaacggattacaagtctggttctcgacaagactttagaataactctgttctttctattaagctctcagtttgtaatttcttatcaaaaaaatatttcaactttcttaggattaagctgatgtaaaatgttaattttcttttttaatataatatgacattttattcaaaaaaaaaagatacgtgagatattacaatgtgaaatcacctacttgctaacacactaacacactaatactctgtatcacaccattgttctaatgagaaaacccaccccaaagctaaagctttctatgtgttcttctctcaccctctttctacatatatcgtgtgctgcttcaatctctctcacgtccccaactacttaagtacaaggagacatccttaaacctagtgaacaagataacaaaacacaaaggctcctctttgtggtctcaaaagtaacttaacccaatcttaacttgactagagtcaaaaccttagttacttttgatcttcatttgattgtaaacaagttctcatctttacagtacttcatcattattgggtgcaaaacataaaaccgaaaatgtattcctcttgatttcctaaaatgttatttactcttgattttgattgttatcaaatctctttagttttgtaaaaatctttaaaacctaaacaaaactcctctttaaagttgttagcaaaactacctctataagcttatttgattaaaaaaggaaaaagagttttaaccattaaccaaaaatagtccacatgcaatgttctaatttttttctaaactctattctctattcagtattcaacttcttaaaaccgattttgtatgcaattttcttttcttttctttttttccacagtgtgagtgtttaattttttttttcttaaaatgctaactatatgtgtaatttaaagaaaataaaaattgaaatggtaaaagagtcatgtaattttgcaatcatgttaaaaagttaaaaatgttttgactaaaaactgaataacaaaattatcaaccaaaaaccactatacgatataacatttttctataatttttttattaatgaaaatatggatatgttattaatagtattaactaggatttaacccgcggtacaccgaaaggcaagatttttattttatgtattttatatatatatattaatttataatatataatttattggattttcaaatttatattataaaaaaagttcttattactttatattataattaatatagtgggaacatggaaacgtggagagctggagatggatctcccaaaaactaaaggaagcacgtcctgttcgtttgctcatttgtgatatgcatccaaatgatccatctcactaattcatctgaatgctccgatcagagtctgctagattctgatcatttctcggatgagtttattaaaaaccatctaactgatccatctcattgctctattaaattgctccaaatgaatatcaatattcatcttcattcaactagatgatttgaatggagaaacgaacagcacctaaaagtttggttcttcttttctcttgtccatgtcttctccggttcggttatacttaaccggttattatctcatcattgcggggatcaagttaccggattgagaggatcgtatttcaaactgtgcggtcaagagacttgattaagtgatccgatgagtttgagagatgtccatgtcgagttgtcgacgacggtttctttcaagccaaatggagtggattgttgcttggaagacaagtcgcaagaggaagcatgttgtaactttgaacgtagagtgcaaaagaaaaaatgtttgttttcatcaagttgtattttgttggttaaattctggttaattccagttattataactgtgggttaaattcctgttaacatagtaaaccaaattcctgtgagatctaattggttttggaacggtattgagaatgaaccaataaattggtttatagttttatacatacaaatcatatatatgaaagaagctcaactctctccattattttgccacgtcagcattttaagcttttctggagatgacacatcagctttctaatcttccaataaaaacatttcattaatatgattcagcttttattttttacacatcagcttctaattataagtgtcaaatagagtaaacaaaatagctcatgtcagatgggccatatgtgttttagaatctatcagagtgcaatactaataggtcggccccatttcaatgatggcttaatgcttctaaacccaacaacatagtctccctttctgtacatcatatttatttagaaaaaacgttttataccttgtaactgccagaatggatgccacagtagaagctacacagaactgaatcaaggaacaagcagccgtaactgtcttttaaatagatgcacaatttatttcactaaaacatattcacactcccagcttatgggattacaagctttcactactataagctctataaatattcaaacagacattgcttaccacgggacaacatcataaccaatttatttttatatgtgtttcaaacaacatcagtaaatgtttaccaagggacaagtaccataaataggatacaaaaccatcatcatgtataacctatacggaaattaaaaaatgaaaacattagatacaactgaagttcacaatatcgatatatataacattgaatatacactcacttaaattatcactgaggtggtggtatttggaacaactgtcgaaacataaatactattatgagtctaattctattagttatacaataataaataaaaaataaatataaattagcgataaaaacaattaacatatttttattaacaatttttaaaacaaatccaagcgtaatggaaattcatctagtataagtaatgttgcgaaataatgtggaacggtctgatttgttatctgactttagttaattaaaattaaataaaaaatttgacgcgttttgttaatctaaatttcctttttatcaaaaaactgattgtttcctttttatttttatttttactaaattcatgttttccttttcttttcttttttggtcaaagttttcctttccttaatttcctttttcgtcaacaaatttgtttatgatttccttttttccaactgaagcgtcgaaacgtaaaatatctctctatatatatattaattcactcagcctcactttaagtcaatttcatcgatctcttctctttgatttcacaatcttatctcttcatatcaaaagttaggctttgaatcttctttttcttcttcttcttccaccatgaatacatatagtaatttggtgtccgtaaagattactacaacagcaatgatcctaccacaagatcaagggtttagaaacaccgtgttcgtcaatctacaagatgtggtcaacgagttagctgaagatcaaaacggtgtcgtaatgtgtttgggaacgttcgcggctccacttatgactaaaatcgaattgaaaccatcatgtctcagttcacatcacatctatcaagaccttgacgagttcatcacacatactgagttttgtcgattgttgagcgaaaggatcgttttggattgtgctcatattccccaaccttttagtgtgtccttatacgtggaagtgacaagagatgttatgttctcgtctattgctgttaggtcgacagatacgtttcaaagattgcttgaggaacaaacaatggaattgactgatttgggagatgaagaagaaaccacttgttcgatttgtttggaggacttttcggagagtcatgatgataacatcattctgttacctgactgtttccatttgttccatcaaaattgtatctttgagtggcttaagcgtcagaggtcgtgtcctttgtgtcgacgagtaccgtacgaggaagatcttgaaacagagtgaaaccgtcacagagacttgaagctagtcttagggtttatgatgcattacttgtttctatgtttcaaacatttgcttttgatgtattttttgtaaacctaatcttttttgttaatcctttcgaatgaaatgcttgatagagactactattatgtacaacaatttagagttatcaagaagatttgattgatcaaataaaaatgtttaagtacaaggatctcaatttctaactggttatatggaaagacacgaaactttggagtgatcttacgaatctaatccaaaaaaactttccctaatactctgacattatacacataatctgatgttgagatcaaaagagtttacacaactgacttgacacaaacgaacacttcaccacaaaggatatgataattttacattgtcaatgttttcttccacctttactctctttttgtaaggcatgaaccctctcatgttgttcatctcagtcaccgacgattttaactgagagaaagctgatctctcacttcttttgaactccgacactaccacttctgtttcagcgttttctgaagtagaagaagaacattgaagagactgtgtttctgagtatagcttcttcttgccatcttcagaatcatcacaactcattgaagagttgtaatcaccaactacaaaagtttttccaaagagcttaaggctctgtttggtctctgcttctagagacaatgattcctctgtgtgagatgataactcagctgaagaagagttaggtgaatttgaaccaatggaacctaatccatctgagccatgagctgataaaaccgatgttggagatcggttatcttcatcctgaatcagcttggatccggttagttcagcgtataccatctcttttgcatcaggaatcacaagctttctagggtaaggatgcatcggctttctctttggccttggaggcgggatctcaatggactcagagctaacaccaaaatcgcgagcaacctaataagaaaaacttgaattagaccttgcttaacacgaagaggttgaaactttttcatgtataagggtctgcaagaaggcaaaccttagtaaagaacttctgcgcatggcttcgaatctgaactgcagtttttgttccaacatgttctgttccatagaagaaccaacaaaagtcagatctctactcattactagggtccaagtagttttcttatatcttcatcaaacttagattagaatgtgcattagactctctaaagtcagataagcacacacaccttcgattcgtctccaagctctgccatagagtttcaatgcttctacaaacttctcatgctctgcttctgtccatttctctctttgtttagtgatggtataaggctttcttgtctataaacaaaacaaaccctaaattaacctcatatttaagttcaaaaccaatcaagagtaaacaagagattaagaaacaaaattagtaccttgaggtaaaaggcatctgaggaagatataagttcatcagaacataaactctcacaacgttcctataatcacaaagtaagaaaacacaattagtctcttaatatattgtaagagtaattaaatgttacaaagagtctaataaaactaattaatacgcaactagaagaggtagaccaccagtaataattaggggattagagacatgttcttacctaatacggatcaatacattaagaaagaagtaatctctctttaaaacaaccgaccataatatcccacataatcgcctggtctattaacacaatttttaacctgccacaatcgaataatcttcagttccaagttctctcagacaaagagattaaacttgaaattagataacaaaataacctattttctctcggacataaacctaagtttaggttaaatctgtctggattccacaagacttgaaacataacaacagtaacaaaaccaagatcaagattgcataaagaataacaaagaagatagatctcaaacctgcatagccatggttgcagaagaagaagaagaagacttgaagatttaagatctgaaatctgaagctgaagaagaagaataaagagagagagaattgttttgagattggtgagagagttgttgtttatgaaaggagcagagtcaaggggttactttaaaagagcaagaagaagataagccacgtaagcataatgtttttctttttataaaaatttgggtgaaaaagcgtaaagaggggtttcgagaaactagtatcatgtggctcaggttaaaagatgctaatgacacgtggaggatttcttcttcgctttcacttttgtctttgcggagaagatattatctgttctttgttaaatcttgtcggagatttttaattgtttaatttatctactagaaagtttttttaaagaagctcatttcatgattattgccaaactcgcgactggtgagcgcgtgtcttgtttaacaacgttgtttacttcttaccccattttgttgttttttattaatcaagttgattgcatatttaattttaggtttaggtacagtatttaattgaagttgagaaatacagttccataaaataagattaaacaattatattatttattagtaatataatcactatttttgttttattagaattaacaattaaataagatctcactaaatagatctaatcatatcatattgacatgagaatatattaaatgaatatattattaaattgttttcaacaatttagcgatttgagttgacacactttatctattgataattctaattcatataatgttatagaacatattcttattcataacaaatttcaacaattaatgctatttgtggaacattgaaaaatatgtgatatatttggaaacaaaatttgtttttgtgctaagaattacccactaaaatttggattttggaatattattttttcttcctgatcatataattaaacaatttcactcattttattcgtactatgtatatttgcatcatcaaactgatgaatagtaaaaacctgaaaatatattacatactaagatctcaaaatttgaatataaaatactaaaatgcatcaacttagaagatgatcaattgaaaataagtttaatatcatatgacatgtttatcaaaataaatatataagttagtttagataaaacataatatgcaatttgaatactagagtaacaataatatgcaatttgaatgtttatgacccaacaagtattgaataaagacaatgttgaatcacacctagcaaattgtttataattcaagaccgttttttcatttatcttttatattaattttgtttattcttttctataagaatttggcctactttgtttctactatatataacataatctttaatttctataatctcaactagacggtgtgtcaaagttctagtaccattccactagttagagctcatagtacccgagaatgatgagtatagttggtgatgatatatgattttgaaaagattatatgagaaacaatagctagagaaagagcccttgatacctttctgagtatgtccatattcaaattattagaagtaataacatatgattgagtatgttgtacaattacatacaatatatcaaaatttaagtacgaaaataccacacaattcatcaaaatagaataaaatatatgcttaaatgtaaataaattatatcatgcagcaatcaaatcattttcatctaaacaaatgtgcaactggaattagttaaaaaattaaatttatatggttcctataaaattatagtaaaatatgtcgcatatcagaacaaatgctctaattatacaaaatttatgatattttcgatcacttaaataattctgaattaaaatataatcacgctctttattatattgatatttttgaaagcattttaaaataaccttttataacatttttttttgaaaatgtctccaaatgttgtccattttcaatcaaatcactcttacaaaattttataaaatttgaataaggaaataaacagatttcgtttatttcaaaaaatcgtaaaatacttgataatttgggtttcagataatcaaacataaacttagatgtaaatataagaagacaaaactgaattttagcatgaacaaagtgaaaaaaattgtgtacccagccactctcaagcaagaacaaaatgttcatcttattaaatctataaaaacaatttcaaagtccaaccaacatacatatcgccataaatattaagagacattttcatcaaattaagttaatccaataaaattagtattttaatacgctattcttttgattttagttagatttttcttaaacatttctagaaattttaccgtagttttttttttttttttttttttcttctcagtattgtttttgcttaaatactttaaatttagactatttatacctaaatgagggccaagaactttagactatgaacctagacttatcaggaatagttaggtttcaaatgacagatcatatatttttggagtgctctcttttgacccaagtatgtggcaaagaaagcgagtagctaaataaaaacatacacgagcgttgtttaaaaagaagaaagagatatttaaatttcagtagccgtcaacttcaaaacaaaattaaataggtattttatgtgaaggacaaaaattgtaaaataaatatctggaagtcttcaatgaaaaaaaaaaccatttatccaaattagaaattgtttggtacaactgtctcaaaatgaaagaggagaaaaaaaacaacacttttgttttgcactttattgcctagtcagcacaaaagtgttgtcctctgagatgttccaaaagtcagacacgtgtcgttgtgtttaggtaatagagagaaggatagggatatggatggtttgttattctacgccactcgattatttttttattaccaaaaatttgttgcccactcgttttttttcggtgttttaagctatcgagttcatgttttttttttcttcaatcgctacatttttttgtagatcttacgaatctataatattcttagaaaaatacttgtaccagtaaaatactggtgtagtggccactaagaagttcttggttcatgtatttttgttgctttttttaaagaaaaatcgaaatatatactttttcattattaaccgacgactatttgattactataaagaacagtcggtgcaagtgagagttctttcaacaatctaaacttatggacgaacaaatatctatatgggaaattgagaattgaccctaagtgtatagtcgttgaaaggttttttttttcttcttctttaatatctaaaagtcaaatcaaaaatgaaagtggaatgattgagaattcatcgtgacaagattaaacaatgcttattgatgtaagattagtatacgatcttaatgggcccaatcttgttagcgttttgggttaacaaattttgctacttgccgcctcggtgtctcatattaatgggctttgtaaggcccaacgctcgcttatcattttgtttctcgacgccgagcctcgccgtctcatcttaatcggctccaccgtgtattacatgtgtgactataacagagcaataagagaggatattttgaggccagaagtggtggatcttatggagaggtacgcagttgctgaatcagtctgtgtaagctttagtaacttggctaaggtgtttcttgacaagcatgttcatgcaaacacatgagattcatatgtaatgttaaggaaacaagcattgctgattttgattggctccttttgagatgaatgagaaaagagtttcagtttctttccgcattcagaactcggctcttaaattcttaatcactcaagattcttcttacacaaaactcctgggacagaaccaagcgctagaagacttgctgaagcaaacactagacagacgattataaatgaacaagtcatccgtcataaaacaacaaggcatctccaagacttgacagagaatcaacatctgaacaactgtatgtataactttcattccctgctctagacgctttaatgacttgtgcaattgaggttatgaactctttgtttttcttgcatgctttacaacgtttgtttatctgattagttagttgttgcagtcaaaagagggttacagacaaagcatgacagagatggtgtgaggagaagcaggccttagtttcctcctttcagggagggacattgtggcacaggaaaccgcttccaaagcgatgaaagatgcaaaatctgtggaaaaatctagtaaccaaagtgaggaggaacaacaattgaatgaggcttggacagatccaccccatgaaaataacccaaatggtgatcatatattctctgttttttcagatggagcatgaaagcaaagtaagaactgcagtggagcttcccgttactggcagaacaagtgttgaatgagttctgatgattctgaagatggcaagaaaaagctagactcagaaacacagtctcttcaatgttcttcttctacttctgaaaacgctgaaacaggagtggtagatcagctttctctcagttgaaatcgttgctgactgagatgaacaacatgagagggttcatgccttacaaaaagagagtaatgtcagagaattagggaaagtttttttggattagattcgtaatatcactccaaagtttcgtgtctttcatataaccagtcagaaattgtgatccttgtacttatacatgtttgtttaatcaatcaaaccttcttgataactctaaattgttgatatagtctctaccatgcatttaatataaaaggattaacaaaaaaaaataggttttataccaaaagttgccaattggaaacaaatagtacaacaaaacaagaataacaaaaaagcaaatgtttgaaacatagaaaaagtaatacatcataaaccctacgagaagcttcaagtctctgtgacggtttcactctatttcaagatcttcctcgtacggtactcttcgacacaaaggacacgacctctgacgcttaagccactcaaagatacaactttgatggaacagatggaaacaatcaggcaacagaatgatgttatcatcatgactctccgaaaagtcctccaaacaaatcgaacaagtggtttcttcttcatctcccaaatcagtaaattccattgtttgttcctcaagcaatctttgaaacatatctctcgacggaacagcaatagacggtaacataacatctcttgtgactctcacgtaaaaggagacgctaaaaggttggggaatatgagcacaatccaaagcgatcctttcgctcaacaatcgacaaaactcaatatctgtgatgaactcgtcaaggtcttgatagatgtgatgtgaagtgagacatgatggtttcaattcgattttagtcataagtggagccgcgaacgttcccaaacacatgacgacaccgttttgatcttcagctaactcgttgaccacatcgtgtagattgacgaacacggtgtttctaaacccttgatcttgtggtaggatcattgctgttgtagtaatctctacagactcccaattactatatgtatccatggtggaagaggaagaagaagattcaaaccctaacttttgatatgaagagataagattgtgaaatcaaagagaagagatcaatatatatatagagataggttttacgtttggccgactcagtaaaaaaaaggaaaacataaaaaatttgttgacgaaaaagggaaataactaatttggtcgaatttaagaaaaggaaaatatgaatttagtgtaaatcaataaaaaggacacaaccaattaacgctcgagtttaagattgaaaaggaaatttagattaacaaaacgcgttaaagtttttcatttaatttttattttaaattaactgaagtcagggaacattacatatctctgtattggttaactctcaaaaccgttccacattcttttgaaaccaatgtagtccgagaaaaggaaaacataaaaaccagcggtccactggatatggtttaataaccggaatttaaccaaaaaaagaaaattggaaccgaaaccaacaaaatagtttgacaattggctacggtttgttccggtcaagtggatcaatttctcacacaaaccagtaaaatagtttggtagtggtttagttccggttatttcattggaatgcaaattgaaccggaacatgcagaggaatcttcttcttgcttttcccaaataattttgttagcttctctctcacaggctccgttgtcagaatccgaccaagacttctgcagcgggaagaatctaaatcgagagagtgatgtcgaatctcttcaaaaacgtgagtttatctgcattaatctatttgtgctctcgaattgactcttttgactcgcattaatcgactaggggttcgtgttaaatcgatgttgattcgacagtttgggtcaatattggaccatgcaaggattacgaagagaaatcgcgagctttggttcatcttcgaaagtcgaaacaccaaatcatttgttgcctttcagagttttcgggtagctgagaattgggtttagatatgttttttaaagaagcaattgttttatctttgatacttgttactagtccaaatcatgcctttttagattgttttgttactggaaaattgccttagttaatagtatggtttgattagatctttgatacttgttactagtccgtcatatcttgcttattaatatgtatttgtattgagaaatatgagaaaagagttttagttctttctctatacatttgatgaatttttaccattgaatgaatatagaactttctaacacgtagacgattatcttcatatggtactttgttgaacctatagggacatatcatgagacatgtactgtttttaattagcttgtaaatagttcaagctcattggatctatatggtagtgactgttaacagttgattctcagaactcgatgcttcaacactgaagattctacttatgcaaaattctaacagggaatgtttaacttggtaaacaggagatcgaagaaacccattcacaaaactcctgggacagaactcatatacccaactctattctgtgatttaattatctaaagactcccaaaaaaacatatgttttgctgactactttttaaaaaaaaaaattttacatccttttctgccaaaatcatttcataagacatcacaaaacttttggaataataattacatgaatgaagaatcctaatttgaatataccaagaggttttgaaaggttttaactttttgataggtgtgtatgtgagaaggtacagacatcgtgatagtaatctgattatgtataatttcaacttgtagtataccgcatgtaggcttatattttagttaaactaaaaacttttattgtaaaaatgattataaatatatgatattattttatttgattttaaatgtacagtaaacttcgagttgtatatgttttgttgatattatttatattgtttagtgtttaaaattatacacttgtattttgattgttaattttagagttttacctgtagtataccatcttgtattaatatcgatttaaacccgtcaattctaggatttttcagcttgtattaaaaattgaatcacatcatacacataaaaaaaactaatatgttattaattattgtagtatataagattataaaattttaaaataaaatgtatgaaattgaatataaatattcaaattgtgactcagtactcagtataaaattttcttaaatctatttttgacccgttataatattttttcatttattgaacagtttatattcgtttttaaaaattcaaattatagcatatgcgaaaaactctaattattgttttataacgatgatattattttttcgcaaaaatagaatcatataaagatgagaggtgtactataataattaataaaaaattaatatgataatttggatatcaaatctaattagttgattttaattggttacttttttggaaattaataatgtatttcgttttttaattaaatttaattaattaaattagtatttgactttttaatttttaaagagatgaatcaatttactttttaaattttatttctaatggcatacctatgtaattacttacaaaaaataaggttatatttaaaatgtacttcccaattaatatagtaggattaataaagaattgatgatgttaaaaaataataaagaaccgtttgaatgtaaaccaaatttactctagaaaaagaacctctaaaccctaaccctaatcttcatcctcttcgaacggaactctcctacacaatggacacgaattttgacgaccaatccacttaaaaatacatttttgatgaaacgaatgcaaacacttgggcatctgaatgatgctgttatgataagtctccgataacgaatcagacagcttctcaaaacagattgaacaagactcatcggaatccatggacggttccacagtttgttcctcaagcaatctctgaaacacatccaccggagcaccactcgacggagcagaaacaggggatacgataaaccgaacctctttgatgactctcactttcaccgtcatgagaaaaggtctttgatagagagtgtaattagcacgcgaaaatcgaagagaagagattttctcagccaaagattcacaaatagaagtatcacggtgaagttgacgacgaaggagacgggagagctgttctggtaggaagctacgtggcttcaggagaacatgagagattggcgacagtgatgccaccacgggtgttgttccagtaacatcttcgagcatctcatggattacttcgtgtagttcgatttggacagcacttgtgaaccctagattcgaaggtagcttcgacatcctcgtagccacttgtagtctcaaagtttcggtttccatggtgtagaagaagaagaatgatcaaaaccctagtttcgttcgtttgcgacaagaaagagagaacacgaaattaaacaaagagagatcgattgtgtaaagagagaaacagagaatgagagtgtaaattgttatcttcagatgattccttgattatatttacacagagatttaatatacagaatccaagttaatcttaaccgttaattcattgtttctttttttctgtagttaatcatggccgtttattgattatttccttttttctgttgttaatcttaactgtcaatggattgtttccttttttcttagttagattattgaaccgggatttaaccagtaaaatagtttgttagtggttcggtttccggctattgcaccagaatacaaactaaccggaacaagcagagtaaatcttcttcttcctttttccaattgagttattatatttttcgcttcggcttctctctctctcacaagctccgttatcggaatcaaacacagtgggaagaatcaaaattgacagatgtgatgtcaaatctcttcaaaacgtgagtgtctctgtttaagtcgattggactgtgttttgtattgattcgagcatttgaatcatctttctcagaaaatccaacactctttgctttagttatgtgattcccttggcgttgtcttatagtttgcgattctgtagttgagttgaataaatagtttgcacccgaatttgttttctccgatttagggatttgattttgaaattgcagaagaaaattttaaagacaagagtgttagttgttggatagtgagagaatgtttacaaataatcaaagacaagaagaacgtactggaaaacatggaacaccaaggcttcaatatcttcaggtctcttcaatgtctgtttttgagatttttataagaatctaagaagcattgttggaattgagtttgtcttcttttttggtaggagcttgtgagtcagtttcagaatgcaactgatgaaggtattggttttagtcacatctcttcatgcttctgtttgaacatttagaaagtattgttgcataagactggctttggtactttcttgtgattaatgtatctttaaggcattgctgatttgtagtatgaatttaaggactgtgtgtggttcatatggaaatgttaggggtacttaagtagaagatggattaatatacaaaatgagcacatacggttcgtgttaaacattagtttataagcacatatctaggtttcgtagcatgtgcaaacatgacaatagaattaaagtccaacattagcagtttaagccttatggcaaatcgctgtcatcactttcaaatgcatctataagatttgagatgtagcaagcctaatctagtatatctctggttgttttgtcacttagttttgtaaagttatataacacgattactgttttgcatctgcagaaacaaaggagagaattgtagcaaacttggcgaattttgcatatgacccttacaactacactattttacgtcaggtaaccttgagtatgctcatgttctatcgttttccataaagaaccctaatactcacctctttaatcttctcacgatggaaatgttactggtgtactcgagcagctaaatgtcttggaactattcgtagactgtataacagagccaaatgagaagcttgtagaatttgggataggaggaatatgcaacgcttgtgccggtaaaaagcctcgaatattatgaacgtagtctgatactaaactgcttcttgttgttaccataattgccattactgataatcgaaccaaatgcactttcatgttcttgtgcagagccaaaaaacgttgctaccattgtcgaggctgatggaattcctctgataatcaaatccttatcaagccctgtccggaacactgtgagtacacctcatttatgtttatctggtgtttaaattggaaactcaaaagttgttagattttttttggttttctaataggtgaactacgcgcttggggctttgtattacatgtgtgactataacagagcaacgagagaggagattttgagaccagaagtggtggatctcatcgagaggtacgcagcggctgaatctgtcagtgtaagctttagtaacttggctaaggcgtttcttgacaagcatgttcatgcaaacacatgagattcttgaattttatcttctctattaaacacttggaatcagcttgaaaataccaaagatgacgattttgccaagagtttttgtatagcaatgggccaaaacgcaaacgctacaatgaatgttttgaggattgggaaagcgttatgttgcggctagtgagaatctaaatgaggaatgtataatagattcagtacactctcttgtttctcgaatctgattaaaatggaataagacgtatgaagaatgtgcacataaatgtaaccatgtaataactaaagaatcaatgaagtgagaacatacatcttctgctttctaagccttctcttgatttcactacaaaatttacacaacaagcaatgttattaaaaaaagaaggtcaagtactcatcgaaaccaatttagcggcttaacccgatatcacaaatgatcagttccagtgtcattagacttgagcgttagggagtttttaagaggacaaaatctattctgtcttcccgaaaaccactatgaccgtgagggggaaacaacttcgggaagatggttaaagggacataccgttcatcggtggtctaatcgatctttttctcgcaggttattctcgagttctcgcacacataaaagtttttaatcgtatgaaagttcccgaaaatttgacaaaaacttaattttttacaattataaaatttcatttaaaaaaaaacttgtttataatttgctttcttcctattaatcctttgattcctagacttattttgctttcttgctcctaaattaattgagttgctctcttggttcgatttaaattgtttgatcgacatcgatctggagtgaatttggaggaagtgtagaccctaaaaggtcgtatctcaaactcgatgttggcatgtgatgcaagaatttgacttacaagtgggtgtagatcaagggttgatgttaatctactatccgatgtaattcgatacgttccattgatgtgaggaggggccaatgttcatgcttaagcctctagtgttatcaccgaactcaagacaattgaatgctgcaagattgtgtactaagagtatgcagactgattttacgtgtcaagactttccactgcgatttcaaccacagtgtacgtatgttttcagtgacaataatacggtattattaatacccgactctttcacaaactttggaaattagtttgagttcaattcaaaatcgcatttaaaaaaataataaaaaaattacatgaaacccacaatatttggtatgaaatttaatatggtagttagtaacctcgtaggtacaacattcatcttcttgctgccgacatcataattgttcataaatatttttgaacacgtacatataatgttcatggaccaaatctgatcagactcctaattagatgaattgtgtggtcgattttgagatgtactttttgaatcataattctttcaactactcgaaataaatttccctcaccatcccaagactactagaatagcatattcttaaatataaattattatataaccaaactattattctttttaagattatcactggatgttacgttgaagttataagacatgatatatatcactcaatttcagaaatgagtagagttcttagtgcatagtttttcttaaacctacaaggctacaatgaataaagcacgacaccatactgttctcaaaatatttgtatatagtggaactcggttgaaacatatatataccagtaaagttatttttgtttttgttaataaaagagtaactcgtgaacttgaaatcaaggagctaataaaaaattatttttgtttgaatttaactttttcaaaacctaacacgaaaatcagaaattctgaggggttagaatggttctcacttgtttacgtttctacgtccaaaatactcattgagttttcacattctcaagttttggaaaaattaacaatttcgtttataccactaacatgtttaaaactataattattctaaaactttaattatcaagttcatttcgtttagctaaaatttattctgttatatagttatttattggatataaaccctaaatttagtgttttgatgccacacgtaagctgattttcaaatcacaactttataaattccctcattaatttatcttctaatgcatctatcaacaataacgttatttatatatgttgtctatatctattaatctaaatttgttacaaacaatttaagtcagcacttatcggttttatgtctacatcatacattatgtaggttgtacgatgacgtgggttgtagctagttaggtataaaaatttacttttaaaagaaaaacataatctcctcatcaaaagcttttaattgaatttaatagccagggccaaatatgccaacaatatacaccaaaaaacatatttgtcgctagaacagtgctaattaagggactcacatactattagacattagtgcatgtcagccaataggcttattgtattttcaacatgttggcccatgtcagccaataggcttatagtatttgctaaaaataaaaatatatatatttgctcaagtgttggtgttgcatggttcaatatttatcaaaactcaaaagaattgttgactaactttacatattaacaagactaatcatttttctggtttgtccttaattttaaatatgtaaaccactcatttatgatttctccaatttagaaagagtgagatgtgaagtttctcccaaagaaagaaaaaaactacaggtaaataaagtgtatactgctttccaaaatatgtcgaattatcacaaaaataaaacgaatttataattaaacatctcgttatggattttgtatagaaatttattggcctacaactgttaatagacatattatttggcattgtacgtaatctagattagccaaactatatatagaacatcatgtttagctgatttttcaaaaaaaaaaaaaaaaaaatcatgcgtagacgaaatgcaagttttaatttaattttattgctttctctggttagctctagaggtctttaatccaccgatcttaaaaaaaaatccaactttctactttctctttctaaatgaaacaattccatatttttcatttcatttatacatcatacacttaattaatgatattctctttctagtaattagtacattaatttaaatttatcaagaaaatgctgttgaacatatataatcaattattatgaaatgaaatttataatgaaatgatttgtttgatagaaagaataaattataaactacttaagagaccgacgaagatagcaacgacaaaaccctaaccttataccaaccctcatttaataccaataaaaaaagagggacaaaaaaaatcaatgctatataatcgaagtatccactacaaaggttggagaatccttaaactgactatgaaagcggaaaaagttatggagagagagatcgagacaacgccaatagagcctcttagcccaatgtcacatatgctaagttcgccaaatttcttcattgtcataacttttgggtttaaaactcgatgcaaccgatcggcctttgttgatggcatcaacaacacattgatcaatgctcccagattctccagtaaaatggtaaaaatatttattttacacgtacgtatgcatgcatattattatatgtagacacataaaaaacaagtttacgtaatctactcttatgtgtttttttttttcttataatatcaaagaattcacaagttcattcttcagtatatattcttacaacttgtgttttttttattatatcaaagagtttaaattcatcactctctatttgactatttctatgtatgcaacacaagtagctagatttgttctaagttatgtcttagggatcatattatttttttgttttgtttttgtttccaggagataaattataagaaaaaaggagaaccggtctggattcctgttaaacttcgagtagatgatcatattattgtgccggatcttgaatattccaacattcaaaatcctgatcagttcgtagaagactatacttcaaacatagctaatattccaatggacatgtccaaacctctttgggaatttcatttactcaacatgaagacatcaaaagcagaatctttggctatagtaaaaatacatcactccattggtgatgggatgtctcttatgtccctactacttgcttgttcacgaaaaatatcagaccctgacgcgctagtttctaataccacggctacaaaaaagccagctgattccatggcttggtggttgtttgttgggttttggtttatgataagagtcaccttcaccactattgttgagttttccaagttaatgcttacagtatgctttttggaagataccaaaaaccctcttatgggtaacccgagtgatggatttcaatcttggaaggttgtccatcggataataagttttgaggatgtcaagttaataaaggacacaatgaacatggtatataatcactgttatttagctttatattgatcattcatttcatttacgtacactaataacttcataatattctacttcttttgcagaaggtgaatgatgttcttcttggaatgacacaagcaggtctttcaagatatttgagtagcaaatatggtaaattcaatctccttctaattttataagtaccttaaataatacttttaagcatagactcaaagcttatgtttcattaatttatgttttcaaattgatgaagatagaacgattgaaagaaaatagttgttcgacatagttttatcttccaccaattattatttaatcgatatctagtcccatcacaaaatggtaccatctgaagttatgaaaattgaaatcaaagtttacgcaaccactattccacataatactgtcatagtattagttactctctttaattcaaaatttgtaatataaactttataaataaaatttgtacgataattttctataattctaaatactttcaaatatatttctatagtattagaacatgcttaataatagttataatatttgatcactatcgacagatggatcaacggctgagaagaaaaagatcttagaaaaactccgtgttcgtggtgccgtagctataaacttaagaccagcaacaaagatagaggtgatgataatcattacaaattttacaatcatacaaaaacaacatttctaataaacaagaaagtaaaagtttgataaagtatgaaaatgtaggatttggctgatatgatggcgaagggttcaaagtgtagatggggaaacttcataggaacggttatatttccgttgtgggtgaaatcagagaaagatccgttggagtacattcgacgagccaaagctacgatggataggaaaaaaatatctctggaagctttttttttctatggaattattaaattcaccttgaaattttttggaggaaaggtgaaatactaaaccaagatatatgagcttatttaaaatcaatacattttagtgcatattgctaacttttttcgatcgtaagaacttaattaacaggcagtagaagcttttggaaagaggatatttggtcacacatcattggcattttcaaatgtgaaaggtcccgatgaagaaataagtttttttcaccatccgatttcatatatcgcaggaagtgcattagttggagcacaagtaagtatatactctcttttcgtttaagtatactggtttactcttgtgaacaattatgaaacttttgatgaagttaattaactaattgttttttttaatgtttaacaaggctctcaatatccattttataagctacgtagacaagattgtcatcaatctagctgttgacacaacaacgattcaagatcctaatcgactatgtgatgatatggtggaagcacttgagatcatcaaatctgccacacaaggggaaatatttcacaaaacggaagtttgaaacacatcacctgatgtttgatcagggttatgtaatatataactatatgaagttttgtatttgcaatgaatttttttatggagtatgataaccaaaatatgtggtgaagtgtaagtttgtttgtttggtttgatcttaggtgttttatgaacagttggcaaaatggtaaaagggcataacaaaagatcaccaaaaattgagaaagtatcacataatttttaggcaaaaggatttagggtctattgcgctttctttactaacatgtaattaaaaagatttagggtctattgcccttgttcacagaattatgagtttacggttagaagaaaaatcatttttgacaattacatgaagttctgtagtctgtttctttctttaggaagaaactgagatctcaaataattggcatagtcttccgcttcgcttctgatttttcagattataattgaattttcatctaacgatttgcttccatggcttcgattgaggttagatctggaggatcacgctatgaagtttgtttatttggtttgatcttaggtgttttatgaacagttggtgaaatggtaaaaaaaaaaacaaatgagagtagacacatgtcataaatatagatggcacatgtcagtttaaggtaccttgtgtttagaggtaacccaacctattatattaaatttcttattgatctaccatatattcttattcttttgttttaatataggattttgtgcaaaaaaactttcaaaatcgctcatttttgtaactttacctatattataaatgtccaaaaaatacaaatcaattccatgaaatcaagaataatacgcaaatatacccccttttgcaactttaccgatattataaacgttttcacgatcatatacatttctttttgaaaattttaagatatagttgaacacctcatcccgaggactttgatttgatatattatttatcaaaattttaaattttgacaatagcaaaaaagagctatattagatattatttttgacttcatattgttattttgtattttttgtacgtaaatggtaaaattgcgaaacagatgactttgaattttttttgaataaaacccttcaataaacttctagtcaaaaatatatttcatttgaagttcataccaactcgagctcctgaagtgagtgacgagcctataaagatacatcatttagggttaaatttgaattggtcttcatctatttttttttgggttttatggtacgagccattttgatatgatccaacactaatacatagccttcttgtttcctagttgagctatcttggttagagaaaactaaattattgtccaaatttcgtatcccaaacatcagttaattttggccgttattgaagttgattgatcgacgaaaacttgacgatctttagagcatctacatcgcacaaaaaaagataatggatcattaacattaaatataataaaaattaagaaaaaacagagtgaataaaagagactctgtcttttgtgtctatgggagacatattttgctcgacatcttacgtggcagcatcagattaagtaaatattaaattttatttaaagacattttaaaaagttcacaaaaaatgaatttttcttcctgatttttttgagaccattactttcttttttggtattaaacaaaaatttattttgtgcatagaaaactttcatccaacaaaaaccactatcacattttatatttatgtgggaccagaaaacatatttttcttatatactacgaaccagtcaaaccttatatgtttggaaaatctcctcaattttataaaatgttcagcttccgaaactctttacatgttgaaaaaaatatagtccttacatgttctcttgttagtttctttcatcacccttgattttttcaggaattgtgataaatctttgtgatactttgttttaaaaaaaaaaaaatctttctgatgccatttctacttgtactctattaccaatcggcagcattttcttttctggtttcaaattgaaatctctttggttaggatatatttgaatttcctggttccaatttctataatttcttcaatttctcataaattcaccaagcttcaatgaatcccctaattcaagactacttcgacattggagacactccttgatcttagctggacttgccaagttttgagaagatcgaaatagttgttccgatacacggggagtcgaggaccttccgatagatattgttaggcgggaaactcttgtgctcacttaattagtttgtttgtttttttgatcaagtgatcacttagttctgtattggtagttttactctgtattttcgtctcccaaagcttttgatgcgtttaatgcaagtaaaattgacgtaagtgtctctcatcaaggaagcaaacgtgttttgtttgtatcttttagcaaatctccctaaataatttttgcttgtatcagtagaattagtagacatcgtattagtctttcactattttgtgggaaaaaatatctacgagaaacttgtgttcgtacctactgtctcactatcgttctcaaggacatcataccacaagagaataactaaaaatataagatctgaaaaaaatagaagggtaacaaaacaaaacaaaaatagacaacctcgccggatcgcctcatcaccatcgctgttacaacgacaacattaagcaacataaccttctatatcaacaagttaaagacacaacagaatatgatatcttacctagtagttgagggagtgaagaatcttcaagttttactcgcacttgattgagcggtaaatgtgacgaacaaagagaagggaagcacagaatccgattgtcccgagcatgaggaagaatccgtagcagatgcaagccatgtagccaaagaagaaggaagtctgcatgaaccctgacatatctgatcgtgcatagtagtaatacaagcagtaggcatatatgaataagcccgttgatccaccgcatagcaatgatctttgcatgcagaagataaaaaaaagtcagattaacaatttatagacacactcaaacatgggattctcttctaggctaaagcattgatgaatcgcaattatgcaacaaacaacggacaagtatatattccctgaaccagatgaataatggaaccagaagttaaggaaagagaaatgaaaacattacctccaccaccactcatggtcttcagcagcaagttggaagtacgttaatgcaaccgtgataaaagcagtgactataacgagaataaggaagacgatagacagaatactatagatggtgtatattctgtgaccccaaacactggcaaatatgtagtaaagctcgatgtaaatggcactgaacggtaaaaaaccagccatagccatctgcggaagtgttctccggtaccaacgcattggtgggatctctcttggatattttgtggtacgacaaggagcttgaaactcggattttctgttcttcccagcaatacctcctaatattaacaatggtgaagtaaccagagcccatataaggaaaataaccacaattgtcccaaatggcaacgctgcagtggcttggtaagcaatcgcaacagtattaaggaaggagaacgtgatcaaaagaggtccacagaagaggcttccagtcagtataacattcctaacctgtcaagacaatcaatgaacgtctttcttaatcagtttactgaaattgtaaaactgttcattcaatttgtagaactccattcatctggcatcaaaaccttttaggccaatatgaaaaacagaaaaatataaaatatatgaaccaattgcaaatgagaacaagatgcacgagataagccatagcttttcctcaaactgctaaaataaatgtccagaactgtaagccaaaacccatcatgcaaaaagaagtagaaaactcaaaaatctaataatctcgtatggcatataaggtcagaacacaactatatacatatagtacataactatgatacacacatatttttccatatgaaacaaaggtagtaagtttgatcaaaaacagaggtagcaaaggaacaaaaccatgttggtgttcaatgctaaacccaattgactgcagtactgtttgtctacttttcaccaagtatcacttaagagctttacacagccacttttatcagatgtgcagaaactataccagctgatttcactaaatgctaccatggtggaagacgtttgactgaatacttagatatgaatttaaaaaacaatcctaagacaaacaataacctataaaatggcatccatgcttacccagttagttccttctagctggcaatagaaagaagcagcagtatatccggcaatccctgaagtaagagcatatatgaccactaatgcagtaaacaatgctccacggttgtagggataaaagacaccgactaatgcaagcatgaagatgaaaacagctctgcatacaaataaaaaaacgtgttaccaagtgaaaacagcatgccaggaagagcaccaagagtcgacaactctatgtgaaaacgtacagtgtaaacaattgtgtgccagaaccaagggctgcagccagcagggatttgtgtttggggaacctaaatacatcaccatggatcaatttccacccagtctcttcttggtcatcaactgcctcttcatcatgtgcatacctacgaagtaaaaaagctactagatatatttaaagtcacaaattcaataatgctacgcactctagctaatatcttacttgacaaaatcattcttcaagactcgcatgagaatcgtcgcaaggaaaccagtcaagagaagaactgtgacacatgaattaatgatggagaaccagtggatttccaagtgatgtggcattgatgaagccagtgagtatttctccatcctcttctcgaatggaatttcagtttccttccatcgaactgtgtatgtgaaatccacttggacttccttgtcctcagtcaagtccacaaggaaattctggtctgtcctcacgataatttcgataacacggtccttattatagaaaatctcaaactgcagatgattgaagagataatatttatactcagatgggtcagtctttccctccttgacaacttttccaaggaatccccaaatgggcaagtcatcataatacatctgaaagtaataatctttcgcaatcacatcacgaaacttagcaacgtcttctctactcaacctctttctacatgcaacttcagagttcttctcacccaaaaactcaagtttgtaaggtgcactgactaatcgatctccattaagaacttcccctagagcctccttcttctccttaacaggagctgtaaagaatatccctcagccacataaacttacaaaaaaatcacctatgaaactaagcaatttaaccatccatacatacctgatgaacagaacggaagatcaaagtatcgatatgtttcactgcaacacacaaaaaaaaaaaaacagttcgctcaaactaaaacatcagagttcgtaattctcgaaaatcggatttcttcacttaaatatccaatcatttgttcaattcatgcttcttgtttaaacaatttgaccatggatcaaagatgatctccataagaagcttaaaactacactaaccaccaatgacattcactaattagacctacaaatttgtcattccaattctcactatccaataattacgaatcagagctcgagaatgttattattaaggaaatcaaattcaaaattcgaatcagaaacacgaaaagcgaagagatctccatgcaattgaaatcaaaatcagaaaaaaaaaacgtgaaataactgaaaatcgaaagctcagatctgaatagataagcggacagacctgggattatgaaacggtccgactttgttagcgtaaagaggaacatcatcaccgaccttgtaacggtgatcggagccgtcggagataaccggagaaacgccgtagaggaagaggaacaccagaagaagcgacgtcatcgaaggaagaagtaccattagaaattagagagaaagagagagagagaggtttaagcggttgggtcgatgaagatgatgaagatcaaattcatgattatgagtgagtgatgagagactgatttttgttctccgcaatgcaagtcatgtcaattttactttttgttaacgaaaccactttttgtcactttttcattttcccaagttttatttatatattttgttttgaattatcaatagtaaatttttttttatttttttttggttaaattgatttatgtataatcgataatgatattttaactatctcacattaggtgttgggattagaggaaactaggagtaaagtacactgcaatctttttggtttttgtagacatgtaaattgcttcaaagagaagtgtaggaggaactgactggaggcagcggacaaagcggtataatttatctgcggtttagtccatctcatttttgggcggataataaaccgctgcggaccaaatttatttgtatgtaaaaaccgctgcggttttttctattttttttggtccggaccactgcggactataattgatgaatggtaaataaaaaacggtctgatccgttgacgttttgtccgccccaaccgccgtaaccattcaaaccctttgttaaacgattagttttttatcaaacgtttaaaggatttctgcaactccattttaagtctctttttattttgccgttttaaatttattatttattgcaaattctctgttttaagtctagtttagtttgtaatcaaataagagttttacatagagttctttttatgctcaactaaaaattggttatgaatttacaacaaaactaatatttcgttgttaacccgcttgtaaattatgttactccatagatgtcacgttatttttaccggttttataattcatctcaatttatgactaaacccattagtttgttttaacttttatcaaatgctagataatttacccgtgcgtattatatacatctcttgttgataatatttagtaggtattatacacttgtgtttgatttgatctagaagcaaaaaattaaacataattgaaatttttgtgtggatatcaaaatgagggaaaatggagaacatttttgaatgaatgttccaatttggcaagttggagatcgtatgtgcatatatttttctcctctagagacgtttggaacaacatttggcatgtcaaaccccttgtgtcatggtatcctttgggttggcacaaccgcacaaggctgcgattccaaaacactcttttcacgttggacagaaaagattgttccgagacgttgtccacataaaagacaatacataatgtgttttatttcataaattaagcggcaagtaagtaaacgatgtaaaagcaataagaggaaagtattatgcattagggttcttcgtagtcatgaattgtataagcatgtagaaaatcatttgtctcttggttattttttatttgaacaatccaaacttttgattttttttaaaacctttatggagtaatctctttcgtttgcttcatctcccaatttaataaaagtcattgggaaagcacaaagtttcgcgtggtttgatgttttgaatattcacgttcagttaaaataagattatacacgaaacctcttcgtattccctaccccatatatagtccataggcatattatgtaatggttatatcctcgagacttgtaactctaattatccatctacagggaagctcaaaagattaagtctttatgtaccactgggatttttgtggagtttgttttttatcctgcactcattttctctcatctttcgtgaattatttctccagaatctctaatggatcaaggatcagggaaaacaatgatcagtgttcttcttgtacatcatgtggacaagaaaaacgttgtctggattcaatctggtagtgacttcgttgatttgttctatagttttcttaccatgcctttgggaacaattgtgagattgcttgagcatcacggaagattaaaagaaaaggtcagcataggttgtttcaacaacctttataaaagtcttgtagacatgagcatcgataatttcaggaacgaagcttgtaagcagatgctggtttacccgaagagcgtgaaggaacgtcaatgcagaatgctgaagattaacatagacgacacagaagaaaccaagtactttatgtgtccaaagtctttgcaaagcccatcatgcagagagttttttagtaacttcaatacttcaagatgtaggtgtggaaacttgatgaacaaagagagttcgtcaccagaaggagaagaatctgtaagcagattgggaggtagttgtgatgatgatggagtctttgtccatggtgatggaaatatggcatttatgttgagtgatgatttgacaatcgagaatttttcttgggatcttccccggaaacgtgtcaaggatttaggttgcgttaacgtgttcgataagttaggggagggtgaaccagaagttggcttccgagaggtacttttatcgtgttgttctcttagttttttttttggtttaatagaatgaaactttttgacttgtgcaatctcaatgtataggcaatgactttgctacgatccttattcacatcagaaactccattgacagcaacattcttcccctttcatagttcgccatatccttctaagagagcatataaggcatcgagtccatgcgattcggttttaggccaagtattgtctttcaaagtgtatttgagtaaggaggacaacaagaaggttatttacgctgaatgtggtgaaggctttattgatcttctttgcatgtttcttgttcttcctcttgggtatatatgtcagatctctagtagggatggtgatgatgatgatggtctggggtgtatcggtaacttgttcagaagcttcaaaggcttaagtggtgacgaaataaccattccttggtattacaattgtagaaagaatcttcttggcatcacggtccaaaagccgccgagtttgttcaattgcatttcttatttggaagataatggtatggctggagattgcgaggatagtaggctcaagaaagtaagaccaatggatccaaaagctgagatcagtggccaatcaagaagtagtagtggtgggtttgtgaagagtaacaagaagtttcttgtgacagatgatcttataatcactccactgaattcagatcttactatgagggagctaaagaaactgaagataagtttcgatgaagtcaacatcaaagagataactatcggtaaaacagaggtatgcataaatatttagtcttttcttgtcccataagttactacaagatatggctaactcattgtctctatctaaatacaggctaccaatttattgaaagcttcctttgtgacatcctttgcattaaccaatggtctctcggacttgctgtcgaagaagctggaagggtaaactcaacaattctattggcaagaattcttagcttttggaaaacttgtctccgttgtcactttcatctaccttatgtgtgtttctctaaagtttcaggcttgtttttgttacttggcttcagtttttgagaattgaataatttaatgatcatcatcattcatcatcaaatatgagttcggcgtttgcaaaggatagcttaattgagaagtttttccaagaaataagtagtgtgggcatattaaccgaaccaaaccaaacaaaactcaaaccgatccaaaccgaaccaaaatctacacacaacccatttcagtttggtttggtttgaaatcgaaccaaaccaataacccgaactgttttccaatttctaattaatttactgaaataataataatacgtctctaaattctaaatccatgcttcctactctttttaatattactatttagtataaattaagtttacttaattattttagtttcaaaatatttaattctaagctacaattttacaagctataaaaaataaaacttgcttgatataaaatgttagtaacacaattccactttctagctttatataaattaattaaatatgactattgttggtaaaacaaattataatagtccaatccgaattgaaaccaaaccgaaccaaaactaaactgaaatacacctaaccaaaccgaaccaaagacttcggttcgagtttggctacaactttcataaacccaaactaaatagaccaaaccgaacccaaaccaaatctaaaaataaaccgaaatgtccacctctcaaataacaaacacattaactaacttataattgaacaagaattaagattgattcacttaaattcaaacatgtattcaaccttattttccaaggcctaaaatccccaaaaatccttgatttttagattttgctcaaacccctaaaaagattctaaaatcctataattcaaacatgtcttcaactttgatttccaagacctaaaaccccctaaaagccttaaaatccttgatgacttcgattttgattatctgtttctactgacccttgatttttacctataatctctacgtgggctatttgccgaagattactcctcattctcccccatacgcaaaaccacaagtgggtttctatccacgttattaaagacctttcatttcttaccaaataacccactaatattgatgtgtgtgtgatgttccatgtcaatcttttatctttaaagatcacacgtttgctgtaagtggacaacgatcgcctgtagtattttaggatcgaactccacacagagagaaatagtttaaacgaatctgtaataagagagtaaagctagggaaaatcaataaaaaagggtttgctgttggtgtcacgattgcaaaataaagtaaatagcaagtaagacaagagttgggctttcaagggatcaagactcggacatgcgaaacactaatgatcgactaaccctaggctataggtgaaagtcggctaaaatccttatactccgttattcaactttcgtaggcaaagacgtatatatcaaacaaataagatcaagttcgattctacaacgaaacacataaaataatgtgtaatatgtgcaacatatcttatatcaacgcgtaatcattattacgatccaacagaaagacacgcctaaaaattcacaatttggtcaaatgcttttagtttaaaaagtcagaaaatcagcatatttaaagcattttaggtttttggagaaaaatattggattacaacactatattgatatctcaaagtaaaaaacatgagcgttagatctggattaaaatagcattataatgttatgcatggacatgaacaataaggatcaaattcttttggtattggatgtataatatcgtttagtaacattaattttttttatcaaaacattatattaggtcatgatactatcatctgatattttcatatattaagacaatataatatttatattattacaatattacataaaaattatttttaaattttagtcatttaacattatagccactattaacagttttaacatttttattatttcttaccaagacaaaagtcaatactacacttaactaattcaattcatatatagtattattgtagacaaaatttcaaaatataattcaataaaattatctacttattcatatttaagaacacattgttcaataaaataaaataactaaaatagtatatgataccaataaacccacataacttgtaggtcgatttctagtaactagtaattaaccggttcgaccacatatagtggatgtactaatgctttgcaaatcaaagtaccaaccaaatcatacattcaaacaaaagaaaagataaaccaaaatagaaaagagtaaaatatggtgatgaagtggccaggaagagatagttaagtctactcaatgcctcaagcaaacttgtaggctcctccacgagcaatctctacgttaatgatctgaccatcaaattcagcactattcagttccattacttagtcaagcatgttttcttcactaataaaggtcaaaaatgcgtaattgtatgagaggttactaactactttgacttgcacaataggaccgtagcagcggaagatattccccatatagacagcgtccatcatatcgagaacaagttgaatgtggattatctccaaactatataactgttgtagttaattatattgtactgaacttgcgccttcaaaatattcatgttgattttctgttgatttcttattatttacaattattattttactgcaaaatcatgatcataataattaggatagaacataattgtatgtttatttctataatataacacatctttttttttattactcacatgttttcagtacttgtgtaacttgtgtaactacacttaacacccttgattagttttaactaaatattatttttaattcatttttaattaaaaattaaataaaaaaacactgattatacatatcatcaatctatatcattaacataatccacgtcattactcatctgaaaccgcataacgttacggtttcatttcttttgccattttattgttcattagcggaaaaaaaaattgtcgctttctttctctatctctcttgacgaaacaactcgttaccctaactccttcgccgttttctcttttttcgtttgttccggccgaaattcttacgtcggagtcgcatttctggtatcgtgaagtcacatccctgtcgcagtcgcatttgaactgaacttctctaagttccggtgagtatatttccggtaagtaagaatccgacatctaagttcaatcgcaagtgattcgcgtcactgaaatagtttttcgatgcttaatgatggtttttaacgatgcttaaagctggtttttaacgtcgtcgttgattgacatatggtggccgatttgttagctctatttgatttgatggctgagttactttttgtttgccgactgatttatgatttatcaattcatctgtgtctgagtttgttatatgctgtgattgagttatggtttaaccttacatctgtggctgagtttctgttatatgatggctgagtttgtatgttatggctgagtttctgttatgatatggctgagtttggtttatgttttgactgagttgttgttatgttatggtttgactgagtttctgttacgatatgactgagttagatttatgttatggctgagttatgttatgtgtggctgagataggtttatgttatgactgagttatgttatctatggctgagttaggtttatgttttgcctgagttatgatgagtttgttttatgttatggctgagttattgaatgcttacggctgatttatggtttatcagatgtctgaagaccaagcaagggattaccctccaagactttacccagagggggattctaatctggagggtaaagccactaatcacaacataaagctgggagatttccctgcaattagagaatcaataggaaaagatatatgggaagaactgaaagagacaccgcttgggttaattgctaagcttgttgatagtcattttgtatggtttggtaagactgtacattatctactatgcagacaattgagaatacgcaagaaggagctttggtgtatcgtggctggtcaacccatccagtttggattgaacaaatttcgatatatcatgggtttaaacacagatcaactgcctacagaaaagtttgagcgtgaagcggactacaaagcattcttcagggaatttcgtgtgccaaccggtgaaggacctaagttagaagaacttagggaaggcttagtaatgtgcagagcttggcctcctgaaaaacgtagatggtttgggttattgactcttctatccattggaatttatggcttgcatcctaactctaggataccatttgagagcgccagaagagttttcgatgacgaagccatgaagacttatccatggggtcgggcagcatttgaagccctcgtcgtttctataaagttgttgaggcctataggcaagacgtacaccgtcaatggtatggctttcgtgttgcaggcttgggcgtatgattcaatcatcatcatcggcgagcgttttgggaacgtagttaaagcggatgagattctgtgcttagatggggtggcaacagtacccgtgcaacaatagaatcagccattgctgaagatatcaaagcgaatggtggtgaggtacggttttggctctgttatgatagttattgactaagttatgttctgttttttatcaaatatttatgttacggctgagttgtgctctcttatcactgagttaatgttctgttttttttgtcaagtatgttatgtgacggctgagttatgatctgtgaacgctgagttatgttctcttttttggcaaatatgttatgtgacagctgagttatgttctgtaatagctgagttatgttatgtgacggctgagttatattctgtaatggctgagttatatgatgtgacgcttgagttatactatggctgagttaaacatactgatgggttttattatctcttgtgttgtagctgcgtgtgcgtaaaatggttctaaaggcttagttaagcgagctgttccattcttggccagaccaattagcagacccagcactcgatcacttgatcgaagacatacacgagcttaagcttgttaaaggttattgggatgtgaaaacgagtgagaagaagaagaaactcgtaaaagataatgatgcagatgtgtctgaatctcccgcaaagaagcagaaagtctctctgaatctcccgcaaagaagcagaaagtctctcgtgagaaagatgcccaaaagaagaagaagaataagaagaaggaagtagctgtcgaatctgatgaggacgaggacgagcaggatgttcggggagaacagcagtcgctcgtggatgtggtgtccaacttgatctctcccttaagctcaaggtttgacaccgttgataatagcatcaaagtaatgtcctcccgtttggaggtgattggagttcaagtagaatcgaggattgatgcaaagtttgaaagaaggtttgcatctattgagaacgaggtcaaacacatgaaagagcatctgaagggcatagctgacgcataattaaactctagtttaattagagatatgtttttaaccaaagggcggcaaggctaccttaaaccccaaactcaacagacaccagaaggttcaaggaaacctacaaataaccaatctgttactagtcctcctccagtaagctaatggctgagttattactttgatttagttacgactgacttatcttcatattatacaactgagttataacttttatttagttatgactgcgtgatctgcatattatacgactgagttataccttttatttagttattgttgagttatatatatacataggcctgagttttcgttatttaacgcctgcgttttctttacgtttatggagtcaaaagaagttgtagtggtagagaaggatgctgatattgctgaggttggggttagtaggaatcttgatggagaatttgctaaggccactgatggaaaccgttctgatattgatttcattgagacgtctcctgtcaaccgccgtttaggctctatgacggcgggaaggagaatttcctaagcgaaggcatcaccaaagaagaaaggtaatgttaaggagaaaacattaaatgatctaatcgtgaaagaatcaggcagaagaggaagaaaggctggtacaaagccacctacaaaggtgcctacaaaggtgcctctaaaggtgacaataaaaaagctaaaatcatctgaggaagccaaggaaaaatctgacggtgatactttttctgtccccaagaataagcctgaggtagccaaggaaaaaactgacggtgagagggtagctgatgatgattctatacttgatattactgactagtgggtagctgaagataatcgcctgctacctgagtctgatgaagatgaggaggaaaccattaggctgcggagagtaaaagctgtgaggagaaaaactgttaagctggccctgaatgggaggtcattgattaaactcgatgaaatgaccactataattttttcagtaattggacatctctgataaactgtccgttattgtgagaaataaccttgtcgttaggaagaaaggatgagacgtgtaaatgatgaagctgctgcgggacaaggacggcgcggacggccctctgtgcataaaaaacaaagtcaactcattgattctacacaaatataaagaattaaatttgtatgtagaagataatgctccttacccatctccaaattatataactgttgtagttaattttattgtactgaacttgcgcctttaaaatattcatgttgatttcatgttgatttctttctatttacaattattattttattgcaaattcatgatcataataaggacaatgaattaaattaaaactatgattccaataataaatagagatgaattgtttaccaagtggaatttggcattcttaaaatctccgaatttaagaatatcttttaaggtcttacttatgtaaagtggatcctgaacgaattcttcataagtcttaagatcatttccattataaatctctatttcttcctcaaaaatagagcatgatgatttttctcaaatgtatcactctatatattactcaaaaatagagatagtattaaaaaaaacaattactctatatatagagcaatcctagtatttactctattttagagtaacatatacaatgaggttgtaaaaaatgtactgtataatagagttttagaggaaaaaatagagtgggattggagatgttctagcatttctcatagtagttatgcctagttatgtctacaccacaatcacattattagcctttgggattgtagatcacttcaatattcctgctagtgaataaattttttatgacaatttaatatcatttgtccgtgtgtaattgtgaacaaaattgaaaaatacgaagaaattactaattaaaagaaaaaaaataattcatgaactaacctcactgataccataaatttttcacataacaagatttttttcggttgagttaatagcatatttcaataaagtagttaaaacaatcgaattctcatatgtttggtgtaagttattggacttgcgctttcaaaaactccgggttgatttcttactatttaaaatcactattcttattgacatatgaaaaatatttacttaaagactatgtgaagaaaagtagtttgctggtactggtagggttctttgaggttctctaaactgttacggtgatacccatacaacataaacataataatctgtcccaaatacagatcataattctctgattatagagacactttttcaggtttaaggtaatttagttggctctgtggactcataagcagcatcagctgaagaagtatcaatgtcgttgagacccaactcctcgttttgctcccatgatctctcgtactcttcaactgtagtttaaaaaacacaacaacatttgttacttgaaccccaagactccagttctaattgacatattcactcctaattcaagtcgatttcattatacagtaagcagaaaatcaaataacgttgtttcttcttgatctacaacgactgtatataaaagccttccgtgagaaacatgcaaggaacacctttagttaatgagacggatacgaaatcaacggtcctagtatatgcttcgatcccacttaaggttgtagtcaaggaacattgagtaacttacatgtgagctgatgatcatctttgatatcatctgttactggtgaaataaaagaattcgctaattcgtcatcaagaatcaatgtccattcctgttctaagcttagaagctgcaaagagagataaggaaaggaaagcatctttataataaaatccagatcttattgctttgcttcctcttgcacatcaagaacaagagaaggcttatactcaacataaactcgtaccttagttagtctggatccaaattctttccacttgttaatcttactctgctccaaactgtcaccaaaagtgaatccatggactctcgctaagcctgtgagaacccataccatacttggatcagtagataagaactataaaaaggccaggatcgtaacgcttccattgaccattatcccaacaatgaaagcttggtatggaagaatatatgacattgatttatgccatcgttgatggtcctctaaaactgttctactgtacttattttacttaaaaatgagtaagacgcatgttcagactagacaaggataatgtttggatgttaaaaggtcatactcactttctctgatctgtgtgaccaacccttccactgttgttaccattccaccaagtgtaccaccagctagctccaaatcaagttctgggattttcactcctgcagtgtctgactaatacacgcaacaaacaaaattaaaatttcttgccatatgggaaggtgctgctccaaatatatataaaaaagtatcacacatttcctagcatacatagtggtggttcatacggttttctactatgatatcgccatcagatgtctttacatatataccaaaagctaacaatgatcaaacaagcctattctacatctataccatacagttattacataaccaactaaactttagcacagggctagattcattgtcaaacctttaccaaacttaaactatatacattctgtaagggcatatactttaaccgtaatgtgacattctcagctactttaagatacatagaacgatatgaagaaacctctattggtccaccacacatccaacagttttactaaaggtgcaatactatagaaaataaacaaattgaagcaaaaaactaaccttgataacatcgcggctaaggtcagttatgttcttcacagagagcgtaattttctttcccttttcaggaattgcaccaccaggcttcaactgttcagaattacccaaaaaagttaataacctaaagaccaagcctgtgtctgcaaaatcttcgaaaccaatgggaagccaacctcagaattccgatagccacaatcatcacatgtagatgccatgacgataacctcctgaaaatacgggatttctatcttatgtcaaggcgtaacagcatcgaggagttcaccaacaaacataagtgtaaaacttgtttcagagaaccaaggaacggctacagagttttgaaagaatactagtaacgaacatccgtgtctcacacagctttgtacatgctccgcaagttgaagggaaagtcatcacctgttaaaaatgagcaatagtaacgttatatgaactcaccattttagttttaaactctcacaaaacaaccttttgacattgatttcttatctcaactcaagtgatcataacattgagcttcaacaaaactattccaaaatttgtagggtcagaacttacctcttcaggcgcagagtatctaaacaagttatctgaaatatcagtgctattactctgcgcaatagcccgatgaccagctgttgctccgatagttccatgaggtagagcagttgtttgagtagaaggtgttcccaggcttctttctgactgtccagtctgagatgggttagtaagatatccaagagttgcttgttgttcgggtgtacgctcatagaacttgatcgttagtgagggatctaatgatggagcatgtctgtcatatgttgtaaacttgtgtcataagcagataaaataaatataactacattttattatggtacttccaagttaaatatccttacgggttctcaatgaaactgtttccagcaggatcatccaaaatgaaggtgaatgatgtctctgctttagcacaagctctcagtttagacaagaattggtctattgcttcagctgttttaggatccactttctgtttcaagcaacatatatagtttaagattcctgactataaaacaatcaaacttgacatctaaaaaaatgtggagctccaagtcagaatttaccctgcgttcttcttgaagggcactcagttcatcagcagccctggatagtatcccttccacctagaaattaaacaaaaaggggagctgggagcgtcattgacatggaactcgaaaatgaaaaaaacaaagatcttaaacgccattgtataggcttattctccaccaaaaaatgagttaacggaaacaagatattcccaactgctaacaccagattgaagctagcaaagaaatactgatagggctccgatggcaatcttctcaatattcatcgaccaagtgactagcgaatagttattttgtcatgaatagaccagaagatttttaggttgttcaaagaaacaactaccccctaaaaatgaacagtttgtatcacaagatggttaagaggacttaccgtagataaactaccactttgggcctctggtggaatctcaaaatccagttcaggaatctgaatacatatattaatgcaaactactatcagtttccagcttcaaatcagtccagttttcatattataagaaggaaactaattcacagttttcagggagattaggggaagctgtttcttataaatatgctcggttaagaaaatactgaatccgaagatgcattgaatttcccagaatcagtaagagaactcaccttaatagtggctgattcagattttacaacttgccggtcaaatgtctgcattcagagagaaataagaaggtaaaattagcttagggagcaagagacaactaaagaaagataattcatgttttttcttataagaatggcaggctacatgctacctcataattgcatctccacatgaaaattataacaaacttctattgaaaagaacaaaactttagatttgaatcaatgcaccaaccttcacatcaccagctgaaacctctagatggtaagagcatcctcggggttgaatctcgccagcaaactgaacttcattattcctataaaatataccagagatcaagaaaaggcttatcttttttaattgagaaaatagacaatatatagtgtatctcaaatcaaatacttaaaagcatctcaaaatcataagaagttgtacctttctccgcaatgcggacattcaaatgcagatattaagacctgtaaccagaaatatgttagcaggaagcttctaagctaacacaaggtagagaaaattctaaataaaacgtcgaaccaacaaaacttagtggattgttagttttctagaatgtcgtctactcacattagctagaatattaaaaatctgaatctagaaaatgaacaaaattgggtactctttaaaacatacctttctgaagtgaggtattaaggtcaatagaaatctagttgttccctggaaaagaaataagaagctactttatgcacagaagaaggatcaagagaaagaccaagaaaatctcatacgttggactctttacaactgaaaaagatttcagccaaaaataaactagtagctgaaagttcacaatataaagcttcccaattgatttccacagaaccacatatgttaatatatttcattccatcaccaagacttagccaataaggtctgtttcatccccgctataatacacttcattacaatctcaagaaccattggactgtagaacgaactaatgttattaaagccaacatgtacaatttgggaacaagctcaaactaaaaagcaaagactaaagcgacgctagcctgtttcctagacctgtataacctttcctcctatgacaaaggataaggactacataacaacatcaggaatctcaataaaacttggtaaagttcctctaaatctcacaaatacttaagtttctctatttccaaccttctcccatctcaaatttgatgaagatgctccaaactggcaagatttcaaaggcattgagatggtttcacttctagtaaatttacaaagcaatgagaaaacaaatacagtcactgcaagctacgcgttcaaccaatttctccatccacaaaaagataagcttacacagaaaaattccaattgtaaaatcaattggaatatacacatagaccttacctacaaaccgagacacctaaccaaatgtaagtgtgtgagagagataaagagacatacattttcaccgcagcgcatacacatactctcaactacatagagaggagcaccaaaggaatgatcagccgaaactgcttcaactaccgagccaacatcgatttgttgatcattcccgttgtccatcacctccaaaaatttctccaaacaatcctatgaagttcaaaaacctattattagagaaaacaagctaaaaagcatgaaactttgtgctcattaacagctagacaaaacataaacttatatccaaaatttccaaacacaatccctatactaagaatttatataagagctctttcaaaggtcaaatcagagtgggacagagtgctcaagataagttcctagaaatcgagaaacagagttcaatttcgtcaatctcgagagaataataagaaaaaaggaacttactttgatatcaatttctgatgtgagaagcgaatatgtgtatcaaacaagaaaacttaccgagtaaaagagacaatgcttgaaattttactaaactcaggcaagaagcagaggacaccgaagagctctagaaacggcgagagagttgaagaagaacccacgtgagcatcacgtgtttgtcttttgtttattgtttatcttcgggtcgggtaaaccaatcctactcaccgccaagaattgttcttgtccggtctggtttagttaaactgttcaaaaccgaaacctaaacgacgtcgttttgtctgagtaaagaaaagggttttcgactggtgaattcttcttctgattctcgtcgccggtagttgtttccacgaaaaacaagtgatggaggaagtagtggtagttgcagagccaccaccgaagattactccctttgtggaatacgaagaagagcttgaagatgatgacgatgatctctcgctttcgtcagattccgatatcgctgaagctcttgattggctagacggtaaagacgatgacgagctaattggtggtggcttttctcttcatgctcgtcgtcctaatgctcacggtggacatggttcacgccctaactctagtgctcttcagcctatttcaaataaggcccagaagcttactagtcacgttcgtgcttctcctttggaggtaccgtttcttatcgaatttttgtttagaatttgaaaaaagcttctgaatttcttataaagatatgatctttacatttgaaatagcttctgaattgctcatagtctctgctcaaatgaacattgagtttatagggtttaggttcaggtaggttttgtgtagctggaaatgtgattttgagttaattgatgatgcagggatgggaaggaagagttaaagttgggatgtcgaattctgtgacaactgcgattcgtggaagtcttagagatacagaaattgggagaagtaggaatactgataaagcggaccgggcaactgttgaacaggtaagctctaactgtcacacaaagattcgggtctgatgtaagcattgtgttgatgttgttttgttctttgttccaggctcttgatccaaggacgcgtatggtattgtttagaatgcttaataggggtgtgtttaacgatgttaatggctgtatctcgacaggcaaagaagtatgatacatttcacaactctcatatttgagattatctgtttttattcttttttgttgaaagcactctctttaattattgtctttcaggcaaatgtttatcatgccacaaaatctgacggttcggaacttgcaataaaagtgtacaagacatctgttctggttttcaagtgagctattagtattacatgaatagaggttgttaatgattttgttttagtccctatttttataactgtgatgatttcagggatcgagatcgatatgtacaaggagattaccgttttagatatggctactgtcgtcacaatcctcgaaagatggtgaagacatgggctgaaaaagaacagagaaatctcaagaggtaatacctacaattttcatatggaatcttgttaatgtattgtagggttgatttatcttgttattttcaaaacagaagccggagaagtagtcacttttggtcacatatatgtaacaatgattctggtaatttcttagttggttatattatacatgtttcattgccaggcttcatgcagcaggaattaggtgtccagctgttatacttctacgccttcatgttctagtcatggagtttataggttcgctcttatgcattatcttctgttttaatcactcatttccacgcaacactctactctgattcattagcatatttcattgatgaagtaacgatttttcagctaccaaagatagttttatctatttataatttgcagggagggatggttgggctgcaccgcgtctcaaggatgccgcattgtctctggacaagttgcgcgagtgttacttagaggtatgtcttattttctcatttagagggtcctgagtgtatcattgtaatactttacttagacctgatatgtcacgattaatctcttcttatttcagttgataattcaaatgcgagtattatatcagaagtgcaaattagtgcatggggatctcagtgagtataacatactttattttgaagtgagttttgatttatctctacaagggtcacttatttgatcgtttcgtggcagcaaaacgaaacaaatataatgatattatcttgactttttcaggggcacctttatataattgatgtttctcaatctgtggatctggaccatcctcttgcactcaactttctacgggaagattgtgaccatgtctcggtaagtgttaacagtatcctgttttaacaatgcttaatatttgactggaatagggtgtctgatgtgtggatttacaatcacacgcaggattttttcaaaaaacatggtgtggctgttatgacaatacgagagctatttgacttcatagttgacccgacaatttcagacgaaaatgttgatagctatttggaagaggtaatgtctaactttttactacttgaagtttgtcaggtttaaagctgtaacgtttattaatgaattatgtaacaatgggtaggtccaacggaaagttatagagcgaggagagatatccgtagaggatgaaatcgcggattctgtattcatgaaggttcgtgaagtgtatccagtcaatagaattgatgtgtgaactatctctgtagaactatcttatcttatcgatttgtaatgatatgatcagtcatacataccgaaatctctggatgctgtgaacaacccagaggctgatgtagcgaagataacaagcgggcaggacacaggagacatgctgtaccaaacgataacggggcttaaggatgctcttcctaaagtagacgagcagcaaatagaggtgaatgctgaagaggaagaagaagaagaggaagagggaagtggagaagaaagcgaagaagagagtgaaaaagaattgggtcctgaagacaagaaagctgcaaggaaagagcacaagaagaaagtgaaagaggagaaacgagagtctaggaagacgaaaacacccaaatctgtcaagaagcgaaaaaagaaagtctctaaaccccacaagactcgttagcatcttttgactcccatacttgtatcttttactatggacccgaaggctcttttgggtctctttatccaaaacagtaagttcttgtaatattcacagtacgattatgatagatcacatgataggtttgctggtgttttgagaggactaaaataatttttgttacttgacaattcgactaatggtagtctctaaatttatcaactcgacctttgagattgttggcttcttattaaaaaaaaaaactaatcctgcagctagtttatttaggtgcaacgaagtgcagacgatccatctctcttggtagccactttagaccaagttgctttactacttgggcttgagattgatggagatcctattgttggttctaaagttggtgatgaggtttctatggatctgtgtggtagacttttagggaaattgccatctgctgctaacaaagaagttaattgttctagggttaaagcttaatttccttaaaagaactttctctgagtgtcctgaagatgcttcttttgatgttgttgaatgttatactcgagcttatctcttgtatcttattggtagtaccatttttgctactactgatggtgataaagtctctgttaagtaattgcctttgtttgaggattttgatatgcttggggagcttctgcattggcttgtcttcaccgggctattggtaatgcttcgcttaagtctcagagaaacatttgcggctgcttgactttgctacatgttactatcttaatttttgtggttttagttttatgagagagttcggtatttagtagaagtaagatatatgattgtttctcatatatgtatatagtgttggagttattttcacctggatattggcaatgtggtggatgatggagcttacatggaatggtatgctaggatcagtattaccaaactgtaccgagaagcgtttctcgagtcccaagtcatgaatatggtaaaataggtttaatctttatcacttttgttattagaacatcttatacttgaaacctgcaaaaatcagtctacgttggttttgtgtagattgcttgtatgagggaatttgaggaatctgcttcagggatttcactggagagattatctccagtagagagggaagtgatggagagtgtgaaagatactttcgctaatagtttgacgtttggaaatttgtctcggaaaaattggattcctcccggaaatttgtctagcttgccgtactacattctccaatacactatagagtaacagaagattagatacaatgttacacctcttacatagttccattctaaaaaatacaataatatgagaagaagaaacttgtgacgtaccgtatcttgtggtagcacattacaaaagtttgctctacttatggtttcttacttcaagtcaattaaaataaaaatgtatttatcagaaattgttaacgattaacaacagctaagtgttagcttaataccgcttggagttaaacatgtaatattatcttcaagcactcttctgctatccaatgtcgcacccaaaacccgcttttctttgatttgacaacccaactttttgattcgccaaacccaagtctcaaggtcgcaccgatgatgtcgtcccgtctgatttgttgcaacactagcattgacaactcgtctctatccactaggatcattacattaacatgcaaatagcacaagtgatatatcactcggtttcaaatttacgtaaacttcatgtatttctctctcagtagtccatagtgggtggttaaatagtcaaattttacatttgccattacattggtagagttatatgatgactgaagctttattagcaaactgaagactttgcgaaatctaatatgttttttcataaacgggctaaatagtttgatatatgtatgctcgcatgagagttaattagacggaaacctaacgaacactctattaaaaccctaacggtatcataacaagcaaaagtcatggtgatggtggtgaattgaccaatagttcgtccatcagtttattgtccgctacattaattcaattttgaaatattttttcagtgagagaacaagaaaagataaacaaacgatttaataaaatctaacaaaatacacaagaaacctaatgaactagcaatacaaaaatcaattatgtgcagaaatcgaaaggctagaaaaggaggcaaaggaacgacagggtgtaaactactctcagctgaagctaaatgaagaactcatcgctgaagtcaacagacttaaggtgcagctggtgagggaatgacaaacccatgccagttcgagggttcaataatgcaaccaatagacccaaacatgttccagcagcaactcaacatcaatgagttcaatcagcaacaaccattggacccatacatgttctatcaacaatgcaacatcaaatgagttcaattagcagcatccattggacccaaacatgcttcaacaacaacctaacatcaatgagttcaaccaggagcagccaaaccaagatttttatggacaacccttaggatgttgaggtggatttggcaatcctattggttcaaggattgaagatttattcaagttgtttgtgttttatgtttaaaaggtcaagttgagagagtgacaaatctatctaactattacgcttagatagatatattattttaaccgtgaaagggttgaaacaattgtgacagatttttttctttcactcaagctttttcctttttattgagatttatctatattttatccaatttgttaaatttcatagaaaaacatgaaagtagtcttctcagatcttccatctttccgactagtcgatgattgctttggtcaatgttccaaagagtcacattttccttcaattcctccttcttttgttgaccttttcttcaaggaggaactaaaaaaaattgtgattctttgaaaagttgaccaaagcaatcatcaactagtcgtaaaaaggaacatttcagaagattactttcatattatttttcagaaatttaacaaattgaataaaatagaaaaaaatctcaatagaaaagctccacattattgaaaaacaaaaaaaaaacaaaaggtcgcaatagtctgaaccctatcaccctctcacggatctatctaagaagaacagttagatagatttgcttctctcccaacctgaccttttaaacgtaaagtaaaacaatttgaataaatcttcaatccttacacaaatatgattgccaaatccacgtcaacttccttagagttgtccataaaaatcttggtttcggtgttgcttgttgaactgattgatgttaagttgttgttggaacatctttagatccaatggttgctgttgattgaactcattgatgttgcattgtttacggaacgtgtttgggttcagtggttgttgctaattaaactcaatgatgttgagttgctgctggaacatgtttgggcccagtggcaacatcattgaaccctcaaactggctggggtttgccattctgtcaccagctgccaccttaactcggttgattccagcaataagctcttcatttagctttagttgagagtagtctacacattctctttcttttgcctcttcttccagcgtttcgacgtctacgcacaatttatttttctattgtatgttcatcgagtttctggtgaataaaattttatgtgacgtcttttgatacaaaaaaacaaatttaagaatgcttatctatctatttttggggattagttcatttatcaaaaatgacaagtgaaagtatgtttaagataatgtcttctgcaactatctcaaagtttctgttactaaataccaagttggaaaattgctttgagcccaagaaaattattttccggtctgtgtttgatattgcttaagaacttttaaatgctatcatgtattcgtgtctactacgtagaagtcgagcaatagaacgtcactgaagtttaattcattaaacattttttccataagccaaacatctattgtagaagtacaaatagaagtttactattcaagcgctttgcaaagtaatctgaagtttactatgggtggcgggaggagcaagcaattccccaacatggtatttcactctaatgttacctctaatgttacagaagtataaattgtctgtagggatattctcttaaatgttcattcacttgttatccttgacatcagtataacgatgatctttcttaagattgttgcttgtatcaagacgccactaacaagatgggatattattactaggaaaacataagggaggttattaacatttgttttcatgtttttcccataagtttctggagcatatcctagctgaaaaagacatcaaaaacttcttatccttgaaggtccacaagggtatcttcaaaaagtttttgttgtgccgacactcgtagaccttcaaaaaatttgaagatacccttgcttaataaattggaagaagattttcttatcaagattctaatcatggagacaagattggttacttaaccaaactaagaatgttaacataacaaggttatcgataatcataaaggaaagtttcatcttgaagttccaggattgtggacatcatggtggttttaaaaccaacattaaaccaaaggtcaacatcagagattgaaacaatctcgggaggaaagaggtttataaacctagtctagcctgagcaagtaacgcttcacaactatgtcaagtctaatttgaggagaaccaagtttaagtaaaacgtattttatgaaatattgcaactatcttgggaatgttttgaattttgcgaccgcatatcggaattataacgttactgacatcaactatccaataaacgacatagtggatattgatcagaatagtcactattcgtatggaacggatgacaaatagcttatacatcttgaatatccactctgcatccagccttaatatataaatcttatatacaataattgaaaagtattggcaactgaaataaaaaagaataacactttctttttatatgtaaaacttaagacttcccctttttctaatagaaggataaaaaccatattcgccaaaactacaatacactaatataaaaagacaaagatgtaataaaatcaaaggtaattgataagttgcattatttttctagtgattattttggagaaattcttttccaaagtagtgaatataaaatatctaaaatgtttaaattaatttacaatttgttaacttgattgatttatctaattataaatcatatacttgttcataaacgattaaaaataagctattaacaataaaaaaaaaaaattaaaactaacctttactgtatgacatcgatgttacccatcatatacgaagattcaagatagtaatcaacggactatttgacctcggctatgtttcccctcaattcaaatatcgaaaacgatctctttagtgacggtaatgcaatattcctattcaaaagtcatcacaaacaaaatttgtagatatgttttgctctcgactaatacaccatcttcattttctttttgagcgctgtaacaacccttaatacaccgaggagagaaattttcaatatacaagctttggcggagaaaacgaagacttttttttagttgctatctattacgtatacgatgcatttatatatagaatgataaaagaaaaaaaaagtagaaattgtataaaaggccaaaatctttgatattgaggaaataaatcatcttttattttgggataagattttagagttcttaaattattcctttttcttaggattttttaagattttaagttagagttaagtacttacgtttaaatttttttttcaaaataaaaattattttgttaactttagtataaaatatgacaaatttttttaagagtctcttatataattgagttgtagttctaatcgtaaaacgtttttaaaaataatccaaatttggatttttatttacttaaccaataaagaaaactttattactagtctgtatattttaaaaatatttgtatttatcataattatttttttcacgtataactaataaacctcactaagaaaaaaacttgtttatgccttagctgttataacaaatgcattagctgtttagtaaataaaaaaatagtaattaaaatcttttcttctaaattctaacttcaaagccaaaagtagtcaacatagacacttttgtttcctattaaaataataattattttcttaatactttaaatccataaatcctaaattctttaacaaaaaagaaaaaatcctaaattttgaaacaaaagggaaacaaaatcctaaatttacttattacactatctctcaaaatttaatatttcctttctattatgcttgtgtccaaaatgaaatatgagtacgaatttaaattggttttacattaaaaatcatctaaaattagtgaattgctttaatttggtcattaaaaaaaaaaactatgatgtatctgtcaagttaattgaggtataatcaacaaaatctagaatcttagtcgggactcaagtgttgatgtatctccaaagtggcagttttgattcccaaatccaccttaaattttttaattcaaaacgatgtcattatgtaagttcacagaaattctaatccgagatttaaaccagttattttttcgtcaattgacttaacaacatgcacaaaaagataaaatcaacaaaaattatatatttaattctaaaatctgactacaactttggcatttaaatgatattttgaaagtttttaaacattgacagtttgaaaattcatgttttacttaacatttctttcgaaatataatctcttacttataaaagattctaattgaggcctcttagagtatccacatcagcacatgaaaaacatcctcaacacaattattaagtttagaaaaacttttccacgtcatatatcctatagatgtcatcttgcatttgaacacattattaataactgaccatgtattaacttctatgtatcaaactaattgattgctttatcaatagatcgatctgtgttaaaaaaaatcaaaaaaaaatcaatagatcgatctaagtaatgaaatagattcaggttattttcctctttcagtcacatattttttcatggagaacaaattctctcgaagcattttcatccaaatgatttatcaaatcgttgatttgataatataggtatcattagatgcagccaaagttatcaacgtcacacctcgatgttcttggatccaatagctcagccaaaacagatgtaattggatggccgaacacataactcatccgtgaccgacctctctaaaccatgctcaaagatttcgaacaattgaaaagaagtactatgattggatactgattgctacaatcatggaataatacaacaaaactgcttaagaaaagctcaccgatcatgccaagcaaactggtgttgtgagtttttcacaaaacatgaaatcttcggctgcaaatgttgcatgtagatgaatgactggaaaattttgaattgaacaaaagaattgtacattattcagctcatttctctacaaaatagtagataaataagttgaacaaattttctttgtaattagtttattttctaacttttttggttgaatgggttaaatgacttttctaacttattcatctcaaatggtaaaaaatgagattaataatttttcaacgcagtcaacttgttattttgagacaaccatttgcaccatccttcttgcttgcatcctctttcactttgtctaatagtagtaagagatgttcatatttcaatagtaatatttattgtactacagaaaagaatgaattacttttaatgtttaagcttttcttcatcacattgtatcaaatcttaacagaaccacttgataaacgttgcctaaggctacaagtataagtttattttgttaaaataatccccatcggcaatcataagatgcattttgttaaactaaagagccaatcagatttcaaaacaatactagcaagtagcaagctaccatgcattttattaaaatcatctcgatttctcatgtaaatattactctccataccaatattgtggaaaaatcacatataaattttttccttaaaaggagaataacagttggaaaagaaattatacaagagatatagattaaaaatactagcactcatagcccggacgtaggccagattaatccctagtgtaaatataaaaagtatgagtttgttacatcttgtaagctaaacaatttgctaaaaaatacttcggaattttttcatacaaataaaactcagttaatgatgagccgaacaagcaggccggacccttggcacaaatccaagatacatgagtattggacctccaaaatgtttaagccttttagtaacaaaattaggcctccaaaaatatttgttattgcaaaactaggttctttgtttctgtcgacaacaaaaaaaaaggttctatgtttctaaaattttcatatttagtttcaatttttaaaattatctatttactatcgcaaaaataggccttattttcctgaaattttaagatttgatctcaagttttaacttttatcgacaaaaatcatccaaaaaaaattgttgtgtattaggcctcgtgggaagaaaaatacttgggttcacccctaggggtaattaggcctcataaaacaatttatttacttttagtaaagtaatatcaaagattttgtatgtatgccatgcagtgagtaattaacttttttgcatgtatttattatgaaacatcaaaacctttcatatgtaatatacattggttggcaacttcaattattcataacaaagatacttttttaaaaaaaatctcttctcaaccttttcctatcttaaatttgtagattacaaaggcaggattaaaatgaaattcaagaagcagagaacatcaaagagctctagaaacggcgagagagttgaagaagaacccacatgagcatcacatgtttttcttttgtttatgtggccaaagggcttcatccacaattacaaatggtctattttgttgtgattaaacaaatggtctaatatggtttttaagttttataaccaaaaaaactaaagaaactggagtgaaactaaaccgtaaagcatattgtttatcataaattttgtttagtttaggttaagaacaaatatgtacatacagtttggtaatggagacaaagttcttagattcacttaacaatagataacacactttgtatggtgtgttgactattggttttgatgtttttcttcttagtgaattaagttgatcaaactagagaactttgtgagcctaacatcaatacaatttgaaagagataccaactaagagaaatgaacattttgcatgaattcctgaaacatcaaacatcaaacactctcattgcttggcaaacttcaattattcataacaaagatatttcgttttctctataagaatatacactcaacacattccatagtttaacgcatagacagagaaagtagaaaaatttactattgtaaatttgaatatttggcactgtacatgagagtaatagagaccacccctgaaggattatgaattcactctttttctgatgaaagctgcttagcgagtaggataagcccagctgttgtgaagcctgacaagacggttgacgcataaaacagagctagaagagaccctcttagagactgctcagaagaacaaaaacatgacaaaatgtcactctataaacccccaaagcatcacaaagcagtatcatcgacttccacaatatgataagcattaaagaataagagtagaatgtttgatccactaacctttccgattagcaatgcattgtcatttgcatactgcaatgagttctctggtatgctttggatcccttgactgatttgccatgaaagtatcctgtttgatcaaagtatgaactgtttttattgttgctcataagagttgtgatacacatttttcaaaagtaataaacaagcttccacaaaatacccgtagatgaacgcaatggcagctccggtgtaggctttctctggagtcacagcaacttgaagctccccaaactgcagttcaaacaaaaaattatcatctgcaaagtagcttcttcagtgaacatacataagaaaacagatattatgctttaccttaaacatccttgttcctgacttagattcattgctgactgaaacagatgatgtttttgcagataagacccctccagttgtgatcatcgctttcgcaatctgcgagttctcaggaacattagttcttatacgcatgaatgattatacaaacgaacaatttggttttatcattgtggccgttaagtatgcaaactattgcgattaactgtcacttacatttacatttttactcagtagacataatcaaagaatcagtagaagaaaccacacgtcatttgagattcaagtaccttctgtaattcacctttggcatattgtcccatgccctggaacctttttcctgcagatatcaaacgcttcccaaaggctgaacaaaaaaagggtaaaagcaggtatgattacaagagagtagatctagaaagatgtgtatctagatactatagagctacttcttgtaacctgatctggcaccatctgttaataaaatttccagttcgggaagtttctccactaaactacgagaagttgatgtgtcagcttgttcccaagcacgagacagattcagtaaggtctccccaagctcttgaccacactacaaatagatttgagaggtcgcaattgtaagtccctcaaagtttaagaaagtgaggaagggaggttagcttgtatatcacaatgaagcttagatcatttgaaagattccataacgtttgaatgaatgtgaccctatcactaactgttaaacaagattacaggaaggtttctgtctgcggacttaaaataattgtatgagctgtatgtttcactactcacatgttacatctaactgcctaaaagtgaagatcagtcttatgattaggctcctaagggctaaagtaatacaaaatcatgtatttagctcagatatcaaaataatggagcagctatattctcttctgcaaatatctatcattagttgctagtaaatccattaaccacacacatgacaacattccttccataaatcatattgataccaaagatgaataataaagaagaaacagcttatgctacaatagggatgaaactaatcacaaatagctaactccaaacagtttagaaaattagctaattcagaaacttgaaatttgagatcatttagacataataatatatgacagccatgtcgatactgttaagcaaactataccgttaatgagaatactatactatacccatataaacgataaataccggactacacattggtatatttggcaatacacacaaaagcatagaatgctattaagcatataactactttataacacagcaaatcaccaaaggttctttttctactcatttcctaagattttatgctggcacaaatgttggaatatagaactgcatagcagatgatagtttgtttaccatggagttgaggctacaatgaaggaagagcatacacatgtagttcaaatacatgaatatcacataaaagatcccacagatggaatagctgttcttgaactcagtactaaaataatcataacctcgaaccttaatcttataactgttcatgtggagaaataggaactaacctcatcgatgacaggtccattggagagatcaaaagccgcatcattcaactaaagaaaaccaaaactcaccacataaaaaaacgttgcccaaaataaaaaaaatcaagtttttaagcaatgagggcttacttacatcgagacgaagatcatttggtagctgctggaagtaatctgatggaagatcaaaacacttctgcaacacacacaattcagaacccattaagcacaagaaactctattttaattgatatcccataatcaaaaacagagttcagacttacagagagttgtagaagaagggatttggaacttggttcttctatttctagaggtttagtagaatctgattccgtaagagcaaatcggagagtcaaggatttcgaaagattgtgccttttggacttattaggttttagagaggacgaaaaatgaaaacttggctgagaaaagaaaagagtggaagaagagagactatgaagaggttggaggagactaatagaagaagaagaacaagaagccatctttcagttttcctcaattcgtttgtgtttgggcaaactcagaaacaattcgtgaacaaccgaaagatcttttagacaatgaatgtagtagagtcgaagctgtttcttgaggcatcatcgtttggttaaagatttgtctttttcattggttccatatatgtgttttgtttgtctctctgtgcaatgaacttgcgccatttgtctggtcttcgatttttgtgaatttttttggaagaaacttttttttttgttaagttttttggaagaaacttaatcatcataatatcactaatcttcttcgtttctgttttttttttttggctaattttttttagggaaaaaaactagattaaccaaaataataagattaattattagaataacttataaaatattagagttaaattgattcttttcttttctaaaatatcattttcttatatgttaaaaataaaacaaatacaaaaatatcttttaaaaaaaattccaacaattttacaaaagtctatcgtttagttatgggcagatttattcttattccgtagacttttttaactgcgatagtttttttatagcagacttttttggttgacagacttcttagaagatagtgataacagatttataaattatagcagatttaatttgattgacagatttttagtttattcaaccacagactttcatataatttgacagacttatttttttgtggatgtttttttacgttaagtgatggcagatttataattttgttaaaaaaatctgtcacattgtaacagatttgttgtcaaataattaattactagaatgacgtgtaacgataaccaatttttttaatgttatgacagacttgttttatgttataacagattcttgtaattttacacaatatctgtcgtttgatggcagatttgttttctaagatataatattttgtgttatgataaagttgttttatgttgtgacagataaatttatattaccataaatctgtcgtttgatagcaggtttaataaagaataaaataaattgctgaaatgattttaaaaatattttatgttatgacagatttgtaatttgaaatccttatggtgaccgatttatagttttatttttccacgattttcttaatagaataatactaactattgtaacagttcttttatttggaaaattatatgacagatttgatttttttgtcaattatttttagaaattcttttaaataccactaaaatgagtttttccaaaaaaaatactataatgaattttatttttcaaaaataccacaaatctataactaaatttaatattcaaaactaatttctacatcctaaacactaaaccttacacctaaaaactataacgtaaatatacatagtcaacccaaatatataaaaaattatataacttcaaaaatcagttatggtttttttttgcatatttttttgctataacaatatttacaatggtgacagttttttttcattgtaatgacagacttattagagcagttaccatatttaccactaaaacattaaatatcgacatttagggtcaattggtctttttacacaaaatttgtgttagtctagttattcatcactaatgagagtcattttagttactattatccagttttgagtcaatccgggtaattttcagttttttttatcatagagtggatttgctctattacatttatcattcttagctgagaataacacagatttgttaattccaacaaaaaaatacataatatgtgagaaacacacatctaaataaaaaaaaatcaagaaaaagatcaattataaaagtgtaatatcaagcatgtagcaaataatgtgttaaaaaaaatcaaaacagtacatttaaaccaacatgtatcatgtactacaaataaaaaggatttccaaggattacacattttgacttattagatttttggataaacaggatgttacaagtagagagagactgtttagattagaggttggaggagattaagagaaactaatgtatttgaaaactaattttatttgtatttcctcaaaaaaaaatgaggagattgcatttcctcaaaaaatttcctcaaaagtttcagatttttcttttttctttaatatgcatatagcttttttcccaaaatccattatctgtatatacatttttgaaaccattttgtgaaataaatcatgtagttgagacttatttacaatggctgccactggattttaatgtttgtttttgataattagaaagaaaatcttcgaattaaattgtgacatttaaccatcttcctaaaatctctccacattaactacacgattatttactgaaataaaacttccaaaatatttaatatcatttaattactacaaaattatcatttttgatattgtttttctccatgactataacaattcgattataatcatcaaagcgcagagatataatttgatagcatttaattactacaaaattacaaaatatttagacaatgattcataaatatatcataaataagatcaacattaataaaataaatggattttttttacgggacgggtttgacaggacgttacttaataacatttgtaaattataaaataaaaatattttataaatagatacaatttgtaaacttttatatatactaactttaaaaaataaattgtttccgcggtataccgcgggttaaaatctagttttaataacaattcttgaattttgtaattcgagagaaaagtatcaaactttgacaagtgaggacagaaaaatgtaacaagctaaaggaaagtttatttctgcgtttatatcgtttactttcaattcttttttaaaagatattatgtatcgctcttacgagtggaataaggaactaaaaaaacaaaaaaatctgcagaattaaaggaacgatgactcctctttttttggtcatcatgcaaacaaaatcagtcaacaatcctatctcaccactttttgaggtttaggtttatcgatttcgaggactatatgttgcatgtaatctctctctatgtgcatggactcttccttcggtatcatttccagtccgtggaaaaatagtctattttcccacaaaaatatgtatatcatattagatagagcccaatttatcattacgtgttagatatccccgaaaacatacttatctacttatatctccataaattcatagtttgaatctcgtttcttcctaaatttatgtggatataactcgataagtaattttttgggggacatctagcacgtaatcatatattgggctctatctagtatgatgtgatagttattgtggattaatcgtagattaatcttttcatggctatatcaaaatttaattggtgggttttgggtttgtgtttcatgttgatgtacgacctctattattctgtttccgatgagtttatcttgttttatattgcaatcatctaaatctgaatttttcttttcggttttgcatatttttcaaggtagaatttctctctcactcaacttcgtttatgattttcctaaaatggcaaataaccaaaacacatctgttttgagtaccgatactatatgagctttgattcaaggagttgctactcgagaatggatgtacttgatggatgttttaaaaactattgatgcttcagtgtatttgagaggtcaaactcttgatgaaagggaaaaacagcttggacaggagagtcaagaattgtaagttatggttaccaagaaatcgaatcgcttcaacatcagatttcttacttagaaaaccaccacgtgtctctggattttgattaatctaatcttcaaaaatctttacatgaataactttgctgaaatttaaaccttagtctctagaaatggaggaaaagatcagcatcttcaagtctctctttttctcgagattcatatcttgaataaaatatgtgattcaaaagttgtgtttgtcgatttcgataaaatttatctctttttttagatgtcaaatgtttagttttttaccatatatatttttttttttaatcataccatatcttgtaaacatacacaatttaagagtatagaatgttatagtatattatatgtaatatatatatatatatatttttgtaagtgtatatttgagtatatgattattaatttatatatacgggcaacgatgataaataatttttcaattaaaaaacgagaaaatatcattaaaaacttcaaaatgtattttcgttgaaaaaaaagctcaattatagaaattggcaaagttgagacttttctccaacggaaaagcacaattgaggcttttatgatatgtatatgtcaattataagcaaactctcttttttcctttctcttatttctcaatttcctttaaacaaaactatgaaaataccacattttaagtttttatacatgaattaggatcatcttcgacaagtctaggtcctgtgaataatttctcttcttttatacctccaacagatgatatttttagctgaatctaaatgtggactgagaaacacacaaaatatgtaggaaagttaaaacccaacacatagtctacagaaattcaagataaagatcaactcttaaactgtaatatcaagcatatgacaaatagtttgctggaaatcaaaacagtatagttaaacaacatgcatcatcctgctaaatagaagaagcattttaaatccacagtttggttttgttctgtttgttttttcacctccaagaggaaccaccaagctttatcacttcttctgaacttgaatctttccttgttccaaatccttcatcccttttctgactacttgcgtctccatacaaatcttttagctttgcgagattgctgttcactgtcaccgccgatttctctttgttgctactatctcttttaggagtcggttcacgctcaatctgcacactcctgctcctacttctgcttctgctcctgcttctccggtcatgtctacttctgtcgtcctcataatcattgcgcctgcttctactatcatagtcacgccttgatctcctatcattaccataatccctttccctttctctgtatctatccctccccctctctctttcgcggtctttctccctctctctttcccgttgtctatctgagtctctgtcagaataatagtctcggctctggcttctacgtggggaccgctgttgtacttcatcgcctccatttctgtcataaccagtcggtggaggacggcgaacaggagaagagcctctggtggaagcacgatgaggtgcacgctgaccaaatgaaacagagagggatgcttttactgatggtggacgacgggcagtgtcttctgagccacgggtcatgtctccggttgaaccagaaggtttagttggtaaattcatcttctcaaggtttgatacaatctggcgcatgacaggaacaggtatacgaggaaacaaagtatcaaagtagtactgcaaaaaaaccaacaacagtaagtcagattcaggaattggcatcatggagacattaaagtattatgataaatgactaataaacacatttatagcaaaagctaacggatgtttactaaaacgaacagaaaataaaaaaaatatcgaatacatagcttaggtatcaaagaccattatcaatggtaactagcttagaatctaagctatttattagattggtttgcattgctacatttcactcgtaacatagcttagaatcatcttaagggataaaggtcgcagggcaaaccaatctaatgaattgttcacactaccacaccttaggtatcaaagaccattatcaaatggtaactaagaacaattttaaacaagcaactgtcattaaaagagtgtttgtactttcctgacaaaacatagcccagtgtaaagtcacacagcatcttaccaacgaataaaagttcttgtgttaatatcacttcaaattctcagtatcataaaatatatttatagaccccatggacaacccagatgcatccaagtctgcccagccaaaaatcagttttccatggagaattcacagaagacaggaaaatttgaccatctaatataaagacttgtgactcaccagtccaagcagcaaatcacgtacataaacacccattgtcgtcatccgtccatttgatcctggtgaaaactcctgaagacaaaaaaacataattcacgttaaactgtataccagtgcagagccatgttcaaagaagttggagtgcatgttatgaatttctgataactaggtgaacccacaagtccacaacacataattttctaagcagtaggccacatgatctcatacatactaaaaagggtccagggatctccaagacagtaagagtctaaaagataagatccggtataattgtagccattcaggtcagtgacatactctattctattgttccaaacttcattgtgcgattatctcagtaagaatcctaacaagagcttctccatcaataaaccatattaaggaacgaaagaaaagcgtgatgctaactgacacagcaactttaatgaacccagatgcacgaataggcaattgcatacggtttttcacgagagcttgataataataaaatggtattcataattgtatactactctcagaacttgataaaaactgcttacctcatcatctttaatgtatggttcataccatgtccacaacgtctttgcatctgcaacatatcttaaatataggaatccaacctgcacattcagtaccctgtggttagatcaaaagcaatggacatgtaaaacagatcaaacaagttgttgtaacatgaaaaaaacgcaaagcaaaacaaacattgatataaaatgcaagacaaacataacttcccatacaccaaggaagcatgtatgcactgtctcattaaaaagaaaacacttcagatatatcctgaactttatctggaacaccgggtatcataaacagattatttgtcagtagctacgttctatactgttaaatgggcagagaggtgatcctagagagatagagtagctaaaatagaaaagacacctcaaaccttgatatgcggatactcctagcaaagaaaggtcttatatattttggtgggagaaagtctcagcaactcaaagaaagaatgacatcccaactttgattgtggttgtgaaaatctgctatgaaaacacgagaacaattatgtgtacgctcataccttcaatacgggatgagaaaagaatagtttcagatggaacccagaggtaaggaatgctattacctgactgtaatatgctctataattatttgacaatcaaaaggaacacctacctttttcgggttaaaattgactaataagaacaactcagcttggtaacaagtaacaggaggaacaggtataggaacaagcagcacacactgttagatttctagatcttactgaaaatcaagaagaagccagaagatggaaagacatattttaagattctactaagaaaaccaataccaaaaagacaaggttatagcatcacggtagctcatactttatgcaggacaataatgcaaaaaagatggttaagagattcactcaccgctctaatataaggagaatctgtgtgctttaacagtccatgcatctgcttcactgtaagtttcatggtaaagaatttgtagagaagacaatacgctgttgaaggaccacggcaattcccacccatccacggctccacatgattaacttggttgtagatttcatcaattacctcatgataagtctttaaaccatagagctctttaaaatagtcagaagaaagaatgttcattgaaagaaccttttccaataatgactcatatgcccttccatttgactgtatctccgccatgttttatgaaattgaaaaatgctgagagatacagaaaaagcctacgagcccaaaaaacctgaaagagaaattaaacacattaggaaatacaacaagctaaagcttgaaactttttggccatagatacagaaacaataactaatcctaaaaacccaactaaaccaactattaatcctaaattgaaacgaaaccctagaaatagcaaagcaaaatctatgggatcaacctcaaaattaaaccggaaaggaactaaatttcgtcaatcccagataagaaaaggtgaaaatcgatatcaatttcggaaggaactggtgaaatcaaatcgatcaagctagaaacaaagtcgaatctatgtatcagccggttaaaaacaatttctataagcaaacaaacttaattctcgagaagtttatcaaaatcgtaaggagtaaaagagagaaacctgaaatttgacgaactgtgttagcgattacaggattcaagcgcgagaggtagagggacaccaaaagagccctagaaacggcgatctcgtatcggacttagaaagctgctttcatatttaatttgggaaactttcaaatatgccctcatattatcacgtagtttcacattttacccaaatattataatatacaaatttgatcattcttttagtcttttggcgtagtatatatactcgaaatatcgaaattgcaaattctaccgtatcttagttgacttgttcgtgctagacatgaatgaatacgcctgattcctcaaagctactcattattggagaaagtgaatcaaacattaagagcactgaaacagaacttaagagccatgaaaccaagccatcgttgctacaacactgagtcttttaaaatttttggaaatcagtttgtgacatctgcccaaaaagactcgactcgtacctctctacaatgttagaaccaaaagattaccgaatgacccaacttacaaaatatatgactggttatagcctggagaatccatcaataaattatgcctgcataacttaaacctcactcaacggggtcagaatgctaacgcgactttacctctcttgtaacattctccttgctaatctttctctgggttcttctaagagacaacttgtccgcactctctttggttccatgttctaactttcccatgttttttccgttttcaccagtcacacggtaagtgacctctcttccactagagcaaccgatatcagtttctaaacaaactttcctctttttaagcgaactaccagaagcagacgaatcagttgtgctctttcttttggcattcttcttttctcttctcgcggttgctttcgcctgctcgcgatctttctttaccttctcataagcatgttgaaccacacttgcagcatgagctgcactgctggttcttgagaatgtccacttggagttattaaataaacctgaagtagtattgtggtttgcagctgactttagacggctgcaactactccaacggcttgaaatacctggtttagggacttctactgccaaataggactgtagacaattaggacaccgaaggttacagttgacataaactcttagatactcgtactgcatcatgcatctcctgcagactgtccagaaagtattcgactttgattggtctgatgacccagatgcagtaaatgagtttggtgttgttgtgtgattatcagtacgtcctgttttctgtgtagtaccaactggcttttgcggattgttcttttgggtcggaggattgttcttctgggctggcggattggtcttctgggcaggcggattggtcttctgggctggcggattggtcttctgggccggcggattgtttctcggggtcgtcgtccttgcatttgtagtgaaagtagtcttggcgaaattgcagaacccgttattagaagatgaaactgagaccttctgataaactgagtgcaaacttttcctacgatcataagctgctctcttttccttatctgacaagaatttccaagcttcagaaacatgtttgaatgccccttcagctcctatagacttgtttttatcggggtgaagcattagagcaagcttcctgtactttctcttcaacgtttcatcatcatcccgaggacttgcattgagtattccataccagtcgacatcctcgtttactttgttttctgcagcgatatacacatccaaggttgctaacatctgagaaacaccttctatctctggatacagattttgagctttcaaggcaaatttcttagccccggcaatgtctttcattttgaacttgttctctgcaatttctttcgccctcgtcgcctcgtctttgttgcactccatgcctgtcgtgtatccttatcattcaatttttctaatgaccaaagtctcaatgccgacgaaattctccgaatttgagcaatccccagcgtctgggctatgttttgcttcaaggatggctactttctggctaaaacaaaaaaggtagatatggaggtgttaacatatgtgagaaagcatctactagccgcttagccagttcagaaaaacgtaacacaaaatgtcaatggtttttctgcaatcatattctacacacatgcagcctagctaccaaaaatccgttgcaaatagtgacttccaccaacacatagaaattaacatgtaaaacaaccaagcaaaacagagacaccagactcaagcctatgcgacaagaacaaaaacccattaactccaattgcaaatccacaaaccagaggcgaaacaatcagcagcttgaggagataaaccttgtcaaagctaagaaacagctctcaatcatgcgtcactaagaaattaactctatgaagctatctaaaatcttcgaaaaatctcagaagcatgcagaaacaaagcttaaaagtggctacaatgtgtgtggtttagatttttttccaccgaaaattcgaaaaacccaagatatgtagaaacaatccaacatctaagcgtaaatagcgaaatcgacttctagattcatctaaaaaccctagaaatctcacaaactcacaaacctctcaaaaatttcgactcgaaacgcacctgatttctacgggattagcaacaacatcaaaatcgattaaacctagagacaatgtcgaaatctgtaatcagtgaatcaatcaatcaggaatcatatctaatgcaaagtgaagagaaacaagagaagacctgaaagctcgagatttgcaaagttttagggtcaaagatgaaaagagaagatgcgacgagagaaaacgctagaatcactcacaccagttgcgtttcagatttttcgattgcgggcttaaacttttatatttatcttagaagatttttaatatgaccctcttattatttactttttgaccgaattgaccaaaaactttgtgataggaatctttatgacctcagcagagtgtactatggccacatttatatggtgtgataacaccagtgtaacaccagtgtagacctctacttgcacagcttctttcttctataatctctgacattaggattctatggagaagtttaatttgtattgatc

SEQ ID NO: 780 - DNA, 49648 bp, Arabidopsis thaliana
caaaacaaccctaatgatctaatataactcgaataaaaatatgaatcgagaaatgaagtcgaatttgtaaatgttataaggttttatctttttctatatccgaagaaacggaaactagacccgaatccaaaatttgattcgagaaataaattcgattttgtaattgttataaggtattatctttttatatatccaaaaaaacaaaaatagacccgaatcaaaaatttgattcgagacatgaagtcgattttgtaagtgttataatgtttttcaatatccgaagaaacggacactagatccgaatcaaactaaatgagaaaaatatttcgaatagaatgttcgtttcattaaaaataagaacatatttgaatttgaaaactataataattgaaaacatatttgtaaccgtctgtttaaattaggcgatgaaaatactctattagacgtaactataatttctcgatcttcttaattctacggattatgaaattttctcatatgagaaaattttactagagaaatttaacgcagattaagtaaatcgattcaaaacaaaccaaataaagaaaattgattcgaaattaaactcaattttaaaacggttgtaaagatttacttttttcgtttattttcataacagaagttggatacgaagcgaactagaaaataaaatagttggattacattacctttttattacaaataaagacttctgacttttaaaaaacaaataagactgaaatctcatatagatcggtctacaacaaatcgagtcaagtttcagatattgtaactagaattgtgcccctagctatgttaatttacaacaaatattaaaatattttgaagatatcaaacatatgcattagtgttaaataacaaagaaagtatatcattattacaaaacaattaaaaaaaaagaaaagttggggaaaaagaaacagtttttagtttttttaaaaacatattttcccgtaaatatgtgtgaaagaaaatagtttgtttggaaattatagagataatgggatatgggaaaggagaacagtttttaattttttaaaaaaacagtttttttttttttgtaaataggtgtgaaaagaaagatgtaaaagaatagaatttgagacttatgccacatgtcaaaaggatacatcaattattaaaaaaaaatgaccgttgatttagtatagttagattttaagttaataacctattaattaaaaggaatgagaaatattactaggaaagtttaattcggattaagtggatcgacacaaaacaaaccaaatagaaaacccttatcccaatactaaatcaaatggtggcatcattaaaatgttttacttttatttaatcaaaaaacggaaactagatccgcatcaaaaagaaaaaataataaattgtttataaattattttcattaaataatatgaaaataatatagaattttgtatcgatcaatttaaaacatatcaaggaaagtatcatataaatgtaacatatattcctaccctctgaattagtactcatgagagatatagaatctctcgtttttgtctttaaatgagaaacatgtttattaagaaattttaattcaaaataagtgaatcaaaccatgtacatgggtgatatttttgtagtatcacaagtccaaaaattatttttatattgataaaataactaaaatgagctcgatcagtatatatatatatatatatatatatatatatttatttatttatttatttatttattaaacaaacattatagataatactaaaataattcttaatgatactttatgagtatcacctatgaacattctcttagtatcctccaacaaaactaaaattactcaccaaaaaaaattactcaccaaattgtaatttctttacatttatttgaataaaacatagggggcaattgcctcctactactcacaaaaaaatctaaaacaaattgaatcgaaaaacttggtttgaatactgaaattagttttagcaccgctaacaaatattttgtttccgaatagtactgaaaatagataacatttttgtgtgaacagaatgtcaagtccgcaagatgactgaacttcgttggaagagaaaaaagtgtgattcttattgttatatttttctgtgagtgcatgcaatcatatcgaagtttgggatagtgggttttttccggtaaaatgttaagttttataccattttagattttttacagaattacagagattacaaggaactaaataaaacaatctacagaaaataaatacaacattactattcaaattgcgatagtggtttaattatagagagcttcgaaaacaaaaaaaatatccaaaacagcatatcaacatctagccgtgtacatcacctcaagtgttattcacaatgttgtacactattatcggataacgtatcaagatcatatctcttgaagcgtctaaactgcatatgtactgcttgaacataactaaaattaccaccatatttatagttatactatctttgaaatgactacctctctttttttttgtcacaagagtgttgattttattatatccaacaacaagccaagatcaacaacattcaaacaaagccaaattacaactaaacaaaatccaaaactttttaaaatgaaaagtccaactagaaacccaacaagagaaaaccacaacaggaagaaaaaagaggtcttgcattggaggaaagatcacgtgtcacgagcagatcctttgatgaagacacgtggaaggaggaagatctgggtaatcgtcggtcgtcgttgaagatgtttgtcgactccaatgaaacccaaaaccactggaatatgtatgatgatcgcaagtcaaatcgtcgatccatcaaggttcacaataaactaatggtagcaattgtcaatattgggagatctccatatatcttagctataaaataggaaaatatctttgtggagattaggaaattgtatagcttcctctccacgtgtagttaacctaaatattctcttgtaaatatatcaaggtgtaatcgtatgaaatcaataagagaaaacgttcatctaaacctagccgcttctagtttctacatggtatcagagccttgcctttgatccaacgttttcttctcttgttcgtttgttgttttttatctctccttacaaatcaatatgttctttggacttcatataagcccattcatcgaagcccatctctaatactccccttcaagatggacagtggagatctcgaacactcatcttgccaagtaaatattgcaactgatttcgcccaagagccttggtaagaaaatcggctaattgctctgtcgtacgaacgtgtcgagtagacacaattccgtcttttatcccatctcgaacgaaatgacaatctttctcaatgtgtttcgtacgctcgtgaaataccggattagctgcaatgtgtagtgcagctttattatcacaatgaagacttattgattctggatgaggaacttgaaaaatgagaagcaactccttgagccataagagttcttgataagtataagccatagctctgtattcagcttcagcggaagagagtgatacccgttcttgcttctttgttttccaacatataggggatttgccgagtaagacaacataaccagacagtgaacgacgcgtttttggacatgtttgaaaatctgaatcacaataggcatctagatgaagatcatcatcgttgcttagtaataagccttgtccgcaagtccctttaagatatcgtactaggcgaactgctacatcccaatgacgtgtacgtggttgtctgagaaattgcgctagaagatgaactagatagcaaaggtctggtcgggtgatagaaagataaatcaaccggccaactaacctgcggtatttggttggttcatgatagaattcaccgtcttctttggctagagtatgattctgttcaataggagtgtcaacgggtttagctccaagaagtctgcattcagagatgatatccaaagtatatttgcgttgcgaaatataaatcccctgctttcctctagagacttcgatcccaagaaagaattttagaggacctaaatctttcatgtgaaagcattcactcatatatgccttaaactctgcagttagcttgatgtaagggggagtgattccccagaagaatctagtgtcactgaaaacccggtttctcttccaccaccggatgtgtcacatgaaaaggatataccggtttcaacggttgaggctacacaaacgcagaatccgaccgtgttgttggaaaattctcatgatccagaagaagaaagtgatgaattgggtaaaggaaaacgtcaaaaatttacctccgttcgtctaaaaggttatgagacttataatgctcgctgcactgaagaaccccatcacgtctcacccgtctttgatccagtttcctcttatgcggtccaaggtaccacttcttatcctcttacaagttacatctctgatgatatgttttccccacagcataaagctttcttagcagctcttattgatggtgctgaaccaccatcatataaacaagctatgcttgatcctcgatggacaaatgctatgggaacaaaagttggtgctcttgaagagaatggtacatggagtattgttgatttacctcctggaaaagaagcgattaacaataagtgggtgtacaaaatcaagcttaatgccgatggctctcttgaacggtataaagctcaattagtcgcatgtggcaatcgtcaagttgaaggtgaggactataatgaaacgtttgctcatgtggttatgatgaagacggtccgtagtttgttacgtattgtggcagccgagaaatgggaagttcaccaaatggatgttcacaatgcctttctccatggtgatttagaagaagaagtatacatgaaattaccggttggttttcgtcattcagatccgaagaaggtttgtcgtctccataagtctctatatgggcttaaacaagccccgcggtgttggttctctaagctctcttcggcgttgctaaagtttggatttgttcaatcttattcagactactctttatttattctctcacgggctggtgtggagcttcgggttcttatttatgttgatgacttgttgatttgtggtaatcatccacgtatgcttcagagttttaaagagtacttggaaaaatgttttcacatgaaagacttgggtaaagcaaagtactttcttgtcattgagattgcccgaaattcagaaggtatatatctttctcaaagaaaatattctcttaatcttgttactgaagctggacttcttggttgtaagcccgctgcaactccgatggaacaaaatcacaagttggagatgaatgagagtgagtttcttcctcgacctgaagaatataggaggttggttggtcgtctcatctatcttcttaccactcggccggagctgtgttattctgtccatatcttgtcaacgtttatgcaaaaaccacgtgttgatcattgggaggcggcgctccgtgtagtgcgttatttgaaagggtctccgggtcgtggtgtgctactaagttcgaattcagatcttacttttactgcatattgcgattcagatttttcgacatgttccacgacacgtcgttctttgagtggatatgtcatgtttttgggtggttctccaatttcttggaagacaaagaagcaagatgttgtatctcattcttcggctgaagcggaatatcgttcaatgcgtaatgcgttgaatgaagttcgttgtttaaaacagttattagaagacttgggatatccacaacatcaaccgatcaagttatattgtgatagtcaagctgcgatacacatctcctctaattcggttttccatgagcgaactaagcacattgaaagagattgtcatgccgttcgcgatgctattcaagctgggatacttacgatggttcacgtcaatacacatgatcaaatagctgacttgcttactaaagctttgggtcgtattccgtttgaaggtttgtcatccaagttgggcatttgtgatcttcatgctccaacttgagggggagtattgggagatctccatatatcttagctataaaataggaaaatatctttgtggagattaggaaattatatagcttcctctccacgtgtagttaacctaaatattctcttgtatatatatcaaggtgtaatcgtatgaaatcaataagagaaaacgttcatctaacctagccgcttctagtttctacagtcaatttcagagctctagagataatcttcatcttcattgaactttaacctcaaaaattttcctaaataaattgaaagcagttttcaacctcaggcttcattagaaaacaagccaaaagtcggagatagaggcacgccaaaaacagagctaggcaaagctactgaagaagctggcaatgccggaagagagccggccaatgccactacggaagctaatcgatgccgaaagagaaggcgtcgctaaagaaatagagcgatgtcggaaaagtgaggatttctctctctcaaaagttgagagcgagaatattttttccaaccaataagcacaaaacaaagttcgcctagaggaaaataaccctaaaagtcgaaccgaatgatttcacctaattttgaattttcgggtaagtccggttcaaattcaatttcggaaataaaattattaaccggatacacttacaaattcggatcctacaaattcttgaacttttatcacttatgccacttttttgaaaaaactgatctggactgccatcagttaatctgaatgctaccgaaaatgtgatataccagttgtacccttaatgagttgattaaaaaaatgaaaaagaaattcaaaagctaaataaagaaaatcgagatcctcagttctctctccttcgtcgtcgtgttcttcttctttcgccgacgttcatcttcttcgtcggccaccatcgattctggccgccgccgacttgaaatccgtcgtaaaaggcaacgaattaggtcagtttcttctcatatttcctttgacattggtgcattgtgattttagattgggattttgaattatatataattcccaaattcaatttgatagtttgatgattggtttgcaaagtaaagagtaatcgattagaggttgccgaaacgttatttgaggtgatgagcaaagaaatgtaggttgaatgtgagttgaatttgaattccgagatttcatattaaagatttgggggtttgtgtttgcaaagtttagattaaccaattagtttaacgaataggtatgtattaacattggaaatcaattgaaaggtaacgaattaggttcagtagaatcgagtgcgacgagagattgatttcaacgtatgataagagtacatgtggtataactattaaaatgtttgattggagttgaactggttgtattttgaggagcgatgaagaagaagatccacactaaggtacattttgatttggaggatactattttgaagtgaatgagtggattggtaaaaattcactatatgctatatcgtttaagacgagtagtttggagaagataacatattcgatgttagttgacaagatcatgaagaaggttgccattgatgaagcttttgtgaagttgaaactgagttacaatctgtctaaagttaggagagagacatatattgtagatgatgaggatgtcttcatatttttaacagaatctgatgaagagagtcggattttgcatgtggaggaattaaatggtataggagttgagaggagagaggaaatttctgtaccggagcgtcgaagttcagttggtgtaaatgtaagagaggatgatgttttaaatgaagtatgtgagatggtgcatgagggatatgataatgatgtgaatgattgtgagaatgtagtaggtacggagatcgtggctgtcgaaaggccgatggaaaggccggtgaattctgttgaggaagaagatgaggatgataggattgattatgatgatattcacgatattccacgaagtgtagaagttactccgcaggttatagaatgggatgatggtacgggtattgaaattggtcaagaattttgttcaagggaggctgtgtgggaattggttaacagagctgcaaagcaagaagtttttggagtctatactattaagtcagacccgttgagacttatgctacgatgccgccaagcttctaaagggtgtacttggtatctaagagttgcgagaactaagaaatctcatttttggagtgttagagtgcatagaaagatgcatacatgctctcggagtgttgagactacaagcaacagtatacagcgaggcacaccaagattaatagcatcggttttgcattgtgactatcccagaaatttaaagaccccaactccaaaaaacattatgtcgattgtaagaggaagacttggggtgcattgttcatactccactgccttaagaggcaaaatgctacatgttagtgatgtgcgagggactccggaaagaagctacacgatgttattttcttatcttcatatgttagagaaggtaaatccagggacagtaacttatgtggagttggaaggagagaaaaagttcaagtacttcttcattgcattaggcgcttgcattgaaggttttagggcaatgcggaaagtgatagttgtggatgcaactcatcttaaaactgtgtatggtgggatgttggttattgcaacagcacaagattctaatcatcatcattatccacttgcgtttggaatcattgatagcgagaaggatgtaagttggatttggttcttagaaaagctgaaaactgtatattcggatgttccctgattggtctttattagtgataggcatcaaagcataaagaaggctgtcaagacggtgtacccgaatgcgcttcatgcagcttgtatatggcatttgtgtcaaaacatgagagatcatgtgaaaattgacaaggatggagctgctgacaagttcagggattgtgctcatgcatatactgagagtgagttcgagaaagagtttggtcattttacaagtttatggcctaaagctgctgactttcttgtgaaagtagggtttgaaaaatggtcgaggtgccattttaaaggagacaagtataacattgacactagtaattctgcggagtccattaatggtgtgtttaaaaaagcgagaaaatatcacttgttaccaatgattgatgtgatgatttctaagttttctgaatggttcaacgagcataggcaagattcaggttcttgtccaatcacagcacaagttgtgcctactgtggagaacatattgcacattagatgtccagttgcagccaaattaactgtgtttgagcttaacagttacaaccaagaatacaacgtgattgatctcaactcggtaagttttctggtggatttgaaaatgaaaagttgttcatgcaaatgttttgatatagacaagatcccgtgtgtccatgctatggccgtagcaaggcacctcgcccgcaaggaagggagaaatgtgaatataaccatctacggactctgctctgtgtattacttgatagagagttgggcattggcctattaccagacgttgtatgtagtcccacatgagtcggtttgggttcttcctacccatattaaagagttagttgcctttccgccggaatacacaccaaaaggaccaggacgaaatcaagagaagcggtttccatcagctggtgaagcgcgaaagaggagaaaatcgcaacatggaataaacttggaggcttggctgcagcctgaggaagattaagtctgatgcagaaagggttcaaccggaacaacctggccaactccagaaagggttcaaccaatacaactaagttcatttgtatttgtattatattatttgtaagtgtgatgtactatgttttatgttttcgtatttgtattgaattctttgcaagtttattgaattattgcaagtttaatgtatttttttaagttcaactaagacaactgatatatgtatctgtattttaaggttaacaaaatgataaaataattctcaatattttcagctattatcaacatctaaacattgaataaatccaaaatatgatattacaacattgttattactaaacttgatcataaactggtttcctaataaatcacctatgtataacaaagaacatatagttcatgattgtccaatgtacatacgttatgtatgaaaacagatatttactaaatatgattcaatcaacacttattaaaatccattaatatgttaaaacttatgggaccaactaaaaaaatgagttggtttttcagattcaacttcaaaaacacaaaatttagaatagttcaactgtttgtgatttcggccaactgtacatatatatacaactatgtgtattctgaatattctaataaataagttttttaaaaaatagaccccacgacttgcgttcacactacgattattgcgttcacactacaaagtttctacctatttattctcgttcatctctctttctctctctctctcttctatttctctctcgttctttctctctctcgttcttctctcttctcttccttcccaacatcggcgacgacaactgaaattagggttccaattatccgccgccgccgacgacaacaacaacaaccaaggtatgatatagggtttctaaagggtttctagccaccgtaattagtagatctagggttttttacgggtttctagccgccgtaattagtagatctagggtttcttacgggtttctagccgccgtaattagtagatctagggtttatagcgttcatgattcatatctctttctttctctattctgtagatgccctatagttactctcaaccatccacgtccgaagctagttggaatagtggagaggcgaatgccgatgcaaattggggggttccagaaaaatgtttttgtggtaagcctgtaaaacttgaagtgtgcaaaactggttacaggcaaggcgacagagtctacaaatgctcaatgcttaaagtaagttattgtgttttcatttcattggaacaacaaagtacaagtgaattatatttatgaagtcttctctctttcgcaggctgaagagtacgagtcccgaaaccaccttattcagtggtgggatcaggcggtaactgaggagcttgagatggtaaatcacaaacttgattccgcactaagacatggacaactagcatgcaatcatgctttggagtccatccgggaaactgttcatctcatgcaaggcgaaattgaaacccttaaagaaaggttactcgccaaagaagtcgagattgataggcttagggcattactttctacatggtgattatgatgtgttttatgttattgaggatggtgtatggcatttgaacctaattatgttatgtttctggattttatgtaatatttgaacctaattagacatgtatttacctattttaagttatgtgtattgaccggccaactgggacaacttagctactcttgtattttaagttatgtgtattgaccggccaactgggacaacttagccactcttgtattttaagctatgtgtattgaccggccaactgggacaacttagccactcttgtattattgaccggccaaccgggacaacttagccaaacgttttgattttaataaaatcctaaaacacataaaccatttcagaaaataagtttgtcctttacacataaactacgcataacatttccaaatacacaaaaaaagtcctatttctccaaacacctacgagtccacacacacacataagcaagaaagaaaagtcaaagtcctaattcttctgtctcttcctcgtttgcttcccctcagctgtaaactcttcccccttatacttggaaggtttccttccacgttttttcccagattccagagtaggaccaacatgctttctcttcttcttcgatatctgcttcttcttcttcttcttcttatcctcttcatcggactcatcgctgccatcacctacaaaaatatgtaaccaaacatgtaagaactattgtgaaagcatcactacacaaaagttcaacaaaaactcacttagagactcaatagttggaggtgctgggtcacggcttccactgtgaataaccaaggccttgctctgagtatcccttggctgataagacggtggcacaaaatcagcagctgaaccaggacgcatatcttcataacgggctttttctgcctctttctcaagctaatctgccacatattcctctattccttgtactctcacacaaatccgcttgatttcgctatccatcacagcaagcttgtccgtgagcttgtcaaatcctctctccatagcttccttgaacgagagaatcgatgtcccagggatttcaggttcaggtacagctggaacatcatcaacagtttcaatacgtctaccatcaatgtctgcttggtagagactacgccaaaaaatcttctttttctctacgataagcctctctctccagctatcaacaattggatcgatatatccaataccatcatcaacatgcttctctacaacgcgtgacaacatttttctctcatccatatcaggttccaagatgcttgaaatatcctgtcaagtaaacatatatttcaaacaccacaaagattataaacatagatttcaagagaacaaagctaaccattatatctccaagtgcttcatttatttcttccaaagtaaatcccttcatgcaactttcactgaacttgtgcttgcacattcttggacgttccttgtctgcaggtacagcttctctaaatctcttcccaagctgcagaatgcactcaaatgccagaatctagacataaaagtaaatgcaagttcacaataacaaaatttagccactcatataatttactcgactacttacctcaagtagagtaataaatccataaaaagcagtctgtgccttgggtttcaccacacctttcatgttcttcattactctccgcaccccttccatacactgctcaaaggaaaaacgtccccacgggaatgtctcacaagctctgatattatccacaatcctaagcagcaactcctctatcttcgaatcccctttagaatcagctttcataaccttagctaagaataacagaattgccaacttcaacctagcagtagacttctcactcttaaactcttccagcttctcttccacgtctttaatcttgatgtcctcagtccttttaaacaacttctcaacaaacttcaaactgcctaaagtcttatagttttttgggtactcacggcagttcaaaccggtcaacaatgcatgctctttaattaagtaccttataggtactccattgacaacaaaccaacactctctcgccaattctgtcttagccgtgcgaaccataagcatccacatgccttgaatcatgtgatttggctccttaggcatgtggaatatgtgcttaaattggtcatgattcttaaaccacttcagttctgcatccaaagtctctataaattccactgtttgtaccaactgacacctcgttcctatcttacacaccttcgtgtaggtagttggatcaaagtacataacttctggcggcaatggttgattatcatcatcatcatcatcatcatcctgcatattctgcggtaggttatcgtcatcaccatcctgcatattctgcggcaggttatcatcatcaccatcatcctgcatattcaattcaaaatactttcaattccacattaactacctagttgtactacttgttcctgaatgaccattcacaaatttacgacctagttgtactacttgttttatctgaagcaccattcacaaatccaatcatttaccaatgcataatatcctaaaacgagcctaatccaaaaaataacggtcttctctcataccttatttgctccatcatcatgttgaacaactgcattcgttgcctcctcttcttctgcacaagaatcggcatttgggtctgaaagatcgtcaattgaatcccatgcgacggcgtttgaattacccaaatcggcggcgtcacaatcgccggttgtaggctgaatttctccggcttcctcttctgttgttagaagctctacgccttcttcatctctttggggaatctcggcggcggtctcttcgactgatggaggaatttcgccggtcacttcaaccctagttgattcatattctccagatgagtcttttactctatccattggaaaataaatttgcggatatgaaagagacaaagacgaacgaaaacggagaagaaagaagaagagaagagattgatttttccggtgaaattggtgtcgtcggagacgagagaagacgacgacggagagaagaggaagaagtcgagaagttgaaaaggggaagaacattttttacttaggttttttctgtagtttctagggtaaataatataactggggcgaatatttacattttttattggtgcctaaatctaacaaattaagttttcttgtagttttcgtggtttcgcaagagtttttcgtcctttcctcatttttcgattttaataaaaatcaataatattattccaagaatggcacgagtgattatttcttctcaaatagtggcataagaggtgagccttccaaattcttcaacccttaaacccattcattttctccagaagattctgagacgaagaggcaaaattttctcgggaaaatggcaatggaagaatccgattccggtgaaacagcaacggcaaaaatttcgtctcttacgttgaaatctagggctatacttgcgactccaagcaacgaagaaatagcgattatcgtcgaacaagtctatacacctcaagaatccgacgaacacaaatcagcgcgagctctgttcgatttctgcgtctctactttcccaaattgcttaaccctaaagcttctcacggtgtatcgattttcttccgacgacgatttccgattacgatcgatctgtcttctaactgaaactctaaaagctcagcgattcgaactctctcttgtcactctccatgaaatcaaaccacttctgatttcttgcttgacaatgcaaaaccctaaatattgtgactcaaagattgtgagaatcattgtttctttagtagctgataaagttggtgtctgggaagagatgagtgattgtatactctcacttgttgtcaatgatccgattagggcttttgaggtctttatccaattgccatcatcactctacggagaattcatttaccggtttctgcagaattttcttgatgaagtttacaagattttgcttcgtcctgtggaatatgaagttgaagtttggatcttggctttgaaatctgctgttaaaatggggattttgcttatggattcagaaatgagatttgatttgacaagagacattcttcacattgtttggaaatgttctcttgatgttgtgtggaatgatatggaagaagagtttctgctaaatggacttgattctcttgagattttcttggtggaagacgcgaacaagtttaagtggaatagtgatcaatgcaggtttgtggcagagtttgcgtttaagatttcagatatcggaaaagaggccaaggaagttgcttggaagatctatcgaatggttacaaagctggataagtatgtgcacaatccagctttcgaatttagcccttttcgcaatgagaataaatatcttggagtagatgatgtttgtgacttagaagacattttggatgctttatctccagtggaaatcatgagaaaggtttcagtaggtcaagttcctaataggttgagagagatagctatcacgagactttatgagttattttgtgatcacactgctgggaaaggggatataagtatttcagagattagagaaatccagccgttgctcatctcttgccttgcagagataggaattcctgagagcacgtttaagattctctgtcaggtggtgttccatgttttacatgagttgtctagctaccaagaggacaactggtttggtctatgggactacattgcaacagaaagcaaaacagagttcatgaagacagtttatatcttccagtgcttaacaatgcggctcgatgataaagagtttgtgattcatgcgattaataatcttcttccagagattcacagacacctaaacccaccaagagacttgttggtagatgaaaattgctgggtcttggcgtttacgggtgcgttctgtgcagcaattcacttgatagagatctcaagtcatgctcaatacttgaaggagattgcatataagatgatagattcagtgagggagcttgtgggaagaggaatggaagttgagcttgtgaggagagctttcataaatatggaaagcattgtggagaaacaatatgactgttacactactagtgactacagattcgttaagggtttggtttggaagctctatgcaatcaaagacatcagcgtggaaactcagtgtgtgttgtggagaatcaacgtgattctggaaaaagtgcaggaggtaaaagagctcccaaagagtgaccttgattggctgaaccaacccgagactttaggcaattgagtttttttttttttttcttcatagtttggtttgtgtaggagaagaaaagaaacctatgttcctaactctcatatctactgctttcttgtctactgttttttgtaaatagcccttacgtgatgaacaaaataatgatcgcaaacgttcggttcagaagtttggaaatttgtttgggagtaaaaaaaacttaagaagcgaagttatatcagatttggttattctcaaattaacacattgatatgggttgatttacgctcggttcagattaaaatcataccgagttatttcagctaaattccggttaattccggtttattgccagtttcgtaataataaaactcttataaccagctccggtttaaacccatcttctagaaaaagattctcagacacagagctcaaattttctcgggaaaatggcagaatccgatcccgaaggaatcgcaatggcggaatctttgaatcttcagttgaaagggagagagattcttgtgagtgaaagccatgaagaactagcgatgatcgtcgataatctctttaagcgtgaagactccgaagaatataaaacatcgcgagctctgtacaagtactgcgtctcttataacccaggttgcttagccgtaaagcttcttaaactctatcaatattcttctaatgccgttctcagattacgatcaatctatcaactctccgaaactctcacagatttgagaaatcgcaacttcaaactatctctcgactctctctatgaaattaaaggggttttgatttcatgcttgacaatggaagaacccaaagaatctgaaatcaagatccttagaaaaatcgtgtcttgtgtagcttacaatgttgtggagttgcataaaggcaaatgggacgagcttggtgattgtatcttaacgctagtgaatagcaaagaacctgtcaaggcctttcacgtctttatcgatttgccaccagtctacaagagtttcatagacaagtttaagcacaaaatcttagatgaagctagtaatgtctttcttgatccttatagagttgaagattggagcttggctttacaagtttttgttaaaatgtggattcagcttgtggatacaaagatgatgttggtgttaataaaggcgttaatggagattcggattacatctgttgtgaattcagtgaagaagctagtggagaaggaaagagaagagtttttggtaagagggcttgaagatttcgagagattcttctcgcgagagatgaatctgtataagtatagtaaggatcaatgccattttgtgttggatttaatggtcaagatcgaaggagtcgggacacatttgaccaaggaggttgtggggaagatcaaaatgctggttacagaaccggagaaaccacaggatgatgatcttaagtatagtagagaagagtttgaccgtggctggtatgatcatttgaagagtttatcttcactggaagtgttaaagatctttgcttcctctgatcttgaagataggtccagagagatggcaatcagacgactcaatgtcttactatctgataacacttcagaaaaggtggaaataggcattgaagagatgagagaactgcaaccattgcttatcacttgcttaaaggaagaaggagtctctttcagtatgttcaaagtcctagctgaggtggtgaaccatgttgcatatgagatgttgatctgccaagaggagacatggtacgatctacgcgattatatagcatcgagtacaacagagtttcagagagcggtttatatcttccaatgcttaacaatggattttgatgatgaaaagtttttgtatcctgtgatggatagcctttaccaagagataatcacaaggctagacccaccaagagaggtgttggtagacaacagttgctgggtttttgcgtttacgggtggcttctgtgcagcagttcgcttgatagaggacccaggttacggtgacgacgttagtgagattgcatataagatgataaattctgtgaaagagcttgtggaaagaggaatggaagttgggcttgtgaggagagctttcagagatgttgaaatcattgtgaaggaccaattggaatggtacagtacaagcgaatacaaactcgttaagggtttgctttggagactctatgcaatcaaaggcatgagatgggaaagtaagtttgtgttgtggagaatcaacgtgattatcgatagaggagtgaaagaagaggagaaagagctgccacagaacgagtctgattggctgaaccgtactgctgatgagaagattaaatagaaaaccagttcttttggtgtatagtctgaaattgtgtagagtctatttttaggtgtatagtttgcattggagaagaaaatagtaaataactaagagtgaaagaaaaatgtacttagttcttaaaacacttcaataacagcttcccatttttctcttcaatacacactttttatcttgagagttcactgaaagaaactcttagctacaacatctaaattcagaacatcaacatcaggacaagctcagctttggcctctatcagaagagatatgttttctgaagtcttcttcattaagctttaagttaggactctgttcttctattatcttaatccgtttgtgctattcttaaaatgagagatttggttgaatattttcacgaaacgatatacaaaatatacaaaatattttcacttgatacaagaaaacattatgcgttatgcaatacttagaaaataaacatctataacaacatattaaagttcttacaagaagatgaaaaaacagtttcacacactctcttgacatgatctttgttatcagagatacatcgagttgtcgataagaaggttgttgttggtaatatcactcgtgaacaggttctgatcataaccacaaagaacattcggcatcaacccatagttgttattcaccgattcttggagagcagagtaatcttgtgtgtttgagacaaaagaatgttggaagttgttgttgttcataaacatgttctgatcataaccacaaagctcttgcttcatcaaaccagattcttgtagtaactctgagaaatcctgattgaagttttatgcagtcactgggatctgagacatagtattgtctccatggttgtacaaaaacagcgtgaactggctagggttcaaagattggttcagagaatatattgatgctaaactctgatgatccagttttgtctccttatgtttctgcgactcaacaaaacgaatcctttcttggactttagagacatgaggttctaaggactgaatcagttgagaaatttggtcattaaagtaatgatcagcgattggagactttaaaacattcacgttcttcaaacaagtcttcaagtcatcattgtccgttatcattgctttcttctccaaattcgtcttgtccttcttcttgttcaggaagtcataaagagtaacacttttcttccttctcaaggcttcgtttaattgactatacctgagagcaatgtcttccactttctctcgctccttaggccatgtcttgagttctccgtccggtccgtaatagatgacgcaggcttcgatatcacagagtatgcaaagctctgagcctctgaagctttcttgaagatggtctcaagtctattgctcaaacttgtagaagcgagtgaatttgagagttaggtttaggaaacccttaagacatatcatatatatttatagactttggatttgggcttgttgggccaacttatactatgggctagtcccaaataaaaacaatgttcggatatttttggagttaattaaatttcggttaattccggtttatagtttgttaaacccttaaacccatcttctccagaacaaaaccgaaaagaaatcttctcggaaaaaatccgaatcctgagaaatcgcaatggaggaatcttcttcgaatcttccgtcgaaagcgagagagattcttgtgaatccaaccaacgaagaaatagcgatgactttgaatcaacttttcatgcgtcaagactctcaacaatatcaaagatcgcgtattttgtacaatatctgggtctctcataacccatcttccttaaccctcaagcttcttatggtctaccaatcttcttcttccaatagcgttctcagattcagatcaatctatcaactctcccaaaccctaaccgatgtcaagttcaaaccctctctcgactctctctttgaaatcaaaggggttttgattccatgcttgacaatgaaagataccaaagaatctgacttcaagatccttagaaaaatcgtgtcttgggtagcttacaatgttgtagtgttgcataaaagcaaatttcacgagcttagcgattgtataatcttgctcgcagaaagagaacctgtcaaggcttttcatgtcttcatcgatttgccaccagtttacaatgagtttattgataagttgttggagacgattttacagagagctgagagtgtcttgcttagtccagttagagctgaagattggagcttggcatttcaaacttttgttaaaatgtggattcagcttgtgtatacaaagatggaagccaagaaagtgatggagttaatggtggctcggctttcgactgttgtgaaatcagtaattgagctggtgaataaggaagaggaagagtttttggtacaagggcttgaagattttgagaggttcttctcacgagagatgagtctgtatcattacactaacgatcaatgccattttgtgttggcttctatgattgagatggaaggagtagttagaggaactgaggccaaggagattgtgaggaagatcaaaatgttggttacagaaccggagatcaaaccacaggatggttttaagtatcgtagagaagagtttgatcgtggctggtatgattgtttgaagagtttatcttcgttggaagtgttaaagatctttgcttttactcaacttgaagataggtccagagagattgcaatcagacgagtcaacgtcttactatctgatcacttttcaaagaaggcacgaattggtatttcagagttcagaaaactcaagccattgctcatctcttgccttaaggaaggaggaatctctgacagtatgttcaaagtcctaggtaggtggtgaaccatgttgcgaatgaaacgtttgtctttcaatatgagacatgggatgatcttcgtgactatttggcatcacaaagcgaaacagagtttcagagagcagtttatgttttccagtgcttaacaatgccacttattgatgacgattttttgaatcctgtgatggagaatcttctcccagtgataagcacaaggctagagccaccaacagtgttgttggtagataacagttgctgggtcttggcgtttacgggtgccttttgtgcggttattcacttgatagatgacccagattatgctgaatcccttaaggagattgcatataagatgatagattcagtgaggaagcttgtggaaagagaaatggaagttgggcttgtgaggagagctttcagagatgtggaaactatagtgaagaaacaactggaatggtacgggaagttagaatacaaattggttaagggactgctttggagactctatgcaatcaaaggcatgaaatgggaaagtaagtttgtgttgtggagaatcaatgtgattgttgagagaggagtgcataaaataatgcttaaagagctgccaaaagatgatgagtttgattggctgaacatacatgatgatgatggcgatgatgatgatgatgatgatgatgatgatgatgatgatgatgatgatggtgatggtgatggtgatggtgatgatgaagagtaaaattgtatagttttagttgaggaggttgaatagaagtgtctgaaattctgcagagtcttgttttttttgtgtgtgtatagtctgaaattgtgccttttaagtgaacatcaatgggcctttttacaaactaaaacaatttttcctcatacaaaaaccctaaaagagtcttcaaagaatctctcataaaaaaaaattgtttggtaaaatcatataattaaaattgttaatagtaaaactatcgtattgtagtacgtctttaaaaatatattaaactcaaacatatagttaaatgtggtttatattcagtttaataaaataaacgcaaagcttctccagaactttgtcagacggaaaatgcaatggaggaatctatgaatattcagttgaaagggagagagattcttgtgagtgaaagccatgaagaactagcgatgatcgtggatcatctctttaagagtgatgaagactcggaagaatataaaacatcgcaagctctgtacaattactgcgtctcttttaacccaggttgcttagccgtaaagcttcttaaactctatcaatcttcttctgatggcgttctcagattcagatcaatctatcaactctccgaaactctcaccggtttgagaaaccgcaaactctctctcgactgtctctacgaaatcaaaacccttttgattgcgtgcttgacaatgcaagaaaccaaagaatgtgacatcaagatccttagaaggatcgtgtcttgtgtagcttacaatgttatggacttgcataaatacaaatgggacgagctcggtgattgtatcttatcgctagtgaatagcaatgaccctgtcaagggttttcatgtcttcattgatttgccacaagtctacgaggaattcatccagaagtttatgaagattatgtttaagaaagctacggatgttttggttaatcctgaggaaagtggagttgaagattggagcttggctttacaaattgttgttaaattagggattcagtttttcgatacaagaatgaaacgaaacgtgatcaagaagttaatgagctttcagcttttgaatattttggaatcagcaaagaagctagtggacatgggaaatgaaacgtttttggtacgagtgcttcgagatttcgaaaggttcgtgtcaagagacatgaatctgtataaatacagtgaactacattgctattttgtgtcgaagttcgtgagcaagatcggaaaagtcagaggagttggaacacaaaccaaggagcttgtgacgaagatcaacatgttgtttacaaaacaatatcatggaaaagaatctttgcgtggctggtatgaccatttgaagagtttatcattacttgaagttttgaaaatcttcgcgtcaactgatcttgaagatagggccagagatatggctatcagacaactcaacgtcttactctctgatcacacttcaaagagagtggaaatagaaattgcagagatgagacaactccagccattgctcatgtcctgcttaaaggaacaaggagtttcctacagtatgttcaaagtcctaggtgaggtggtgaaccatgttgcttatgagatgttggtctgccaagagaagagatgggatgatcttcgtgactatgttgcatcgcaaagcgaaacagagtttcagagagctgtttatgtcttccagtgcttaacaatgcaacttatcgatgacggttttttggatcccgtgatggagaatcttctcccagagataaccacaaggctacactaaatccgttaaggagattgcacataagatgatagattctataagagagcttgtggaaagagaaatggaagttgggattgtgaggagagctttcagagatgttgaaactattgtgaagaaacaactggaatggtacagtacgagccaatacagatttgttaagggtttgctttggagactctatgcaatcaaaggaatgaaatggggaagtaagatggtgttgtggagaatcaatttcattgttgagagaggagtgaaagaagaggagaaacagctaccagagactgagtttgattggctcaacctacatgatgatgatggtgatgatggtgatgatgatgatggtgatgatgatgatgatgatggtgatgatgatggtgatgatgatgatgatgatggtgatgatggtgatgatgatgatgatgatgatggtgatgatggtgatgatgatgatgatgatgatgatggaggttgaatagaagtgtatagtttgcagtgaagaagaaaaatgtaaagaaagatatagatagagttacacactacattgataatcaacttgaatgatgttacaagacacactcctacacattgataaacataatcctaaagaaacactggaaggtataaaagcaggacaatgcaaatgaaacttctaaatgtcatataagtcttacttcttagctcacatatgtcctcgccttcttaataatcttctctgcaggagcaaccgtttcttgtgactcaaatcctcttttcaacttttgatttgctgcacttccacaattagaccttgcctttgttgatgaacaattccaagtaaaagtaacagatggcgaggaagaagcgtttttggtgcttttgattggtactttatcctggacactccattgttgctgttgatgagaagactttttggtgcttttgtttggttcttttgtagttatctcggtagcaatgaaaatctgacgacaatttggacaaagtatagccttgttaagattccaatgcctcagaaattcaccttttgtcttacagcttctacacattgtccaaaacgttctgcttttcctctgttttgatgaatctgcagctttaggtttactagactttccttgtttcgacttcttccttctttgatcataagaacttctctgaagcttatcagacaacaaacaccaagcttctgacaccaacttaaacgctccttcagcgccataacacttgttcttgtctggatgaagtaaaagagccaactgcttgtaatgtttctttactgtttcatcatcagataaaggatctacacctaaaactccataccaatcagattctcctacgtttgatccagagatgtatacatcgatcatcgtcttccaacgagcatcaagacttggaaacaaattaaaagcgttgttaatgaaattcttcgcaccaacgtaatctttctccgaaagtttcctctctacaatcttcgttgcttcttccatcgtaaattccatgtcggttgggagaggtttattctctacggtaacaaaagagtccattggattgttcagaggataacgcagaaatcaggaaaaaagagagcagatttgtagcgactaagaggatattaacaaaccccgtgaaagagaaaactttgtagcgactattcagaaaacgaaaacagatttgcagcaactctgtgtaaagaacgaaccccgtgaaaaagaaacttcgcaaactctctcaagtcaagccaatagtgaaaatctctgattttggtggagacccactgcaaccctaattcatagaatggaaaagtattaggtcggtgatgatgatatttttttttgttgtcgtctaattttataacagtgcaagcccaataaataaacccgaaagcccaaatagccgaagagagcaaaccccaaactgaagaaagatttcaatttgatttctttttttatataatggaaacaactattaaaattgagtttgtaagataatactagatattaatccgttctgtaccgcgagtctatattttactaaaaaaaattgatttttttttattaagatgatttataaaaatatgctattattttgtttaatttaaatgtatggtataccgtgagacgatattttaaacattgttaatttcattcgtacaatcatgtattaatatcgacatatatccgtcaattttaggatttcaaccgtagtataaattcaaatgtttaaaattcttataaaaaaatcaaaatgtatttcttaaaaaagaaacttaagttgtatttttctgttaatattgtttgtttgtttgtaaaattttatatttatatttagattgttaattctaaaatttcatttatattaaaacgtctcatattattatcgatccaaatctgttaattctaaaatttcatctgtagtataaatatttaaacttaaatctgttaattctaaaatttcatctgtagtataaatatttaaactttctataaaataattgagatgcgttttaaaaaaaataaaaaaataaattatatttgttttgttaatattatttattttgtttagtatttaagattgtataattacattttgatcatatacagaaaataatatgtccattttatgtgtacaatctgagaattagggattgaagattgcttaaaaaattatattaacaaaacaaaaaatttatttgttttatgtgtaaaacttttgtccattttataattattttggtatttagtagtttttaaaaacaaaaatctatatatacatttttgtaggaggtttttgaagataatgttgaagatttgagccataattcaacaattaattcaaatgggtgggttttacccggtttaactctgttcggatcctggataacatgtttaattctgttctgatcttggataacattaatttttggaaaagttacctaaaaactaataattaaaaacgaaaattaatgatttaattaccaaatttaatataaacaatatctataaactaaccatatttcttatttaccttaactaatttcctaaaatatttctacctaattaaaacataaatatataattcttctttcatttttatttgatcttatactttatttattttgaatttatataaaatatatatagttaataaaatattatattttttctgaatatgatgtaattcaaatttttttaaacggacatatattattcaacctatgaagaaataatatatgtacaatgtcccacatcgcttagaaaaataggacaatggttcagacccatattataaaaggaccaaaatgattctgattacgaatgagcaggaagcttgatttatcaggcgtccaaaattaaaatagttatccgattttactcggatttttttattttaaagaattgaaactttaaaatgtttcaagaaattataaatattataactttatcaaaagttaaatattataattttaaaaactttttataaagtttatctttaaaaaatgctttaaatatttataattttaaaacttataaagtttaaaaaattataaattgaattttacaagaaatttaaacattataaatgtataaaaaatatattaatacgagacgatatattacaggaaaaatcttaaatataacaatcaaaattcaatgatgaattttgggtcgatattgtatttttttaagtttcagattttataatattgaaatttataagaaaatgacaaaattatgtttaatttcaagggactgggttatatggtaggacgggtttgggtggataataactacgattttagaatgtcccacatcgcttaaaaaaatggacaatggtcaagagccatactataaaaaggaccaaaataattttgattacaaatgagcatgaaacttaatttatgaggtgtccaaaattaaaatggtttgtttactagggttatttttattttaaaaaattgaagctttaaaaagtttaaaaaattataaattaaattttacaagaaatttaaacaatataaaacatattaatacgggacgatatactgcgagagaaatcttagatataacactcaaaattcattgatgaagtttgggtcaatattaatcttttttgaagtttctaattttataaatatttgaaatttataataaaatgataaatttgtgtttaatttcacgggacggggttatatggtgtgacgggtttgagtggataataacatgggatagtatgctatggaaaaacatataataacaatcataatataattatataatcttaaacactaaacaaaattaacaatattaaaaaaaaatatacttaaaactttaatttttttaaaacacattttgattcttttataagaaatttaaacattataaatatttaaactttatagtacgggtgaaattttagaattgactgtttgggttgataaaaatttacgatagaactaggagttaaatcctagaatgacaatcaaaatataattatacaattaaatactaccacgagtgaaatcctagaattgacgagtttttgaatcgatattaatatgggatggtgtactacgggtgatattttagaattgactggtttgggttgataataatttgcgatagaattaggagtaaaatcctataatgacaattaaaatataattatacaattaaatactagcacgggtgaaatcctagaattgacggccttgattcgatattaatatgggatggtgtactacgggtgaaatccgagaaacaacaatcaaaatacaattacacaatattaaacatttaacaaaataaacaaatacaacttaaaactttaaaatttgagttataaaatttcttctcgcggtgaattatacatttaaatcaaacaatagcataaatttataaaatcatcctaaaaatattcaatgattttttatttaataaaaatataggcccgcggtataccgcgggttaatatctagttaagttgtatttgttttgttaatattatttgttttgtttagtatttaagattttaaaataatatgttcagagtagtagaaaaatctgagatttagggattgaagattgatttgggaattttttccgattaggggatttattaagtttaaaacgtggtctttttggtcaattaaagaaagctgataacggtggataacgtcggttaataggtctgttaaacgatttaacgacatgtctaattggacctggtcaacggaaagataatgttttaaatattggtcaacgataagttgatgttttaaatagcctattatgaagttgacatattaaatgaccattttttgaaagttggggtattaaacgatatttttctcgatatataaccaacagaagaatcgacgagttttcattgagtaaactcaacctaaaagctaagtaaaatcaacaagcattgatcaactccatttgtacagaattagagacttctttataactaagtttcatgttcaaaagagagtaaggcaagagggaaagaagacttacatcatatttaagtggaatatcctttattgaagcttgggaagtggatgccgtaatattcactccggttcttttataggaaccaaaaagctgaaccatcttctttcagatatgagccaagtttgatttgatggtttatggatcaagaatattataacaatattctagaaatgcgaatttccgtctcggatcaagtactacaataattgcaagaatgtcgctaaatcttcctaatacttatcatatatctcggtcatatcctctaccattttacgaataatcctatcactaaaagcgtcatgatctcttagccagtatttagtcgcctacacttgcataaaatatgtttgttattggataaacgaactagaaataagttttgtaatttcagcaaacggtttcaagaagtcacatataaacagtgtctaatgaactcacctaatcacctgccacaaatatttttaaatcctttcagattccattctaccaatatatgaaattatgaattaaacaatatctgctaaattaaaagtcacctgaataatggcacaatagatcatatggcacaataaatgaaccattgtcacctaaactcttaaaacttcccagtttatgtagtctgcagttaaaccaaactataccaaaacaacattgatcaaaagataaaaatcaaagcaagaatttaccaaaacaaatatgaaattctcaatttaatcttctaatgcctccaaaatattaaaaaagaaaatcgaactaaatttgaacttcaaagtgtagattttcaattaccgtacttacatagaaaatgacaaatcaaacaagactcaagttgaacaaatccacgttatgattacaaaacaaaatataagttgtatataagctggaccttgattaagggcgagagttggctgaaaaagagtctatgcatagtgtttatgtgttttgtatcaggtgctttaaatgtggtagtgttatgtgttttgtatcaggtgcgagagttggctgaaaaagagtctatgcatagtgtttatactaaattaaagtatcatttaatactttgttatttaaatttgcttttggatttgataatttgattgaaatatgaagcaaatactattatgttaaaatttggttctgcccattggacagcccatttggacatgagcattaatgggcatgggcgttaatggacatgggccttagtggacatgaacactatttgtccaatatcgaaatggacattattggactgggctaatggacatggacagcccgctttgacagctctaattaaggccagtagaatgctttatattatcagagttgtgcattcagattgaactaattaacacgaggaatttgggataaatcggacatagcacttctgttttaagttccttttaactgtcttaacgtctcacttagaagattcaagatctctatcaaagatctatagatcttgaacctcactatatacaagtacaacatgtcaacatagatagtaaagataagtcaaatattctcctccgtacatgtggtaaattaaagctaaggaattccaatctcaatatatatatgtgtgtgataaaattatcttaaatagtttacttcttaattacatgagttgtacagtttattagaccaatatagctatatgaatttctttcaaggtctctcaaaactctttttttttttttgtccaatcccgtacgctaaatctgttatcctcataggttctgttccaagagttaaaagattttttttcatgtaattttcagtagacagctcaagtcaatatttctagaaaatatgctatctggtgcgttgaaacatatttggcagtcctttggacggaaaatatataccttttaatacatcgattacacaagtcattgtaaagtttagtttaaagaaagtttcttcaaagactttgatgctttactttcatcttggcttttttaaaaatgtaggtgatcatacccttttcgtgagatgttcacatgatgtgagttagcaacaatgttatgtatgtcattccatattatcatttacatcaacattgacaaagatatattgatcttctcaaagttttcattcaacagtctttcatattataaaacttagaataatttctatgttatgaaatagtcaccctattccatatacacattcctccaattttcatcctctacagcttgagtgtaggttacaggctctggctcaattttgtaattgaaagcaacggtcaggcagagttaacacataaacgaaatcccgcatcttaagagagtaaacacatatgctttaagaatcaatatgaaaacagaatagtcaaagagagcacactcttttaccagagttgattgcattggtagtttcactttcacatgttggacagtggtggtggcggcggaatgggacaatacccattagccgccgttggaagcggcggtggaagtacagctgctccaacggcggactgaggcttgttggctttaaaacacacatgcaaagtaaatatcttggagtcaggatcccaatgagagaaaaacttggttgatttatcaatctcagtgcttggaactttgaaagatatggtttcatatggttcagctgcaattaaaaggtattgatatttcttgtcacaaggttgaacattctgttcataagatgacatggaacgatgtctcggctttatgttgtcctcaatctcaggatattcaatctggaacataatagatctttgcttcagctcaggatcgtattgctttgtaaccctataccctggtctaccgattttaactgttttgcgaactgagactttgcgcttatgtggctgcagcggttgcggctgagctgaagcattcttagcctccaaggcagctctctttgccaagtttgtctgatgcttcttaccttgagtatgtaccaagtagtttccttcgttgttatgcaacgttgcacatagtctacactcatagcttccatagtgattttgtttgaaataaggatcttttgcaatgtttatggtgtcaagagcaagacgacggagacgatcacggcgatctatggcctcgttctagccggtggcggcgcctccgctaccaggattcgacccccacgctctatccatagcttataatatcggtagactcagctagagattagcagagtaattaggaaaccagcttttccatgtattctcatcaaaatgaaaatgatcacttgttgagatagatatatagtccatagttccgtttatagaaaagccaaatcaactaagttcatcgggttccttttgatgtcttgtttaacgtgtgaaaccaaacccaccattattattataaacagagatgcctcattggcacccataagaaaaaggcataaacttcttctacggttctgtttactaaagagttccaaaataaactgcacatatttaacaatatgatcattagcgcggtgcgatggagggaatgactccgctgacgagttggttagctgtgaattcagagaaggtagtataactgcttcttggagaagcaacagcgaagcctgacattcctgaagcagatgattggactgaagggcttgaatatggcttctcttcctttggaatcagcccatagatattctccagctccctcactatttccagcatccacggacgcgcttctgggttgtcctgacaacatctgatggctagttccatgaatctcttgacgcattcctcagagtactgccccatgctcctgtctatcactgacatcatcatcccagcatcgcatgcttcattcacctcccgcacgatgtttcttccgtgcgagattgggcgcattcctgtgagaatttcgagaaagacaatgccgaggctgtatacgtcactcttttctgttagcctgtggctcaagtaatactctggatccacatatccctgtaccatacgtttcgggaattagtcaccttccctaagggatttaaaacagaggaatgttaaagcaacatacaggagtgcctttgacgatggtagttacgtgatccctttgcactcctccaccatctagtgctatgagctttgagatcccaaagtctgcaactttagggttcatcttgctgtctagaagaatgttgcttggtttgatgtctcgatggatgattggtggatcagcttctgtgtgcagatacagaatccctctcgcagacccgagcgctattctcagtctcagcgccaaactcagtggttgtctaaacctcgctgcagtttcacattcatctatctcaatcctcccacaacacttttatatatacaagacaaggtaggaacttaccagagagtgcgtcctgaagagaaccgttgggcatgtactcatataccaacatctgaaatcaggcataacaaatcaactcaagactatcttgaaatttacaatgttaataagtgactcacctgttctcctttctgatcacagtagccaagcaaagaaacaaggttacggtgatgtagccgggaaagcaactcgatctcggtgaagaactctttttggccctgcagagacccttgctctgcacgtttgacagctacaaccagaccacctggtaaatggcctttgtagaccttcccatagccacctctaccaatctgagagagatcactgaaactgcttgttgctgaatcaagttccgtgaaattgtaacccttcacgctctccatgttcattggaggttttggaactaggccaaggagaaacatgggagattagcattagatatacgtttaaggaaaacagagaaattgactaagtttccacttacgtgggtgttcttgttccatgtcgacttccctagtttttctctttcgtttgcttctcttgatgaagaagaccaatgctagagaggacaatacaaggaagaaagcaatggctcctataatgattccaaccgagacgcctatgctcatccccgactttttcgggaatatgatagtaacttcatatacaggagtaacataaataaatactcttttgatgcacaaagatgagtagaagatatgtgtattaccgtctttgtaagcaccagtgttgatactaataatctcataagggccaagagaatcatcagtattcagagtgaaagttgcaaagaagtccacaatacgttgaacctctgtgctgttgaatttactgtttaattcactgtactcagggaaaatcttcatgttcatgaatagccttggacccgactgccatgcaaatgtatcaatagatatctgatacgggtttatcccgagatttttcggggatgctacatcgagcatgtaggagactttgtaaggtcgaaagtccgagaaacttggactcctaagccgaagatcaatgccaagtggtgcagcgcagaaacatgcaactggagacccaatcacgtagtcatagttttcgcttacggggcacgactgacgtttgcagtctcccgtcgagatggtttccgaagaagttgcgggagattccacttctaacgttgagataccacagagatcagctaactttcccgcattaacatttgcacaaaccgggtttccgtaaagcctgctcatcaaaacagagttctctcatttctctatccaacattccaaattattaatcttttgttctttttcaaaacataatcttacttgactgtgacattggagggagggtttagaagaacacttgacacatttgaaaacatgttgttcctcaagtccctgcaagttgttacaaccaaaaatcaatcaacaattactaagttttctctagtgttttgtagatatgacgtgtcttacaagataagtttttcctctgccttcaagatcctattttcccatatcacaggaatctccccactcaagttgttgttctgcacttgcctgaaaatttaagacaaaacttatgtctttttgttttctttctctaaaaaaaagaagagcaaaagagagtctaattacagtctctgtaaccgtggaaggcctgaaaaattagaaggaatggatccgctgagcaaattgttgtacaagtttctgcatacaataaacaaatgcagacatgtttgtcaacaaaaatgtaacgacatatcaattgtattccatttcttggccatggcacttacatagttgtgatgtttgcagagaacttgttcttgggaatttctcctgtgagtttgttggaggaaatatctctgaagcatgaagagtaaaaaagccttagagactaatgtaacatggattgttaagttttttttcttgttaaagtgactcacaagtaatagagaaccagtgatttgctcaaatcaggaattggtccttctaggttgcagtttctgagactcctgttaatgcgtgagacacaaaatcagtacggcacagggaaaacataagattttactatgttcagtttcttacaatttgacgagatttggtatcgatccgtaagaagatgggatctctgtgccatcaaagttgctaccgtccaattgtctgtaaattatgaagcaaactaatttgaatgtggaagaaagttagtcgtcttcgataagaagttgaagacacttacagaattctcaagcttggcatctgagcgagctccggtggaagattaccagttagcttgttattgtccatcaagcttcacaagttgagccttgatgatcagatttgaataagataaacagatttaaaggtaaccaagaaacttacaagtgcagaacattggttaaggtagagtactcgggcggaatctgacccgtgattgagttattgttcatgtgactagcaaagaaagtaaaagttatgtcagaggggtttgaaaggaagagagaagataagtaggagagaaggagatctcacaaatgcttcagttttttcaaatttgccaaggacgttggaagttttccgctaatttcattgtaatctatctgaaggattaagagattggaaagagaaccgagttcttgaggcaaagatcctgtcagttgatttccacttaatagcctgacaaaagataacatgaatctgttaagttatgcatccatgaagaggaaatattgatgaaacaatgatcaagactacttacaagaagatgagatgagttaagtttcctagttctggtggaatctgaccggtgagatcgttccacatgaagttcctgtgatcagaaaatataaaaaggagagacgttgatatctatagtttgatttcaaaaaaccagagcatgcacagaccaaaacacagaacatacaatatggtaagatttgatagtggatttgcccctatatttccagacatctgttatcacttaacccattacaagcccgctgccgcagatattcccgtggcgagcgataacccagcgcactatgcggatgccattcgttataatgctcgaacgcctctgcaaggttctttgctgccgttaacccgtctggtttgggcatgatactgatgtagtcacgctttatcgttttcacgaagctctctgctattccgttactctccggactccgcaccgccgtgttcttcggttcaagtcccaacatccgggcgaactggcgtgtttcattagcccggtagcatgaaccattatccgtcagccactccactggagacgacggaagatcgttgccgaagcggcgttccaccgctcccagcatgacgtcctgtactgtttcactgttgaagccgccggtagtgaccgcccagtgcagtgcctcacgatcacagcagtccagcgcgaacgtgacacgcagtctctctccgttatcacagcagaactcgaacccgtcagagcaccatcgctgattgctttctttcacggccactctgcctgtatgtgcccgtttcgatggcggtacagcaggttttcgctcaagcaacagcgcattctggcgcatgatccggtaaacacgtttggcattgatcgcaggcataccatcaagttctgcctgtctgcgaagcagcgcccatacccgacgataaccatacgttggcagctctccgataacatggtgtatacggagaagcacatccgtatcatcagtgtgacgactgcggcggccatccatccagtcatcggttcgtctgagaatgacgtgcaactgcgcacgcgacacccggagacaacggctgactaagcttactccccatccccgggcaataagggcgcgtgcgctatccacttttttgcccgtccatattcaacggcttctttgaggagttcattttccatcgttttcttgccgagcaggcgctggagttctttaatctgcttcatggcggcagcaagttcagaggcaggaacaacctgttctccggcggcgacagcagtaagacttccttcctggtattgcttacgccagagaaataactggctggctgctacaccatgttgccgggcaacgagggagaccgtcatccccggttcaaagctctgctgaacaattgcgatcttttcctgtgtggtacgccgtctgcgtttctccggccctaagacatcaatcatctgttctccaatgactagtctaaaaactagtattaagactatcacttatttaagtgatattggttgtctggagattcagggggccagtctagatagtaagccgagttcaggtgccagttgtccagtgaggttcatgtttagcaaccgcctgcaccatttcatcaaaccatatgacatccttaaggtttgcttttgagtaacaatagaagaaagttttaaagtccgaacatacaattctttaacatgaagaaagccatcagaaggatcagggatgcagatgacaccggtccagttagaggcgcatggatccgtctttttccagtcttgaagatgattcagagggtcctttagtttgcggtgaacatactgcagagcactaactgcaacaacaaaacaccctcattagcatcacttatcactgttcacatatagatggtgctcagagaaatctaaaggaccgtaccatcagtgggatgagtaatctcttgggcatccagcaaagacaagcaacaagaagacacaaccagaatgattccaactacacccatcatctctttcatcttggtttctgctttggtttcaataaagatcactatttatctagcctagagatgaccttggaatgctgagaaaaagtctgtaaattgcatctttgaagaatgagcactctatatatgaagttgaagcaacaattacttttaaaaaactcataatgtaactatcaataacccctagttggtggttttgttgccatatttaaatgagcgtggacgcggttaaaaggcaactaacggtttgttcaactctcttcctccattggattggaggaataaaatcagaatagctgacttcttctgtgttactttttctcttcttatgaaaaattcaaaacttacatttttcttctttaatttgtctttaaagataagagttttttactaatgaggagaatttatatagaaatgaaccatcttgacttattcagagaaaatcaggaaaaactcggaaccatcttgacttgttcagaaatatagtatgtagtgacaggtttttgtatgatataattactttgtggaattggaagttgcacatcaaattatgagcattgaagagaagctttaataagaacacctcaaatagatatttgagttgacaaagggtgttttatgtaagttttaaaaacattagtgatgtattactgattaagaatcaaaggtattaaaaaatgtatccgttgactctttcattttgccattactttgctgctagtggataaatttttcatttctcaaatcaccatgtcatatgtttgtaagcattactgtataataatcaagaaaccagtagtagggggacgtccatacttgttcaatttatctctttagtccatagaagttacctctttatagccataatctgcctaaaagttgtcaccaggaaaaggagctgtctcccagattgacggtgtggcgcgttatcctatgttatgtcaacatcaataatagctaggattatgtagttggtagtttcaggcataatatagaattgggaaaattaactaatcaattacctgcaaagtgtagtcctttcgcgaacaagatgttttagatactttctttgcataccttgtgaacaatcttgagaggagaaaccttgtgtacagattagagactagaagcataataactgcagaacagtcttgagaaaactgaatacacattgccaaaactcaagataacatgtgtactttacttgtttctttacaattttcttccccaaggaaaactatacatcaaaaactagtttctgcagaatttcatattgtatacatccctaaggtcagccaatcaaactcattctctgggagcacgttaagattttctactctaatgcaaactataaaccaaaacctaaattctgcacaattttcagactgtacaccaaaaactagttctctattcaacctcctcatcagtaaggttcagccaatcaaactcattctctggcagctctttaaccatttcatcaactcttctctcgacaatcacattgattctccacaacacaatcttactttcccatttcatacctttgattgcatagagtctccaaagcagacccttaaccaatttgtactcgctcgtatcataccatcgaagttgtttcttcacaatgcttcccacatctctgaaagctcttctcacaagcccaacttccattcctctttccacaagctttctcactgactctatcatcttatgtgcaatctccttaacggattcagcgtgactcgagacctctatcaagtgaattgcggcacagaaggcaccagtaaacgccaaaacccagcaactgttatctaccatcaactctgttggtgggtttaaccttctgcttatctccgggagaagaatttcaatcacaggaatcaaaaactcctcattttcaagcggcattgttaagcactggaagatataaaccgctctctggaactctattttactcgatgttatatagttgcgtaaagcataccatgtgacatcttggtgtttgaagatctcaaacgcaacgtgactcaccacctcacctaggactttgaacatgctgtctgtgattccttcttgccgaaggcaagagataagcaatggctggagttgtctcatcactgaaaagtctatttccactctctttgaagtgtgatcagagagtaagacgttgagttgtctgatagccatctctctggtctcatcttcaagatcagttgacgcaaagattttcaaaacttcaagtgatgataaagtcttcaaatgatcaagccaggcacgatcaaactcttctccatgatcttgatttcccggtgtttgaaccaacggattgatcttcaaagaactatgttttcctgctcgatttcccggtgtttgaaccaaccaattgatcttctttataatctccttgctctgtgttccaaaacttttgatcctaaacatgaaagccatcacaaaatgacattgttccttattgtaattacacagatatttgtcttctgacaagaacctctcaagatgttcaagcccttgtaccaaaaactgttcattccccttctccactaactccttcactgatttcgcaagaatagaaagaagattctctaccattttcacatatctcatatctttatacgaaatctgaatccccaatttaacaacagtttctaaagctaagctccaatcttcaacttcacttttcacaggattaagcaaaaccttctcagctttctcaacaattaccttcataaacttgttgatgaaactcttatacactgatggcaaatcgatgaagacatgaaaagccttgacaggttcgttttccgctagccagaggatacaatcactgagctcatgccatccaccattatcgcaaatcacaacattgtaggttattaaagaaacgactcttcctaggaacttcatgtcagactctttggtttcttgcatcgttaaacattcaatcacaaggggtttgatttcatggagagcgacgcgagagagtttgatgttgcaatttctgaaaacggcgagggtttcagagaggagataaagcgaatgaaatctgatgacgtcattggaagagtgtcgatatagtttgaggaacattagggttaagcaatttgggaaattattagcgcagaaattgaaaagatcttccgccgtttgaaattcgttagtttcttgaggcagtgagagttgtttgacgagaatctctgctccttcgtggcttggagtcgcaagaaggtctcttgctttacgattcaaagattcttccattttcccgagaaaagtttggattctcgtcttagaatcttctgggtttaagagaggtttgaagaagaaatctgtagcgaggaagagagagtttgcgtttgttattacggaactgaataaccggaaataaccgtaaattagctaaaaccattcccgaaatatatcaaaattgaaccggacgaaaataaatcccaccaaattgagatttaaaactttcatttaacgttacatttgatcatcccttgcgatggcttaccacatcattgcacctagtgtttgtgatttggagatcttgtccatttatctattcatacatgtctgctcttgccttttctgcatcgtgatttattgaaggtaataaggtcaatacgggggatttccataacctccttagtatccaacaagccacgatacgattatcgttcattcgttcccatgagatatgtatatatagtaaattgtgagcatcgtgtttaatttctgttttttccaaggtttgtagacagtacaaaagcaactggttcataactatcatcgagtttttctcgtcttcctaacctctctgaaaacatagctgcctatgcaagaatagcatgacaaatcaacttctcattgtaccactcctagaatgaaaaccagttcactgtgttatttgtaacccaacctactagcccttttttctgaacactactcctgaccatagcaatgcagatattataatagccgcaaagaaaggaactgcagttggaaagcatcccatattgggacgatctctgcctccccattgagcattaccataaagtgttggatcctaaaccaagtagtacagttccatctgtattactgtatatagtaattcgcacagaaaaaaaaataaagactttgaaaaagtaagtactcactcacatgtacgtgtcatggcactggagttaacaaatcacagtgaatttacatctctcatcttcataaggatgtaaaggatatctgcatgccttgtaagaaacttctattctaacaattgtgggtttatgattagtggtagtctaaacaaaatcagaaggacctaagcccctaccaaagaaccaagaccaataattgtttttctatacaacgttaatactttatacaactgcaaactatgtatcaaaaaccatagtctgcaagcagattttcagactgttcaaatccctcagcctcaggtaggttcagccaatcaaacttatcctttgggaggtctttaaccttctcattcactcctctctccacaatcacattgattctccacaacacgatcttactttcccatttcatgcctttgattgcatggagttcccatagcagacccttaacgaatttgtactcgatcgtttcgtaccattccatttgtttcttgacaatgtcttcaagatctctgaaagctctcctcacaagcccaacttccattcctctttccacaagctctctcacagaatctatcatcttctttgcaatctccttcacggattcagcttggcttgggatttctatcaagtgtatggtcgcacagaatgcaccagtaaacgccaaaacccagcaactgttatctaccaacaagtctcttggtgggtttagccttatacttatctctgggagaagattctccatcacatgaatcacaaactcgtcatctccaagcggcgttgttaagcactggaagatataaaccgctctctgaaactttgttttgctttgtgatgcaatataatcgcgtagaccatcccatgcgacatcttggtgtttggacatctcatacacaacgtggttcaccaccttaccaaggactttgaacatactgtcagagattctttcttgcttaaggcaagagatgagcaatgcctggagttctctcatctctgacaattttatttccactttctttgaagtgtgatcagagagtacaacttcaagccgtctgattgctatctctctggacctatcttcaacaacatttgacacaaagattttcaagatatcaactgatgacaaagtcttcaaatggtcacacaagccacgaacatattctgctccatcatctttcgtttcctgaggtttcacgacaggtttgctcacagctttgtcctgtgttttaaccaaccgagtgatcttccttacaatctccttgctctctattacgaaatctttgatcttgaacatgaaagtcatcacaaaatgacgttgtaccttagtgtaattatatagattcttatctcgcaacacgaacttctcgagatgtttaagcccttgtaccaaaaactgttccattcccttttgcactagcatcttcactgagttcacaagaatgttcagaagaatccttatcaaatcaactctcatctctgtatccaaagtctgaatccccattttcacaacagtttctaaagccaagctccaatcgtcaactctatctttctcaggattaaacaaaaccttctcagctttctcaacaattaccttcataaacttgtcgataaaactctgatacaatgatggcaaatcgataaagacatgaaaagccttgacaggttcgttttccgctagccaaaggatacaatcactgagctcgtaccatccaccattatcgcaaatcacaacattgtaggttattaaagaaacgattcttcctaggaacttcatgtcagattctttggtttcttgcatcgttaaacattcaatcacaaggggtttgatttcatggagagcgacgcgagagagttcccagttacgatttctgaaaacgacgagggtttcggagaggagataaagcgaatagaatctgatgacgccattggaagaatgtcgatatagtttgagaaacattagggttaagcaatttgggaagttatcagcgcagaaacagaaaagagcaaacgcagtttcatattctttggggtcttgacgcattgagagttgttcgacgattttctcgagtcctttgtggcttggagtcgcaagaacctctctcgctttcaacatgagattcgaagattcctccattatcattttctcgagaaaatttttgttcttcgtctccagaaattctgggaatttgggtttaagggttaaagatttgtaacgaaagggtatataaaccgacatttaagtgaaatcgcccggtttgatataacggggggtttaaaaaatccgacccgtttaacattggccagtgggtcctttagtgatgttgggtttcaaaccggtgggcctaatcaattttatatttattttgagctgtttagtaaaacaatataatcaattcaatgatcgatgttgtagcataaataatctctaaacgtttaagaacataaacatgaaaaacctaattaaccattattaattatcattgccggggtgtgcaagcacgagtcccatttttttagacatttttttcttttgtattttaagaccctaaaaatttaaagaagtgtatataatttttaaaatattaaatatttaggctgtaatttcaaaacaatttcaaaatagcacagatcatatggtccaataaattttgaccgagcctggttatattcatccaaaacatatttttgttcatataataacaaaacatggatatttcgttttgatgtcaatgaacatagatcaaaagttacaaaataatagtaacataagaacacactagacgatcatacatgtcaaaattccgatcacaacatcaagatatttttaaaccgccgcagaagactcatgtgattaaagattgaagaagatatattcattactacatttgcatataaatactctatagttctgaattattgtttatgctttgttgttgttaatgatgtacatgttatttggattgagaatcgtatacatagcgatgtcttaagtaattctcaagtgtaagagaaacaaaatatcaaaagtttattaataaagattcatactttcatttttaacaaatgatgcgttgtggctgagatggaagacgacgtgcgacaggtcaaattgggagaaataataagaaaatctaatgattacacaaaattactaattactttattattgaaaaagatgggctgatttggggcagtttccataactgttgttggtgatatcacatattacgtataataaatcgaactttgttaagcagaaaatcaatttcatgcatgtgacttaaggtatttgtacagtttgtttacatgagagtttataactgaaacttaaatcagaacttacattttgtgttcaaaattaatcaactacataaaggataaggaagaaaacactaacaagaataagattagcatagcaacgatagattggattcgtgagcattaaaagtcaacaatgatctaatcacataagatatagattgccacatcactataacaatgttgaaacagttgaaattttatgtcgtagcaacggccaaaactgtaatggatacaataaaatatattcggcaagaggactctaatagtgcggtgagcgtggatctgaaggtcgcgtgttcgatccacgctcaccgcaccatttgataacaatacaaactatgaatggtgattttgaaaattgccctatttttgagtttttgtttgaaaaatacattctaccctattttcaattaaaaatataattttaaatatgttaaatgacaatttttgtccagatttgaaataaaagaaatctttttgataaactaaaattaaatacgaatttgtttttaaaaaaaaagaataaagttaatttaaaatcttaattattatttttaactattttaagataaagcagattatatattttaaatattaaaatctagcatgatattatcaaaaaaatattctaaagtttatcacttcatatttctcacagtatataaagaaatcaatctaactccaaacacataattttttaactctacattattacccaagttttctctaactgtaatgtaaactactttagctttgtttgtaaatatttgtaatttcaataatcaaaacatgataatgaaattctgcatggtgtaacatatatatgcatggtgtaatttatacgtatatatacgactaacttttctcttttaaaaaatattgtttttgtttgtcttgtaacaatatttttcattaaaaagatattcaagataaattatatgtaaaattgttaggtagttaatattaaatagttgacgaaaaaaatagttacatcaaatatttttaaattaaaatatattattttgatcgacaaaaaatataataaaaagctgattttgttttaaatataaatgttttaaaattattagtaaattttagtaaggatatatttgtaattttatattcctttcttattttagaaaatagtttttaaagagaaaaaatgggtaggttatttttcaaacaaaaacttttctaacttttctaacttttctaaattttcaaacaataactatgaatctctctatttcttatctgtatcgatagtttgttacaactgagaaccaatttagggcatcactagattcatcaattctctcccatgacacatgcatcactttacgccaaagacttgatcaagctactccccgaagattctccagttcatttgattctctacgtattgattactcttcacactacatgtttaggtcttcttcgagtgtatatctcttgtaatgtgttagatttgctggttcattatcgaaaacttatcttactaatgtggcttcaaattctaagtgaatcataggccgtgctcttagtactcgttcaattcatataataggaaatagtgtgcccacaacaaatcttattacacaaatttttaaatcaaaccgagcaaagaaaacagaagaaaaacacttttgcaattcagtatacaaaacaaaaaaccgccgacgatttaaacctcttctcagttacaatcctataggaggtaaaatgcaatctccaaaattgccattttctcacatgaaatcatcatcgtccatggcatcataaggacccgaaacaagatcatcatcaggcttatcaacatgaagttgtttcttcttacctagtaaacacagtgaaacgaaagaaagaaagaaaaaaacattttaatctgatcattttggaaacagagacatgcttgcttagcttaaaaacatataattcacaagtcttatcaaatccaaagaataaaacaaaattcaaagactgattgtgtgtacctgacttctttttgccagcagcagcttctttctccgccttcaatttttcatttgctatagctgtaatggacgaagcaacgtctttaacatctgctgctttcatattagccacagaaagtctcatcactgctttgagtagcccgatatagtgaaagcttttctgcgaaatagtagacatagttaaaatgcagacgaattggtcttaatatgatatttggtcatatagaaataagtgacagttagctaagacaagaaagtaacaggaaatgaaaatagcatacctcaaatggtacaagtctctgagatatcaactcagcataatccaagaaatcgctttcagacttcggaattaacatatcgacgcttttctcttcagtctttactccaaagagttcagcagttgattggtaatcagcttcctctacaagcctaagataagaagaatattaaaaattagcacaatggccttcctcagtgacatgcttcttacactactagaaaacatttttcatcccattcaaccaaaccaatgcagaaccaacagtagaagcatatgtaagtgaactattattacactctacctctgcatgcgaagtttctcagcaataggatctagaggttcttcccttgatgttcctttcggagcttcaacagttttaaccttcttttcaacagcttttactgctggtttctttggagccttctcagaagcaggctttactataggtggctacaggagaaacaaagattgttagccgcaatctcaaaaacaaataacaaacaaaacccaatgactaaaagtatataatgaaagaaaaatataccggagcagatacatcttcctcctcccacgagtccttgatatcattctcatccacatcctcatcatcccagttacttttcagttcaacttttgagggaagtggttgaaagtcctcggcctctgaaatcagaaaggaaaacctaaaagtgagaattctaatatatttcccatatgaaaacttcaataaaacaacaataaagcctatcatcttagagaacatagtaaaatatatatagctgtatacagcctgtactactttttacatattcaaagagattaatgcaacacctagagaacaagaaagtattgtgtattgaacaattcttaatgtaagtcttaccccaatcatccatatgtgtcgccgattatctagaagaagtacaagctgctatctgaatccaactgaaaacctgcacaaggcacaagcagccacataacatcagaaagaacaaagatcagaacaaa

SEQ ID NO: 781 - DNA, 51436 bp, Arabidopsis thaliana
gatcagaacaaaggctctcactggtgatgcttaaatgtaaatcatacattagttagttatatatcctggaggtaaaatgcaacaaaactcctatgaaaaatcgaatatgatattttcaatatagtgatattcatgattttaagtagttagtcatctggtctgaccaagcaacaaaaacgtgtgtaacaactcacagtaaacttgcaaataccaggaattcataacagcccaagacaatgatacaattactcttaggatcaaggcttcacagcttaagaacataaaacaatctactatagaaagactttctgatcctactagtacttcacatgcaaatagaactactaaaataagagcatagagcctgattacaagttaattctcaagcaagccagcaaacacaagtttgttcgttccaaaacttaggttatgaacaccgagtttgcgacctgattcatgaaaggattcagcttttaaacatcatcaatcatacaaaagaatatagcaaaacagagtttgattgatcattagtgtaatctaaacccaattagtgacaaattacacaacttttaaggaggaacctacaacccaattaccaataaaaacccatcaagcaccacaaatcctaaatctaaccttacacaaaatcagtactgataaatattggcatgcccagctcggattcaattcgatgaattcaacagtcaagtgaaattgaagcgaatggagacggaagaaacagtacctgagaaaggctgaatcctgaaggtaggtttcagccggagaatagaaatcgccaccacaaaaaacgaaaaagatgtagctttccgatgtgaagcagacgaaacgacaacgaagatggattttaggtttttctcttctctttctataatattcgcatttaagtggaattatttatattttttaaaaatacttatttcccttcttctttttttgatcacctaatttgaattggcttaaactttttaaaattacctatatttaggtattttattttctcttttgttttgtcagtgttatattcttaacaaaataaataaaagaacaattgttaaaaaaaaaacataaaagaacaattgtttaaatataattcataactaagattaataaacattttggaccaaaataaaaaaaaataataagaatttatttttaacgaaattaaaaatttagattaattaagaaaaataattttaaaatgatataaatttttaactatcatcagatgtatttcataaatattattagtaaaacgattttcataagacttccaattttgatataatacaaagacttgaacaaaaacaaaaaaacctaaaaagctaaaccacaaaaaaaaaattgaaaacttagtttttattagaaggaaaatatcactcgataacattttttttaccccctatattatcagtttagtcaattatagattgtagcgagatattattgcacacggtaggagaagattttatgttgatattgttttgggagttgtatttttttttatgtttttttttcttccccacctaacgatcagtcatatttttcgatcctatatgaagaagaaaggttatcgcgatactaatgttatcagaacgtgttcctagttttgattcttgttgtaaaacacaaatggacaacatgtggcatcgtcgttatcgcgatactaatgttatcagaacgtgttcctagttttgattcttgttctaaaacacaaatagacaacatgtggcattgtcgttattattttaattatctgctagttgttatatcgactaacattattaccatttaaactcgtagtctattgtttgtaaaaagaaattaaaaagttaactaaaatgatatagtctttagcggccaaaacgagattatcctgatactgatgttagcggttagaagcttatcgcgatacgggttgttatcaggaagtgtttattagttttgattctttttgtaaaacacaaggagacaacctgtggcatcgtcgttattatttttcttatctgatagaagttaaatcgactaacattgttaccatttaaactcgtaggctattgtttgaggattatttttaaaaggctacaaacaaatatgctcgtgtttagcgaataagaggttttcatgattctgttattattagaacgtgttactagctttgattcttgttgtaaaacacaaagggacaacatgtggcatcgtagttattatcttaattatctgctagtagttatatcgactaacattgttaccatttaaactcgtagtctattgattgtggactttctttataaagttaacggaaatatcattatgtttagcagatacgagattatcgcgatactatttgttatcagaacgttgcttatagtcagcgagaccacataggttctatttaaactcgcagtttattgtttgaggattatttctaaaagccaacggaaactagtatcgtatatattcgacatacctacaaccctatacatatcaataatgatttacaatatctttatgtttttaatgccagtgggagatatcttctaagatatctttagcatgttgaaactatgctataaactatattttggttttataggagcttttttgtcagaaattatgttggggaagacagaggattaataactcagttttcatacatagatacttaatattctgatcatctgagcatagatattaatatagcccttattagaatactcttttcaatctcaatgtcatagacacttttaataaatcaacaaaatttatttgaattctatatagaatagcttatattgcattacaatgaatcaatgatattttctttattttcaaccttttgtatatgatggtcatcgaatatatcaaacttatataagaaaatttaaattgatattaatttttattattattaattttaaatcttatgataggtgatgatacaaatatgaatatatcattctagtacagaaccatttgtcttcaaacaacaacacatgcctttatgtgggcctgaacgaacgcacaagaatggatcctccccacttttgcatacgttgatgcagtcgtcactagttacacaatggccttcgaaattacatacaattgctgaaaaaaaatatttttttttaaaaaggtatgaaatatctcatttttctaacattttttgttttgatatgaagaaatagaggaagaaaatataaccagttgattgagggaaaacgagacagataaataatagcagagaggcaaggtaaattttttgtgcagacattactgtaattgtagctattttcggtaaatttaagttcagtttttctttcttggttttagagcaaatggttacttccctttataaaatctaatcatatatatatatgtttcttgaaaaaacaaattatatatactatttgagattgtaagaagtcaatatatgatattttattatataaaatataattttcaaattaagtaactcataaaattgtgttatgtgtcaattatatcgatcaattgttgacatgtgtcagaaaacatttaactttttttcttaaagaaatagaaaaactaataaagaaaacataatctacatatattaacttatatgtccatttcattttcttaaccaaaaagaaaattaacaaatttatttttacatgtgttattgatcaattaaatttagcatgtattaatatttttataaaattatttattatggataataatactaattaaaaaggtcactaaagtttaaaataataatataatttatttaacattaattttaatgggataacattgtatttagcatgtattacttttgttttaaaaattatttagtatggataataataataattaaaaaaggccattgaagtttaaaataacaatataatttatttaattattaaattggataaaattgtacttatcattgtaatatagtgtttttattcatttgttaaatcaaaacataaaaaaaaattgaaaatagaaaaattgctatgaatgcccttttaacactacctcttttcaattataccatttcatgttggcaatttttatttatacccgtttttaatttttaatgactattttatccctatttagaaaatgttttaggttaactaaatgaaatattcatttttcctgcctaaaatattcccaaaagaattttccaccaaaatgtttccgccaacaaaatttttgagccaaaaaatttccagccaaattttttttcttcaaaaacatctttcttgtgaaaaaaaaatggcggaaagtagatttttaaagaatttacaagggttttaaaagatttttaaagaatttacaagggtttaaaaccctttaaaaaatcttgtaaatctttttaaaaccttttgtaatggttcacaagagttttaaaatggttcaaaaattattaaagggtttacaagggttttccccaattccattatccagttcattgtttttggtcgaggagggggagagaaaccattcgctattccttttcctttgagatggtacgggattcgcttatccatggtgttgaaaaaggttccaatgttagaggtaacagggagattatgatgtatttggtttagggttattctcttagtagtgaacggtttcagaggtttaacaaggtaacaggaaacactttagcaggtttacaaagcttaacaaagagtagagaaagccataccagtggttagatttcttggagttgcactgtgttgtctcactagggtggtggaggccggaagataagcagaagtgttgccggaggagctcaaaaaaccattggatcttttcatttgtagctaaagaccaacgggtattgctactttcagtaacaagaagtggttgagatttggttttttgaaagttccattctatgtttagctatcatggggactcgggcctgggagagaaaaaaaacctttttcgaccagtatttttgtttccctttatatacttctttgttcaaaatggaattgggaaaaaccaatggttaaaatggagcttatggttacgatttttgaaccatttttgaccaataacacatgtaaaaactaatgtttcaatcaagttcattgttttgtccaattatgaattggggaaaaccattattttctctttttgttttcaaatgttaatcaatcgccgatttcattatagctaggatttaacataaaaatggaattgattcctattgttacctacaatatgaaatgatattaatcatgtgaattatggaattgattcctcgactaaccaactgtcgggaaaagataaatgtcaagcacgctatgcgataaccgggaagttaattacaacccaatgtccctcacccgagtacaggaggaggtagtgaacaagtatggggtcatatgacatccatggaattttgtttttagtttactttttgttacaaaatttatattgacccttcttgaatatagatattgacccctataaatgtttttattcaaaaacaagtgtggtctaataattattttgaacccttcaaatttgcaacgttataaaattcatcacaaataagttttaaatatatctacatatacatttttgcagctattttatgaaataaatcttgtagtttgaacttatttacaatgattgccattgagttttaattattgattttttttagcaataaattgattaacaaacgaaaaatattccaaatatatttcaatcccaaatataacgcagatttctccaaaatttgaactagattttggcaactatttaaaacaaaaagtgtttgacaaactaaaatacaattgcaatcctttaaaatgagctaaacgcacctaaatacattgcttatcgattcactaaatcttatttctccaaaatttgaagtagatttcggcaactatttataagaaaaatttgtttgacaaactaaaatacaattgcaatcccgtaaaatatttattttaattatatatttaaattagcggtgtactgcgggtttttttcgggacgggtttggcgagacgggtttggaaatactttacttaataacaattgtaaaatatgaaataaaaatattttatagatacatataatttacatacttttatatatattaattttaaaaaataaattgtcttcgcggtataccgcaggttaaaatatagtattactaataattttctagtaagtttaagatgttaacattattgttgagcctgtttaacaaaatattaatttattttgttgctaaaataattatgagttttactcgtgaaaccatttaagtttaactattccatccattgaaatgtttgaatactttttgaaccatcgtagtatgtcagagcgtagctccaacacttgtcttattagcatttggggtgggtaaaaacgacttgttaagtgtgttttttcgttttacaagttgagaatcaatcaataacatagtcgagaatcaataacatgacgagggtaaaaactctttttctatattaggataatatagtcgagaatcaataacatgtctttatccgaaaaatactcattttattttccaactatttgcaattagtataattattttccaactatggtatgtgcaaatttaatccttaatttatcattgacttaacaattttactccaaaatttggtgaacgtttattagagaaacgttaaacgactcgattaaatcctaataaactaaaaaaatattcactttttctgaatttgagggaaaacttgaggatttctgaatttattaggttttactcaagtcatttaacgtttctctattagttagtaaacattgaccaaaattttggtcaaaattattaggtcaacgtcaaagaattaaatttgcacaaagaatatttgaggaataattgtgttaattgttaatagttgggaaataaaatgagtatataccctgtctttatctgagaatactatgaaattttagaatttgaataaaatatcaaatttttgtaatgttttacactttcaataaatgcatgatttgtagtattattttctatatttaaagaagaaattttctatgagacacgcttttaccaatgtattataaatccgtttcatgcaaaataattaaatttgtattttttgctaaatataaacttttgattgactctcgactatgctacttctaaatatgttttaaaaaaaatcatacttggacaaaacaatgaacttgattgaaacattagtttttattattttaaatcgtattacaatatgatgatacaaatatatggttgtaacattatagaaaagaaaaactatattacttcgcttgataatggagccccttcataatgtaaacaacaacatttgcctccctttgaagaataaggaacacacagttgaaagcttggatctagcccatggcctctgcatatgcgtttgcactggtcatcagttctacaagagcctttgaaattacagccacttgctgaagaaaaaaaagaaaaaataaataaataagatgaattaactcatacatcttacatttttttgtatgaaaaaataattcaaaaaatgagcatattaccagttgattgagagaaaagaaggcagattattaatagcagagaaacaagctggtatttttgtcctgacattattgtatttgtagtttttgttttgtgaagacaattcttagttttttcttggtttaagagcaaatgattatcagcctttatataatcattttctattcaaaatttccttatatatataccatttcaaatttcaaaaaactaagacaaatatcttattcaaagtcgtgtatcaattattgaacattcctatacggcttatgtcaaattttaaatttattacatgccacttatgagaaggtcagaagaacaataaagtaccaatgggagacaaaaagaaaaaggaaaaaaatattgactgttgactatagaaaagcatggctccattcatgtgtgacatttctatctttatgatctatatttagcctccatttttattgtgacaatatttacaaagtatgtccattgcaaacacttttaaatacgatgaacttaatttggcggataacttgaaatatgttttcttcttgttgttaaaaattgaaagacaacttagtaatattaaaacggataacttggcgagaaactaaaatacattttttttaatatttaattagtcgacaagaaaatatcaaagcggataatttggtaagaaatgtttatgtccaactgttatatcttttataagtaaaaaatgttccattgacatggtatacaaagttggaagtctagattacaaaatgtagtggatcaatcaaccatagagccaaaatatattggactaactaaaacaaatcaaagaagcaatttaggtaatgaaaatcgttaaaggaacctcgtttgatcagaagagtgtaattgtttggtgtaattctcagagtgctctatgcttgtccaagaatgcagtacattatgaaaacactaagcatattgatgtgaggtaacatgtcatcagagaagtgattaagcttttgaagaatccaagttctaggaattcggctgatatcatggctagagtgattctaacaagtttagtgatgcattgaatttgttgaatataattgagatcaaataatcgaggttggaatgagggttaacggtctttaccaaaacaaatgagggtgaattcactatgaaggtttcaagtatcaaggtggagttttgttaaaatttaatttgaggtgtttggtctggtgaactaatttaaacaaaattggaggtgaaataaattgttcttgagcttaagagagactttgagtcagaaagaaggtttgacttcaaaagaaaatggtaaacatacgaaggagaaggtttcctattaatattggtatttatgtaatttcacgggctctgcagtttgttcagtcttgtaatcgactaactgtgaacatcattaatggatttatagaaggccgagaggtaggaacattttaattcaaggctttttagttcaccaacgaaaaaacttgaatttgtcaaatttgaatattgaaaatatgaaaaatctaatattattcttatccagttttgttgtttaatgatctcaatcttttcattgatcattcaagcttaatttcaaatactcaaagcccatagatgtcgagactcctccggacacagagtcggcaagagtcaagattccttcgaaacaaagttgaggagttgaaatacaatgttcggaagtcggaaccaaaagccgacggaacaaagatattttcccaaactcgcatgtctatgagttaaaaaaaagacatttgtcttggcctcctcaatattaaacaaattttggcctccaaattttaaataattatttagtatattattaaaattattatttttagtgttatgtatcttaagtttgaaattttgttcaatatattaagatttattattatttctaataatttacaatataaagtttttgaattttagtattttcatagataaaaagtgaaaactaagaaaatataatatgtacggaaaaaatatatatataatatgcaaattgtataaaattatagatttatagttaagtgtacttcatagtgttaactatctctagttaattattaaaaatatttttagttttagttataactagttgagtactgacatacaatatccgtacgcctcctcaaaatattgttcaacattttgcttaaaattcaagatagctcgaataaagtattggtcggacgtaataaaacgttttccaaattttcgttgtttagttaataatatggctcttcgattgccagacctgacaaaggatacccaacccccagttagttaagatatctcacctccaattagttaatgatatatatatatgagaacccatcaaattactatatggttgtattatagtgagcattgttgatatcttacgaaactatactcgataatggagaaattagagacattaattaagcttagattctaagcaccataccatctgtattatatgaaaacaattatcatgatatatatataatattatattatattgtaaagaataaagataagatcatgctagcataatacagaataaagataatgctaaaagcccaaaccatatcaaacactcagtataatactatacatcaatctcacacacgtctttcatggatgttacgtggtcaatttatcactaaaccctaatcatgcatgttggtgttttgccatgcccatgacacaaggacaaaagacttgagatttaaggattgcatgagttaggttcctttttccaatcacggacctaacttaacagtatgacattccccttaacctttatgcattattcttacatttctttgacaaaaaagtcttgcgcttagaattaagaaattaacaatatgatataataagacagaattataaacagttttatctatcactttctccgaaattgatgactcaccaagaaacatttcaagattggggtttgttaagctaacaacctattggttcaatttcttgaaacttttgtttggaaaaagagggtcacgagtcccttactcgtgactccaaagtgtacaatgctatatctacccgtagatgtattatctcgttccttattctttagtgtgtggtaatctcattcaattaggaaaaatagcttttaccaaaaaaaaaaaaaaaaaaaggaaaaaaatagcattcacttatttgcttctttttttttttttaatgaaaattaactatgattgtattaaatgttaaaatcctgtaaactgatttaaaaattctcaacgtaaacacaaacttgaagaaaaaggtcgaaaagacgtcgtatccaggttaagatattgtagtcccgattgttttagacgcaattttttaacccttgaatgacgtttacaaacaaatagttttacagttaatctgtgtagattaaatacaaatccaaaagtgaaggatttcttccattttcatcttggatctttgtcagttttcagatttaagtcattcaaaagtttgcgcttgattaaaaaaataaaaataaaaatatttgcactcaactgcttgtatatattcacatttcgtggtgacatttcacagaaaatcaaagggatgcaagtgtaacgcaaaataaatggtctaaatggaaatgactgaacatcggaatacgtcgaaataactgaaaattagatgattaagtcgtctatatatatatagatagataattatatatatatgatatatccagttgtttaatggaatagctagtggattcacacatatattaaaaagtaatattacgttatatgaataatagtttgggtggtaatatatagagatattcttccttgggttttctgaactattaaaaatgtaaatgattaactaaaaaaactttaaaacaagattattataaatttagttttttaaattaacatggttaaaaaataacaaaaaattatatgtagcttcatttgtaataggattagcggatattgatatttttaaaaactaatatctaaaattattgatagttaggaattggtcttacaaagtttgaacgtaatctaaaattatctaaaagctattaacattactaaaattatccataagttcgtataccatgtttttaaaaatgatccgtaaaccatgttcgttcacgtagtgattcatatatctgaattacctttttacgtcctaaatgccaaaaatatgtggatattaaattgaaatgagtaatgaaataatgtaacgacaagttaaatgattctcccatctagaaaagttaattaaggggaacaatacaaagcctctttgacatcgagaagttagcgcgcgattaacaacatatgattaaatagttcaaaatacaactcccaaatgtgagatggacgctatatacgaaaattacggacgtgcatgagtgggaggtttaatcagaaagtttgttgcatgagagctccaccaatttgtttttttgtcggacaatatcatcaatctgaaatcgggaaatatgtgtttatctatgcggggaatatacatttcattctttgaaagtatgtttctaactcttttggattgaaatgtatattgggaatacttattcaatcaaatgtgacaaatactcctggctactacgaatattggttactatatctttatatatagcttttttttttttttttgaataccagaaggttctgggccgaagcccgtaatccctccaaacccgaaatcacaacatgtaatattaattttgtcccaaacatcatatatatagctattaactaatctatatatacatttttgcagccattttgtgaaataaatcctggagttggaacttatttacaatggctgccactgacttttaattattggttttttcagcaataaattgattaacaaacgaaaaacattccaaatatattccaatcccatatatcacgcagatttttccaaaatttgaactcgatttcggcaactatttaaaacaaaaaatgtttgacaacccaaaagacaattgcaatcccttaaaatgagcaaaacgcaactaaatatatttcttatcaattcactaaatcttatttctccaaaatttgaactagatttcgacaactatttaaaacaaaattttgtttgacaaactaaaacacaattgcaatcccgtaaaatatttattttaattataaatttaaattagcggggtaccgcagtttttttaacaggacgggtttggtggaacgggtttggaaggacgttacttaataacaattgtaaactataaaataaaaatattttatagatagatataatttgcaaaattttatatatactaatttagaaaaataaattgtcttcgcggtgtaccgcgggttaaaatctaatattagtttacttttgtttctaccataacatctacacgatttattaagatttgtcatctcttataagtcgagtttaagaaaattattcacacgattcaagttctcgatttgactacgataaaaaaaatgacacatctattgattttgtaatgttttcttcagtttatcatgctttggtttcactaatgtgaattactctattttccagttctatatataattaattaatgaagttttcaataacgttgcatcatcatattgtttttagaatcttggtacattagtaacatatattattctttattttttcatttataatattgtaactcagtaagatttacgtttacatgcaatcaaaatagaacacacatagctacttatgtttgacttcacattacttaccaaaatagtataccgatagataattgtcatttattcatttatattaacaaagaaatctatgaagaaaaacctaattaaagcttgttgctgatgtagcaacagacgccacttaagacagttactaatgtccaaacttgtatatgtgtgtttgcttcgtccttcactctataaattcacttcatttcttctctactttcactcatcaagtaatatttttatttcacttacttttaatttagagttcataataagttgtgacaaacaaaaatcgtaaaggagtttggcttttggttgagtttttgtttttaacaactacttattattatatatctctttggcctaaacatgtgtactggaaaatcatcatacacaaaatcctctcccaaggttattcaataattggttactttttctttatctacttcaataagtggttactttcgttgttacttttgtgcacgtatatttgtatacacacatttcacgtaaatattttcacacgtttatgtataattgggcacgtttgtaataatatatacatgaaactaaaacaaattaaagaggcttacatattgacaaagtgttttgtttcgtgtcttcaaagtttgggaaaacaagtcctacttcttctgtactctccctgggttccaatggtaaaggaatggtgaggatacgattccatttttaatttcttttcttacattatttttctcctattgaggcatttttcacattaatccaacgatcacattttcatcaaaaacttttttttttactgtagtctaagtttggctatataacgtcatttgccaaaattttatcctaatgtccatcacattaaaaaaaaactcaaactatgtaacgtcatttgccaattccagcattatatagttaccatttgatatatatcctaatgtcccaacaatttctacagttttcacaatgccagaagtgtaagtatgtgtttttataaaaacattgttgtgtaattcaagaaatggtaaatcaaagtactcgtgaacttctcagtaaaagtttgtaaataatgagtaagaaaaagtatggtgtttcgtagtttgtacataaatactacagtatgttagtatagttatcgtagcataattgaatccctacttaatctaattgtagaccaaagtggaaccactcaaagaaagagcccatgacaaaaccaaggcagccacgactaaggtacccaaatagagattctatatatgaacaattttgtaattctttctaataaatagaatcacaactatccacaatatctttagcccgtaaaagagaaacaaaatgcatatgttacatgaatatattttacccaagaaaatataaaagttacaacttacaaatactctcatctatgtcgtcctcgttttattaaggtttagctatgcttgcatgcattaaacacagattttctcaaattaattgcttggaaaaaattctacaaaattttcttagacgtatacttcatttattaatttttactattaattttgttttttttttttgtttttttactatcaaaaataaaaatattaacctcacaatattacttctaccgttgactttttttgttttactaatcagaatattacaaaggcaccagcaaaagagaacaaaaaacctctcgagttcaagcttcattctggcgagagagcagtgaaacgtgcaatgttcaactattcggtttacacatacttcctcaatatctcttatttaatcatcatatttttttcaacttccatggagctcattcatcatcttggcaggttgcaactaattattacatccagaaacttcagaaaaaacaagaagagaggttgcaaaaggtaaattacaaaagaaaaaaaatggtttactattatttggcttgaaaacaaccttaaacaatttaaaccgacacacaccgtactctgattggtcttggactcttggtctctctttggctgtaaatttacgacgactaaacataactagaacctctctatttatatgaatcatgcttgtctaaaatcgaacatttcactttcatgacaccaagaccacaagtagatatagaacggaaactactctaactaaaacagtgagaaattttggaatttggtatcccttggtttgagaagaatactcgaagttaagccgcgttattaaatcgaaccatatgtaacagatgatagaagaggaagagattcgcatgttgaggaaggaaatggttccaaaagctcaattgatgcctttcttcgacagaccttttctcccacaaaggtcagtttatagtttacaaaaatctagtttcaagctatctatagtttattctataatcaaagagataaatttagatagtatattaacaaattgtataatagaaactttctgaaataatatgatattgttatgtaactaatttattttatgttgaaataaatatttgggtgtatagatcgagcagaccattgacgatgccaaaagaaccaagctttggaaacgtaaacagcacttgttggacttgtgttttcaacaaccaacactatctttaccatattaaccatgctcatgcttaaatctcgagtaactagctcacatagaggcttttttctaattttcgtttcaaatctttttttcagtttacttttatttttgttcttggcagcttttgtctttttctcttcccctcttcttttttttcagtataatattctgtaatttttttcgtagattaaataaacgagtaaatgctgatttgaagtactattgggtctgatttgaagtagacaatatactctgccattctccatttctacatctaagcctgggcaaataaaccgaaccgaatgtaccaaaccaaaaccgaaacaaaagaaccaaaaattgaaaactaaccaaatagatactaaattctataaccgaaaccgaatggatataaaccgaaatattttggataaccaaaaatatccgaaatataaatatatttttgaaaatattagttatttttacactgaataattaaaaatactcgagaatatatataaacttagtaaaaatactcgacaaaaacgagtgccggaaaggagcagagataggaggaaacacataaccagggttgaaagccaaattcagagagaaaagattccagagctgttacatccccaaatcaatgagtgatagatagaggaaaacaaaaaaaaaggtttttggagttacatctccaaatgtctgtgtttgaacaatgtcatattgtttacacgaaagagttgttaaagagcaatattaatctaggaaggttctcaagagccactgtgaagaggccaccaagaataaacatcaaaacaaatgcaaaaaatatcctcccaatgtatttcagactttgctctccgatttctggtgttgaatcatttgcaaaaccctgcaaagcaaaccacaaaacacttcagcattttcccacaatccgataaactacagggaaatcacataacaaacgccaagtgatatgaaaccaacaccataatctcaagcaagaagaagtttacagttattttacagtctaccaagtcaactgtttcaacattcttctgttccttatcgagctcattctctatattctaacagacgtatggttctagtttttctacactcctacttaggctttgacaatgaaaagtattctaagtataagttagatactaaactgtaatcatgctagcatcaactattcagatatttataacacaatatcacactatgaagctactaacaaactcaagatacttaccgtcgaaaatacagaagaaaaccgctgttgtcgattgtttttctccgttcctgcatcaaagagaaaagattggcattagagtacatgaaccaaaggtaaagagctacataatgcagtttgacaagaattaaattaccaggtagatcagcatcaacaactgtcttcaacttccaaccaagtccataattcagaagactagcattatcaccaaaactaataggctcttcaccttcctttgctgcttcgatgtaaatcactcgaggtttcaacgaaccaagtttcctgttgatcacagagacagcaaactccgcctttgtccctgttgtgaatcggtagtctttaccagaaacttcacaaaaaacctccagaaactagtataccacaatcaacaatgttttagttaaccaaaaacaacactagtataaacaaaaatcaacgagagtttagaccaaaaaaaaaaaaaaaaatcaacgagttaaggaaacctacaggtgatgtatcgtccaccattactttatttgatcagccagatgcatataagttactgccaaaagaagcaaagaacataacaaatcaatatactcaaaaacaaatctttgacagaacacatttgtcttcagaaattgacttgagtttagatctaagcctgagttatgtccgaactagatcatgataagatttatcactaaccaattcatatcaaattctaaaatcgattttaagcaacaaaatgaagtcaaatctaatctatgtgaaatagcaaagcaagaatacgaaggatcaatcgggaaatttttaccaggacttgattctttccagaagaaaatcccaactgcgagaagtgagaaagaggattggagtaagaagaaacaatcttcgaaaccctaaattctgagaaagaggaagatcgaaaaacagagacgactttgtgaatcccaaattatggaagatgagtcaacttagaatcattgaccaatttaaaccgattttgtaaaccatgtcataatgtattcgagttataaaacttaacttgttgaacacttgcggccgtaccagttttttttttcaggattttttttaaaaaattgatcttaaaaattagcaaaaactaattttaatgtaatttatcatgaatttttcatcctgaaaagacaattatcaattatgtatctgatttttgtttttaacgttgaatattatctttttatttttaaaaaacaatcaaattaaacaaaactcaacaacaaaaataaattaaacacaacaatataaacaaattaagtctaatacggtaaacctttttggaagagataagcaaaacagcacaccagcatgtgtcacctcctaagaaaagcaaagacacgaataaaggaaaagcgctagatccccggaagagatagatcaccgacatcgttctccaatatcatagaactccaaaccagtaaacccgaaattcgtcatcaattgaagccacaacgttttacgtaagaactctagaatcttcatccttcaaacaacaaattttcagaaactcaaattggactagagtttccaccgttaaacaagggaaattaaaataaaatccatctacccaaaaaacattaataaaatcgatacaaaattaaattgaaggagaaaataaaaactaaatatagataacatcggatctaaaatgtaccagattcgccaaagagatgaacgatgaaactactatagaaaagtcagtcatcgacaatgaagagaccgctcgtcggccatgcaccacaaaggctgactcaagctgaaaacaaggcgcacatcgccataaaagagaaacggctgatgatggtaaaaaatccggctataaccgctaggatagccagttgttgtcggacaagagctaaccaccgctactgaaatagctatcgatgtcagaccagagccgaatacacaccgaacgacaagaacttttttttatgatttttgctgatttttgctgaataggtctagagggacaacaaggacaacaaaagtacaacactctagacctatgaatatgatcctagctgatttttttttcctagttgctttcttttttaatttcattacttttttcttaacacggtttaatttcattacttaattgctttgttgtcttgcccgtcttgcttaagttccttacgtgtaaaagaacccaaaaacaaccaaactcattttttttaaaacaaccaaactcttatggtctttagttaggttcgatattttatatatctggtcagtataacaagtaacagaacattctaccagtttaattaacttgtacaaaagtattttgcgggataaaactccatcacatcaatatattcagagtaaattgacacattcttaacccttttacaaaaaaaaaaattgacacattcttctttgtaacattgacaaaaactgagatttagtccacaataattaactacagaactaacctcaacgaactaatcaactgaaagttcttttattccttgaaaaattcaatggtcaaaagtttccagtccctagaccaacacaacttgcaaattagacctaattaaaccttcctcattctctcttttcccctaattttgaccaacaaatattgacttagaaaaaaaaaaccattacatataaatataatctcatcccaacccaaaatcttaaaacccaagtcaatactattgacgtcaaccaaaacaaaaaagtcactatttttgcattttacaaaacatgggttttttatggagaacgagatctaacgagaagaagataactccggttttgagttggccggaatcagaaccggagtcagagataacaattccaccggagtttcaatgtccaatctcgatcgatctaatgaaagatccagtaataatctcaacaggcattacttacgaccgcgtaagcatcgaaacatggatcaattcaggcaacaaaacatgtccagtcacgaacactgtcttaaccacgttcgatcaaatcccaaaccacacgattcgtaagatgattcaaggatggtgcgtggagaaaggatcgccgttgattcaacgtattccgacgccacgtgtccctttaatgccatgtgaggtctacgagattagtagaaaattatcgtctgcgacgcggcgtggggattacgagaaatgtggggtgattattgagaagattaagaagttaggggatgagagtgagaaaaatcgaaagtgtgttaatgaaaacagcgtcggatgggttctttgtgattgtttcgacaagttctcgggagatgagaaattaacgtttatgttgaatgagattttgtctttgctgacgtggatgtttccgattggtttagagggtatttcgaaactcgcgtctgcgacatcatttcgttgcgtggcgggtttgttgaagagtacggatgattccgttcgtcaaaacgccgcgtttattatgaaggagattctctcattagacgaaacgcgagttcactcgtttgcggttgagaacggagtcgccgaagcgttagtaaagttgattcgcgattcggtttcgtctagttcaacaaaatcttcgttgatagcgatttatcaaatggtgttgcaaaagcctgaaatcgcgtcggagtttctcgaaattggtttggtgagtataacggtggagatgatcgttgatgccgagaatagcgtttgtgaaaaagcgttagcggttcttgacgcgatttgcgaaacagaacatggtagagaggaagtgaggaaaaatgcgttggtgatgccgcttttggtgaagaagattgcgaaggtttctgaattagcgactaggagctcaatgtcaatgattttgaagctgtggaaaacaggaaacacggttgcggttgaagatgcggtgcgtttgggcgcgtttcagaaggtgttgcttgtgttgcaagttgggtatggagaagagactaaggagaaagcgacagagttgttgaagatgatgaatacacaaatgaaattgatgagtgattgtgttgattctttaaaagagtttaagtatatcaaaaagccattttgacataaacgacagattagatttcaactaataatacaaaaacctttgaaagaaacattgaatcttggggatcaagcaaatattttgggcccccaacaatggttaattcttggggatcaagtctctccgactctccccactaatataaaactcacttatcttctctttttcttctttcatctctttatctatctctcaaacatttctctttacatatccaaaatttttcaaaatttttatttctctataacttgatggatcgtgtgaaatctaatatttgttcgcatattcctcttattgggtgtgtcatggacgttctttttctactttttacatcagattcttcgagtgacgcaggcaaagaaattgttgatacaggtaatcttgaagctcagaagaacttcagacaactacagtgtattaagctcggttaattgctctctacgataaaattatttacatagtctctatgtttttggtgtaattctaaatattataaattagtgcaatagcttgaaatatataataacgtgatagttctgcttttgtctcaaaatgctctacaagaactcaaatgattctatgtgatgatcaaaaaagaatcgaagatttgaatactatgtttgctctgcgatagataaattgtgtcaaaatgctctagaatataaaaacctcaaatgaatcatcggaaaaatcgaagagtccatcattatgtttgatcagtagtatcactgatcatatacaatttgtgtccatcactaatcatatcaatgtctgtgatacgaccttggtcttctgataatagtacaaatgaggctccatccgatagccctagctctttcgcagcggttactatgagtttctcgagattgcttgggatccaaaccacaactccgtgctttctactacgctcttctttcgcctcttgcgggtggaatggaaacaccgtgcatttccgtctctcaattctctcctctgtttttcaaaacataaatcaaattcaagaattacaagatccatttttgagttgtatcgtctgaaggaagtatacgagtaccttgtaattcacgcaagcttgacgggtagatagacgactgagcatttttcacatcttcgagtaacttaatcagtttcttgtttccgcacaatcgggcttcatcaagcggagaattcccccatcttcaaagagagaagttatgaagtctataaactatagttttaaagaattaaatgattcattttgcatgatttttaccggtctttagaaataacgcttgctccagcttcaaccaacattttagccatcaagaataacccttcagaagccgcgacatgaagcggcgttctgtgatcataatcttcactgtttgggttcataccgcttgaaagcaatctcttgagaaaatcagagtcgcctttagcaactgtcgtgcaaaggaagtttcctgaatcttctaaattaaaggaggctccttctttgacaagcaaaccaatcactccttcttgtcctgctttcacagcctcaaacaatggtgtgtgtccgaacttatctgcgaaaatttgtgatcaaaagcgtaaacataaaacaatgtaatgttttccattagaacgattcatattttaccttttagattgacatcaacaccttcctgaataaggaataatgtaatgtcttcatagcctctacatgctgcaagatgctggatataaaaaagaatcaaagttaagctcttaaaagaaagataatcgataagcgacaaacgtacaagcggtgatcttccatcgtaatcggttttgttaggatcggctccagatcggattaagctcttaagctggtaaaaatctccttggaaagctgcactgtttactttcaatgcaagttctgcttcttgtttcccaatgtgaatcactatgtcagattctagcttctttatcctatcatttgattccttctcctgccaaaaccaagtttgagtgagttgcaagatttctcaatcgagtttcaaaaccctaagtaagagatagaaaaaagagtacctccataatattgttcaagattgtgcgtccgtcgtgaaaataaatctcgaggatgtttgagaaagactgtttatcgagtcgtaaaagatggcatagctcacaaaccctaacagtgaaaggttgagaaatgttgcaaatgatggagatgtctccaaaagaagtgtgaggcccaagtaacgtcacactctcttctgatccatctgtttttgtaacaagagcctcctataaaaatccccaaaaattacaaagtgagacatacaagaagcaaagatagacacaagcacaatgagattttacgtaccagtaagccttcacagacgaaatacaaatgatccacgacgtttccttgctctgttattacttctcctggaagaaaatactcttcatggagccttataactatttgattaataaactctgtggagcagcctttgaagagaggaacttttttgatgtaaggcagatacaataattgcgcaatctgcaagaaaaatgtgtattagttagggtgtcaatgcgcgctaatccgtcatgcagcaggctaagatattgagcgggttatgcggaccggcttgacaaagattgtgttccaagaaacactaactctaacctaaaaagtacatgaatatttgttggtaacaaaacgagaattttgtttttataattagggtaccttggcgcggattgatgctgggatgtcctgaagcatgacagtgtcggtgtagtgactgtcgtactgcaatctaacatgaccagttatctggctacgaaggtctctcccgagttttttgcggttcatgaaacttatgagatcattcattttatctctgaacctctctgtgtttgaacctttcacaatcaaggcagtgatgttaccaataaggtaagcaccgagaaccatatcaaacgaaacatatatcatcacgaatatcatttccctcagattcaccgcgtgaatgtctccataacctaaaaccaaaacgaaaaaaaaaaaacccatcaatctctttgttagtaactaattaaattagcatcaaaatagaattggtttttataccgacagttgccatagtgacaatggcgaagtatagagcggtagtataacgtttccagagatcgatttctcggaaattctcgtagctatagtctcctagcttcaagctaccgatccaagtgtaaccttcgttttctggaggaagagtggtggccaagtaatagaagatacaagcagcagtgtgagtacaataaacttcaacgaacaagagctttaagattctagtgaatagatagttgattcttgtgtctttctcaagcctttggaaaaactcaaccactttgcgaacccgaaatagccttatccacaacaagtacctcaccaactcatgtttccctgatgcctacaaaaaggttagggtaggagtataaaccaaaccaaaccgaatcagaaccaaaaatgtatttaaataacccaattggtttattatttaaacatcgaaatcgaagtgaaactgattttagtgtaaactaaccaaatgaattgatatttatgtgaattttattttaattatataagaaattataatatgtgttatcatattagataaatataatattagttaagaaatatttttatatgtttcaaagttacttttacaaaatttccaacctaactaagctaaaattgcatcaagtaggaactaaagttgcatcacctagaaacgaaccaaacaaattacaaatagtgtttatttggtttgagtttttataaaccaagaaatatttataagctatagtgtttctttggtttgacttttgttgaagatctaagcaaatatcaaaagcaaagttaagtaccttataaataagatcccaagggaagcaaccgatgaaatccatgagaaaatgcgacttcaagtacctgatgaaagacatacttcctccattaaaggctatataagtagaaatggttaaaatgattgtaagagtctaatatatataactgaccggaaagcaatacgtgttggtttgtagacagtccggtaggtctgagtatcgcgataggcaacaaagaactgaagaacaatatcgaccaagaacgcgatctgaccaacaatgtcaagtacaaagagtctctcaggcagaccgcggaagaaaccaaactccatgggagtgaacaatgaggagtatattgcccacaccaatataaacatttcccatgccttgtaccacctgatcaatttcttctcacttttcattaattcaggtctaatcaaagattcttgaaaatgtaaagattgtggcttatacttgattcgtcaaattggtaatgtagctaaacggaatcgtgggaaggagacaaatgaaaataatactatagttattagttaagtgcaagcaacaacgttttaaattttatttgtttaagatcgacatagctggactaagttgaatatacattttcactagtatagttttgttattttatagttaatgttattatgcttagaagaacaggtggatgaaatatccacgtgtggcctctggttacggcagctttagtggaaccaattaataatccgatcttcgatgattctgtcacaacgcataattactaatataaccctagtgaaacatttatgggagtgtaacagtatcctctagtggattcaagttgtttaacgtagtatttttttttttattcctggtgcaatttaacgtaggattctatttaaagatagatttaaagtttttccttgttttggtcggaatttggttttagatttaagttttaaattttcaataggtcggctgcaaataaaacaaatgcttagattgaggtgatcagtggacaacgaaagagaagaaatatatcacaaggaagtgtcccaccaatttcttttttcttagtaaataataatgaaaagaatatcgacaacaaaatcacctgattagcatctaatatctacttttgataagtgatgaagattattcatctaaatcctaaggctattaatggatgatacgaattaagcgattagaccattttatttttagagcgaacaataaattctgtagaccaaattcacttttacgtaaaaaagatatatcgttagtccattgtagacggattctatttttattattttgtattactataaattatactttatgaacggtaaataaaaagcaatccaaactgtaaacggatttgtccattctaattatcgtaatttttcgaaccttaaatcatttagttgttttaaaaaatccttgacataaatattaatatttaaactagattgaagtgatactaatattagattagattggtgacacagccttaaaaatgagcagaaagaaataacgataagagttttagtgattgataattattaaaatggtgaattttctattattgtattattcgaagttaaaactagggagacaagtttttgaagtggtatggtgaataaagtttttttctgaagttacagaaaaaaaaacagaagatattttgaaggtttcaagaaaagtattttctacgtatttatctcccgatagaaaggaaactcttcaagtgcatgatgaagaaagagaaaaaagaaagaacctgtttttgggatgaatgatgtatttataatcattatgaccatcggtttcaattctccgatgctctgatgaatcaagccaccgaaacgtctcggctaaactgagttttcctcttcttgatgaaacgtcgtcgtttgattcctcttcttcatgatctattatctcttgccgtctccggagacgtcccatgttttcaagaatcggttaaatgaaatctccggcgatctcttcgacacaaagatctagaaaaacagagtttaatacccgattcaactcttgaatctgacactcgaaacttcgtctttttggtagaagatagatcttgtaatgttttacaagttgaagagaaaaggcgggaagatcacgagagctgcttctctgtttttttccaaattattttttgtttggtcttctttagttcttctttctcgtgatgttaaagctatattgattttgtttctgtcgagaaactactgttttttttttgtttggtttggactctttattagttgaagtgtataacgtaaggttttgtctagaaggaccgaatttatataggacatcagaacatgtcgattgtcgaacatatatcattgtttttttaatataaaaaatctcatctaaattaaaatttggaattgaattgtacgaacggctaataaaaatttaccaaaagattacgatgctccaaatctggatgatgattccctaaaccggtttttgtgaatcatttctagcataatcgaatttaagttaatctggactagtgtacttgaacattcacggggtaagtgggggagttatttttttttaagacaataaatctgttgtaaattgatgtactagttatagacattaatgggtgtgtaacagcatttcctatatgtttaacgtaggatttctgtttaaagtaaaatcaaaatttacatcaggttttgagatttttagttttaaattttccaaatggtcggctttgtataaaaccaagagaagaaattaaatatacacgaatatgaggacgtgtccagaaaaagaagaatatcgacaataaaaatcacctaatttgcatctaaatattgactttcatagtacgctagagataatcagttcatcttcaccttattctttgcattgtgtaaaagagagattatgcagagtttcctagttgacgagaatgagatagcagagatatttcttgttttcgttttgcactttagaggtactaccttatcgagttgtatgaatatgattgtcttgcttctatttttttttttcatttttggctttgattgaataaaggtgagaatttttatttatttttcgcaaagtatttccttaaaatattagtatttcggtttagattagaacaaatacgagacgataaatagtttgataacaaaaagctatatatgttgtgtttcatatcttatcaactcggtcacatcctctttccattggatgcaattctttttcatagaagaaccactaattcttttttttcttttgccattaacccaacaatttttattgtagttagtggttctcccttatgtttctttgccttggaatgtaatcactctgttttgacaaaaaaaaaaaaagaaggaatgtaatcaccctgtttgacaaaaaaaaagaaaggaatgtaatcactctgtttgacaaaaaaaaacaagagaggaatgtaatcactcttaaagtgatctataacaatttgaaaaagtgtcatatttattagctataacttataactttataagttttgaatggatgcagtggacaaagcggtatactttgtatgcggtttaatctaccttattttgaggcggacaataaaccgctgtggaccaagtttatttatatgtaaaaatagttcgtggatgattcacagatgatctgttgcggttttcttcttttttttttgtccggaccactgtgcactataattgattaatggtaaataaaaaacagtctgatccgttgatggttttgtccgcccgaaccgccgtaaccattcaaacccataattaaaattataacgaattactatgtaaatttataactaaaactatcaaattaaacgagttaaattatacttatcatgtctgcctgtaatgataagataatatatatcaaagcttatgaaacttcatttttttttttttttggttgtcattgcaaaggttagattaataacaatatcactgataatgatgcttacacgtaaacctaaacaaacgaggaaaataaactaactcttacacgtaaaccttaaccgatgcagcataggtgttgacaatattttctttccttttatttaaatagacgacgttgagatgtttaaaattgtcatcatttataaccatattttaagttgtctttatctgaaatatacaaatgttcaattagtacattgacctaaaagtctctaggactaatgattgattagaggtttattttgctagaggttctaatatgttgtatggaactagaagcaagattgttttaaactcaatgtcattaagtgaattagagaaagatcatcaaaactcttaaactatatctcccaaaattaacttaattcagtttgaaaagaaaaagcccacaaagcccaaaactcactcattcataagccaattataatatccaaaataaaagcccataaagcccaaaactcactcattcgtgtctccttctctctcgcacaaatgcttcaggagttctcacaacaagatcgagaaatacacacatagaagacgaagaagaagaagaagacgatacagatccacaacgccatgggtttaggcatcttagcttctcgaacaattcgaccagcttcacgtcttcttcaatctcaaacctccaatttcttcctccgcacaatcgtctcaaaaccagagctccaatctcctgaatccgctgctgtctctgagcctgagccgccgacacagattctccctcctagaaaccctgtaggtggagcacgcgtccacttctcgaatcctgaagatgcgatcgaggtctttgtcgatggttacgcggtcaaagtccctaaaggattcactgttcttcaggcttgtgaggtcgctggagttgatatcccgaggttttgttatcattctcgtttatctattgctggaaattgcaggatgtgtcttgttgaggttgagaaatctcctaagcctgtagcttcatgtgccatgcctgcgcttcctggttagttcgattccaggaaaatttctatgctgatggattgattttgatcgttgattggtggaatatatttggatttggtgctattgctaagagtttttgtaacagggatgaagattaagactgatacaccgatagctaagaaggcgagggagggagtgatggagtttttgttgatgaatcaccctttggattgtcctatttgtgaccaaggaggagagtgtgatcttcaggatcagtctatggcttttggatctgatagaggacgttttactgagatgaaaagatctgttgttgataagaatcttggtcctcttgtgaagactgttatgactcggtgtatccagtgtacaaggttactaatatagtttgcttatagtgtgatgttttagttaatgtgatagatacgctatcctgttgattaggttttgtatgtataatgtttttgtaggtgtgtacgatttgcttctgaagttgctggggttcaggatcttggtatactaggtcgtggtagtggagaggaaattggaacttatgttgaaaagcttatgaccagtgaactctctggaaatgttattgatatctgtcctgttggagccttgacctcaaagccttttgcctttaaagccagaaactgggagttgaaagcaacagaaactattgatgttagtgatgctgttgggtccaacatccgtgttgatagtagaggaccagaagtaatgcgtatcattccacgcctgaatgaggtatgtaatgcttttgttcaaaaacactatttttaaaagtattttgctggatgttgaacttgtgaatgttcttattcaggatataaacgaagaatggatatctgacaaaacccgattctgttatgacggcctgaaaagacaaaggctgagcgaccctatgatccgagattccgatggacgattcaaggcagtgagctggcgtgatgccttggctgttgtgggtgatatcattcatcaggtgaagccagatgagattgttggagtagcaggtcagctatctgatgcggaatccatgatggtactgaaggacttcgttaacagaatgggctcagacaatgtatggtgtgaaggaacagctgctggtgttgatgctgatcttagatacagttatctgatgaacactagcatcagtggacttgaaaacgccgatctcttccttctcatcggtacccaggtgagatttccaccctgtcttttttgtatggtttctggtaccggattagacagaccgctctgtatttggaacaatgacataagaaaaaccaaattgtgtagtttgatactttgatttagtggtgtggcttaaggttctgtgcataatttggaatacagaggcaaatagaaaggagaaacaagcaaaattaagtttctaaaaaacagatcagatgttaacatttcgcttgtattgaatattcctgatccagaccaatctagatcaagcaaaacttgctcttccagatatcaaagttgtgaaggttttttagcagtacattcaccagtttttgtctatttttaccagcctagggtggaagctgcaatggtgaatgctaggatctgcaagacagtccgtgcatcaaatgccaaggttggatatgttggtccacctgcagagttcaattacgactgcaaacacctcgggactgggcctgatactctcaaggaaattgctgagggacggcatccattctgtacggctctcaagaacgccaaaaaccctgcaatcattgttggtgctgggctcttcaacagaactgataaaaatgctatcctctcttctgtggagtccattgcacaagccaacaatgttgtccgaccagactggaacggtctcaactttctccttcagtatgctgcccaagcggctgctcttgatcttggtctcattcaacagtccgccaaagccctcgagtctgcaaaattcgtctacttgatgggagcagacgatgtaaatgttgacaagattcctaaagacgcctttgtggtttaccaaggacaccatggagacaaagcggtttaccgtgcaaacgtaattctccctgcatcggccttcactgagaaagaaggaacctatgaaaatactgaaggatttacccaacagactgttccagctgttccaacagttggtgatgcaagagatgactggaagattgtgagagccttatccgaggtctcgggtgtgaagcttccatacaactcaatcgaaggtgttagatcaagaataaagagcgttgcaccaaatctagtccacacagatgagcgagagccagctgcttttgggccttcattgaagcctgagtgcaaggaggcaatgagcacaacaccgttccaaaccgtggttgagaacttttacatgacaaactcgatcacaagagcatcaaagatcatggcgcagtgcagtgccgtgctcttgaaaaagtgagagctttaacttgggttttcacattttctctcttttcgcaaaaataaagatactgattcttcgtttgctgtcctctttatagaccttttgtttaagcctgagtatcactgtatctcgggtttagcttgcggtgaaatctataagcaatttgcaataagcacattgttagattcaaaactttgcagtgttaattggatgctttgtggcatcttgtattgttcttattaggactcccttttacatttgcatatatgaatttggaggcatggcgatatatacaatctctacttttatcgtttgttcttaaccattgtgattgttacaaataatgcaaatcttgaaaggattagatggtttccaatgtgagatgatcacttgtgaactaaactgtttttgacaagttatgttacctaaaatcatttcagtttcaactttgtgattggtcataaagaaaatttcagatagattatgaaagacaatcacaagtaacatataaatttattttagaaaaacttacctaaaccaatcaatttttttttatagctgggataattaatccatccaactttttttatctttctcaaacaaccaactttttattatcaaattgctttcttactgattaggtcttatatctaaaagtataatataagcaaaaaaattatttaatttaattaattttaaataacctgtttttttttttttttgaacttcaacacattgtttattggttaaaatccatgctaaatggataagatttttttgatacatgtccaaatcttgttgaccaataacacatgtaaaaaacattttgttagttttttttgggtaagaataattagtatatgtaaatattcttttaattagtttttattttctgtaaaagaaaacaaaaaaataaaacagttgttgatatctaatcgagaaagttacccgtgtcgcaatcatgtgagttactaattttgaaaaccaaagtttatataataaaataattataccaagttaagttcataagttagtaatctagatttacacatttttatacagatacacaatacatgtaataacaataatcatgtaccataacacttaataaaaaaatgagttaattatatagttcaaattttatgaaaaagaaatcatgtgtatctagaaaatattaatgttatttatatttctctttatctcatttattttgatattattatataaatctctctttactctttgattgccactccaaccttatttcttagagaatatgaaattaagttttccaggaaagttgttcttcttgttaggttatatcctatgtttcagcgatatatcgagtttcaataatcattttgtggatgcagaaacattgcaaaatttcacctcatttgaaatggaagaacaacttaaagtcatcgacgaacatgcagctaaaatcatcaaagtccgtttaatttcatcttattttcttagagctgcactcgttaccttgatttatacatatatatatatatatatatatatctgaattttgtagagatatgtgaagtttacaaaatattttataatctactttttgtttatggatgatagactacacatggagatacatatgaatgtgtggatttttacaaacaaccagcgtttgacgatcagaccatgaaaaatcacttgctcaactacaaagtatataataaattgaatataagtgaatctgatcattatttatcactaatacaaaattctttgtaaatgtagatgcatcagatatcatcccgtaaaaattcaagaacaagaaaaataaatgacaaaaaatttggtttcttgtgggaaaatggtgtagggtgtcccattggtaccatacccatacaaagagtcaccaaagacaaacttttgagattaaattcgtattccaacaaatctaagccccaaggttcttggaacttcacttataatcaatataatgtcgaacatcatgtaagtagtacccttccttatgttttataagatgttttaactatttttttcttatggtataagttttagttatgtaagaaatataagtgtgttttaattaattacctttaaaattctaaattattgttgttagaaacaaattaatttcaaaaatgtaaatataactttttaaatctccgtgcagtcatctttataaaaagatacaaaatatataattttgttattttgctcaatatatagaattctattaaattcaaaataagagttgattatgcatggttatgatgactagtttgcagttgctcgaaccaagagaggagaaaagaaaagctatagtggagtatcgatggctatttctgtacatgatcctgaagttagatctccgcaatttagttcttctcgtatgcacgttcagattggagacgattttattcaagctggatggactgtaagtttgtttcaacattttatgtttaattagagttgcggcctaaaagtataaaaatataaatcataataaattggttttattataaatacttagaaatatactacacttagttttaatattattaacataaatctattaaaatttcaggtaaatccggctttatatactgacatgcaaccacgaagttatgtttatacgaaagtaagtttattacttatatatcttcaaataccaagaaacttatttaacttttcttttttttgacagctccaagaaacttatttaactatataacatgctattgtaaaatgattataaaatttaatcatttgcctaaattacttcaaaatttaaaagataaattaaacacacattatatatctttacaaaagaaaacaaaattcctcacattatattttatttttataatttcattctaaatattgattttttttttatatttcaaacaattgaaacaaacaaaaatgatgttcaacgcaaccaaaaacaatgttttctaaatgaatattttgtagcgtaatttatcataaaaaaaaacaatactataaatcactccatcatattttgtaaaattattcgatgtattagatatttatacgctagacataacgatacatgtaaaatttgtataggcaggtcaaaatcagtgttataacagcttgtgtccggctggaatcattttggtccgttcagatattcctcttggtgggcttcgaggtcctcctggtgtccgtggttctacacaaatagtatatgatacatatggattactcaaggtttgctacttatttcatttcctctttttctataacttactaaattgttattatgtttcttattattcaaacaaatttgatagaacgtatgtaaaaaagagagaaacaaataaatataggtattaaatcaatagcacacgcataaaacataaaactcaacagttgtttttatttggaagttgtatgtgtggttttaacagtatttatcaatatatataacatgttctatttgtaattatataataatgctaatatgtttttgctttgatgtggatgttgatcaaaggacaaagcaaatggtaattggtggctcgagtttggaggaatacaaattgggttttggccagcaaacatatttcaacagagtttggctaacagtgtcgagtggggaggagaagtatatagcgcatctctgccgggtcctcgtatgggaaatggttattttccattgttagatccagtggacgatgcacatgtgtgtaatataactttagttgatgagaattttaaggttgataagatggtaaaaaatatagagacattctcggataacaatcatagttataaagtatacgaggatttagattcaggactaccggttggacatatcatatattttggaggtcctggaaagatgtaaaagaaagaatataattttgtgtaaaactgaaaatgaaataaaattatcttcatgtaattgagcatctaaaataaatttctctgtttatagattattttatttattactgtttatagattagtttatttattacttcctctgtttctatataaatgtagtttaagggtttttatttttttccaaaataagtgttgttttcaactttttatgcaaataataaatgtatttaaaattttttaaccaattatacttaatcatatatatatattttattggttgaattggttataataaatgatatttttttatagaaaagaggtagattaaataagatttttatgatttcttaatatatgtgtataaaacttaaactataactaatatgaaaccgagggagtatataattagtttattaaatgtaggaatgaaatttatttaatttagttggtaatttgattttgaatttaaattgtataggttagtttttttattatataaattagtttaaaaaataatataatcgttagttagttacatctaatggtgcacacaaaaaaaagaagttattttacatccaccaatcacatagtagcaacatacggattagagaactttgtggtcttgacaaatgcctaaagtaggaacctcaatctttcgaattgatagtcttccaatcggccctcgaaagcatgttgaatcatcacataaacaaatattcagcgggaaacctaactcacctagtacggatcccaatgacactcgaatgtcctaatagcagttgagcgtcgtacatacaagtttaggcactctatcacatattacgccctctgccataagctaccaaccgtcggaggaaaaaaatactcattaaaatgagttttctcgccaccaccacttccaagcactcgcttaccggcctaggcaacttactataccctattgacaaaatgtcatcaactcagttattctcactagaacactaagctttcttgatagtaggtattatttttgggcatattaattaaccaagctgaaagtaccaaatcgagatcaaactgaaaatactaaattgaaattgaaccgagaagaatcaaaccaaaattttaaatactcgaatggattcttaactctagaaccaaaaatatcggaagcaacccaaaatattttgaatattgaactacaattatatatccaaaaatattagttatttagaccgtaaatatttgaaaatatcaaaacaccctaaaatataaatatatatacaaatatatatatatatatatatatattttttaatagatcataaactcaagaacgaaagaaccggagctgaacccaaaaccaaaccgatattttcgatacctatatagatcttaaactaaaatcgaaagacgcaaaacctaaccatttttttttatacatatgcatattacaaactaaattcgtaagaatcaaagccaaattaaatcgaccttaatatctagatgtccaaacgtaacaattattgtagatgttaagcgatcaacttataagaaagtggaaaaagacaaaaagttgcgcaatgctatcaagtaaacaaaccactgcttttaaatttttttaaatttactttccagtaaaaaaatcaatgctaaatgagtttaccaaaatacccgaaatacataaaaataaataatactccaatagatcttaaacataaccaaaagaaccggatcataaaagtttttttagatatctatattgatctgaaactaaaattgaaagaagcagaaccgaattggcttttttcgacatacatattttaaactaaaatcgagagaaacaaaacgaaattaaatcgacccgaatatccaaacgcgtaaacctaacaattattgtaagtgttaaacgatcgaggcataatgctaggtaaacaagaccactgcttttgaagaatttaaaatttgattcttgttgatttacttcccggtttaaaaaaaaaaaaaaaatgctaaatgagtttacaagatcaagttatcttgttaattattctcttgagcgttaaaaagttcgtctcatgtttctcaaatatagacaagaaaaaaataaaaaaagagagaagtaattcttaggtaagagttttattgataaatttaaagattagggacttaaaatcaagaaacacaaaaatacgaggttttaaatgataagtagtttgttaaacactgatgtttaataaataaaccctacacacattcgttaaaccttaaaattcgattgtgtctttttggtcggaaagagaaatcaaacggtaatggaggagaaatcaaagtatctaagtctcgtcggagccggagctcttatcggatccatctccaccgtcgctctccttaaacttctctccaggcaaaaaccctttttatatcatctctagactctcaatttcattgttatagaacttctaaatcctaagtagcttcgaaatagttgaaagctgactcgagcttttatccatggcaggagttcattgaagcagcttaatgaaaacccagaaactaatttcttaggtacttgtcattttgcaatgcaagttttgtttttttcccctttgatgaaaaaattagtgttctttgtttcttcataaaaatctgttttttttttttgttttaatacctatgttaacagcaggaaatggtattgaatctgaaacaagaccagatactgtagcaaatggtcaagatcttttgaaagatgaaattgtttctgaacatttaaccaggtaccttttaattagcaatgaaattgttgtttctgaggacttggtgctatgttgatactaaatggtttatgttgatttatatctctttaggaatatacagtttttcggtcttgaatcgcagcataaagtaactggatcatatgttgtggttattggacttggaggtgtagggagtcatgctgcatctatgctcttgaggtcaggtgttggcaagcttctccttgttgactttgatcaggtatcattggttctatttggcttcacttttctcttcattacacagatttaaggtctgttttagagatatttgcatgatccacttgtgttcttccaagagaactttgtttctttcccctttacatatatattcatgaacttattcttaaatacatgagaaggtgtcactatcatcattaaatcgacacgctgttgcaacacgagcagatgttggtattccgaaagctatgtgtctcaagaagcatttctcttcaatctttcctgaatgccatatagaagccaaggtgatgctgtatgactcatcatctgaagaagaaattctttcaggcaagccagatttcgttctggactgcattgacaacatcgatacaaaggtaccctttctttgcagacgcgaattgatccgtctatttccaataatgcttaaggttatagcacactgatataattgcctcatttcaaatataatgttaggtgggacttttggctgcatgtgttaagaggggtttgaaagttctgagtgcaactggtgctggggctagagctgacccaacaagaatcagagtggctgatataagagagtcaacaattgacccgttatctcgatctgtaacacttctaactctttcctctattgaaataccatcttaaggtattagtacactcacttttaatctcctatatcattctggatttttcaggtaagacacagattgaggagaaaacacggcattgaaggaggcattcctgttgtattttccctggaaaaaccaaaagcaaagctgcttccctttgaggggacaaatggagaagacgagaatcctttagattatcaagtaactaattttagttcttgaaacactgaatatttacttccaatatttacattagtcattgatcttatagcttgtgtgtgattacaggttgttcctggctttcgtgttcggataattcctgttctcggaaccatcccggctatatttggacaaattatggcctcctatgttataacacaacttgcaggtgtgcaagttcagatggagcctatagtgaatctagatttggatcattaccgattgcttcatcaacgccttattgagcatgaggagacagtttatggcacatctgctgaagtcgaggtattcagattggtctcactgataatatagttgctagaacttgttaagaaaaagactaatagaaaaaagagatggtatctgagttatatgagacacttgaaactacttgtgaagttaatagcagcttcttgagaactcctctaaacttttgtccaattcctgaaaatgattaaaagtttgtatctccttttgttttctgtaggtggatgttgaggaagtgatgtacatagtgaaagagttgtggcacggacgaagtgctagagatgagactgcaaaagatgttggcagagggatgtggcgagccatgaatgagttgatgctcgtaaggtatgttgattcactccttttactaagctcaatggaaatctgacaaaaaaatataatgggaagttatgaataatcagatgggatgcaaaaaagccagcaacagtctcaaacttggttcttttgaagttcaaagaggtttggttttgctcaatgataataagcttgaaaccgttacatgacctttatcactttgatctggttttgtcacaatttgagatatgatgtatgttgttataggcggatgaacatgagactaagactcttgaggaagtgaaggaaagtgaaacagagttctttgaaagagtttcatgcgtactgaagaaggcagagcttgatttctacggctagagaacccgttgaactgaacatcaatcacacaggcttgaagaacccattcatgacttacaaaattactcatcttaatgtattattttctcatttgattagcaaaaattttgtttttatcaattagtaacaacagtgtgtcgagtttattatagagaaatttcactacttttttgttgatgaaactgaaaacatatgtgcgtttacatgttataaattttgaaaactaaaacatacaaaaccttaagaatactatttctttttaatctatctatgtgggtttgaagaaaaacaaaatacttatactactactatctcatttgaaatttctaatgtgttaataaaaaagtatcaaattggaagttgaagaaattatcaagtattatataaaagtttagagccacttctgtcagttgattgtaggttggaagtctatgttcaacttgaatctatctttttcgttggcccatcttgtaaatgttattcccacatatgctcacgtttcaaagctagtgatgcatgaacgtgaggaagggtcttaataaaaaatgtccaacatcggaaattggagaaattatcaagtagtatataaagttttagaaccattacatctattgcgaattggttttaggttaaaagcggatgttaagcccaaatgtatcgtattaaattaatgtaaacaaatcgcatatcggattcttgtcactttctcttgaactaattaatgtaaactctttttttagaaatttagatttagccaaaaaaaaagtatcttgaactaattttttttggttcaccaatcatgcaagccacgtaacagatgtttcagttcaacatttgttattgagtataaccactaacaaaatcccaaatatgacaatcataaatagaattaactcaaaagagacccaacgtataactgccatgaagatatttgtaaataaaccaggttacaaaatttaataattgcacggcttcgtgttggataaaacaacgacactccaattttaaagatctaaagtatacaaattaaaaacgtgaatgtgtcaaaagttcacgatcaaatgcacaagtccctgtcgggaattcatttttttcctcttcacagttttgttttcgagagatcattatactgtattttttcctcacttactcgatgttgagtattactcctcttttattacattacttattgtatatttgtaacatcacagtttcattttgatgacgttgcatgcatttattttagtgatccaaataagtcgatgactttatgtcatgttgtcaacgtcacttgcaaatgaatatcttttgtgtacaccagtttatgtcatccggcggaaaatgatcttctcaaatataggcatgcgtatacaaagtatatatttctaaatagtaccaatattctgtagaagctcttgaactcatgaatggaagtagatgatatttattttgtatcattgtatgggcaagttttgttatgatttcagattcatagaaattttctagcttcaataatatgattttacataggagattagatgaatactccgacgattgaagaacttttatttaattttaattttaaaattttaaaagttattaataaaacagatatataattttggaatttttggaccacagactttgcaaataaggcaaaataccacattttttctttgtatcatgcaaacattaattttaggacttattgtaaggttttgtgcttagcttagttataaaatcattaaaaatagacactttcgttttttagttatatcatagctaaattaaaatattaataatagctgattcttataccaggaaaaaaaaaaattcaactatggcattgatttgatgcatgtaggtaaaatatatatatatatatatatatattccaaagtatccaaaatctttgcgaatagaaaaacaagtttgagccttgagccagataattgcatcaacaaacgtttacaccaacgcgtaatatattctcctctatctacatgattgaataaattaatagttttctttctttctttttcttattagccaagaggttatactcatattggttatgggtctctagatctataatgttttcgagtcaaaatcagtaggattaattagtttttcttttttttgttgcgctggaaattataactttaaaaacttttattattatttgaatagctaactaatacaccgattaacctatcaacgtcctatcacaaatataatattgagattctactttatatttattatttttagttcgattaactttttgttgtcaacgatgtttttaatatatcatttgcaacaaaaaaaagaaaaggaattgaactcttttattcaaaaaatttgtagaggagatgaaaatgtaattaatgctaacgaatctgaacatttcgattaagatcatatggactattaagactaaataatggactaaaattgtttgatagatcatttctagataaagtcactttttaaacaactaacaaatgaataatgattgtaatttggtggttataaacattttgaatagtttatataagaaaagggaaaaaataattctacaaaatatttttaaaaaaaattaagttaacgtatatactttttaaaaagaatatatttgtgttcctctccacctaaccaaacatttctcttcgtttgatatattaatggtgcttttttccaatataaaatatgaataaatttgccatttttattgattttcttgattggtttgtattctacaactatataattttttctattgacggtttaaggtgcaagccagtaggactttccataaaatcaatgttcttcttagccattacgtgaaagttgtggaaactacatgtaatattgactcttgaacagtatgaacaaaaatcaattaccaaatatatcaatataaaatataaatttcaccaaaccaaagtctaaaaaccgaagaccattttgtctgaaatcgaagagaaaacgcgttccggaatttcgctttctatcactctcagtatctctgtcgtcttctctttaacacctttgactacgtgtcaactgcttcatgggccattcttttgttcatcaacaacgatatattattttgtactatatcaaaatgaacgtgaaaaagaagcaacacaaaaaccactcaacgtaacttgtaagtacatcagttttagattaattaacgtatatgattgctaaatatggattgttcgtttgtttaccaattaaccaggagatcaaagaatgtttttgaaatctaaatgaatgttataaacaatcaatcttttattttttttccggatgcatgaatctttacttttgtagaaacacaccgtaaacgaattcaatcgagcggatacaaaatttgagtatcaacgaagccatttactttattaatctagacttactagtatactagaaagatcttttaatattctgaataataggtcattgagttcatattaaaaagacctaggtcgttcagctgaaacctctaaattgacacctaatcatccaataattagtccaaacccatacaaaaactaaaaaatacgtagaagcaaaaacttagttatatttcctagccttatccatgcattaccaaccgacacaaagactatcttaaaaccatatattatacaaaacagacgataaaattacaaaaatcatacgaagctaaccactttaatttagttgcacaatctccctcaatttctcttatcttttttcttcttataatattcgtacgcgtgtggatgtctatatataaaccactctcccataatctatctctctcctcactcactctcactcacaaaaaaaaatgtctaccatttcaaaacctctcttcttaaaacttctctatatcttcttcttcttctgctactcagtttctctctcatggtcttcgtctctttctctccactttcctctcacatctcttcgtctcactccaaccacaaactcctcctccttcaaaacctccctcctttctcgccggaacccatctccgccgtcgtctccgtacactttccgatcaaacatcaaatactcaatggctctaatcctctctcttcccataggaacaccatctcagtcacaagagctagttcttgacaccggaagccaactctcatggatccaatgccatcccaagaaaatcaagaaaccacttcctcctccaacgacgtcgtttgatccttctttatcttcatcgttctccgacctaccttgctctcatcctctttgtaaacctagaattcccgattttacccttcccacgtcttgtgactcgaaccgtctctgtcactactcttacttctacgctgatggaaccttcgccgagggcaatctcgttaaagaaaaattcactttctcaaattcccaaactacccctcctttgattcttggttgtgctaaagagtcaactgacgagaagggtattttgggaatgaatcttggtcgtctttcttttatctcacaagcaaagatttctaaattctcttactgtatcccaacccggtcaaaccgtcccggtttagcctcaaccggctcgttttacctcggagataacccgaattctcgtggtttcaaatacgtttctcttttgacttttcctcaaagtcaacgcatgccgaatctagaccctttagcttacactgtaccattacaaggtatcagaatcggacaaaagagactcaacatacccggttctgtttttagacccgatgcaggtgggtcgggtcaaaccatggttgattcgggttctgaatttactcacttagtcgacgtggcgtatgataaagtcaaagaagaaatagtgaggcttgtgggatcaagattaaagaaaggttacgtgtacggttcgacagctgacatgtgttttgatggtaaccattcgatggagatcggacggttgataggcgatcttgtgtttgagtttgggagaggtgttgagatactcgttgagaaacaaagccttttggttaacgtaggaggtgggattcactgtgttggaatcggacggtcaagcatgcttggtgcagctagtaatataatcgggaacgttcatcagcaaaatctttgggttgagtttgatgtgaccaataggagagttggttttagtaaagctgagtgtagattattgccgtgagtaggtgaatattcttctacggtcgtgcgtattagttttgagttgtatctcattatgatgatcgttggatgtttgatcgaatggtgtataggaaatctgggatttttgtgggtcccgtagaaggacaactgtctgaagcaaacttctcaatctttattaggctctggaactatgtataaatgtttgtactatgataattaaaagcttgtatattaaatggttaatataacttgttatcaacaaaattgtccaagttttaattgttttttttttgtgtaatattttcattgtttaactacttataaaacaatttactcatatacaaagaaaattaataacgttgacaaaaataaaaagtaaatcaagaaaatggataacaacaaatcataaagttttaatcaaaaccactacgcaattttttcgaatatgtttattgtgtataatttttctttttctttttggttgtgtgcttatttttgttaactttttttttgcggattttcaatattaggtgtggttaaaaacaatttatcattaaatacattgaaaatttatctatgttattatttcttttatttttatttttatgcatctatgtttttctaaaaaaacacatttgtccattggtttcggccgtaaaatatctaaactcacttacgattagattttcttgtcgaaaataaaacttcaaaagatcaaatggaaagacaaacaagaatgttattgcttgagtcgtggtctattgtagtgtcagtatttcctaataactaataagacaaaccgaaattgaaaatagataacacataagatgatagaaagtggtcgtatttatgagaatttaaagatgatagatagatacaagtgaccgatttagggagagaggcaatgactgaggccaacaaaaacacatgatgcaaatgaagacaatgacacatgatgatgaaatcgagcagaacactggtaatcaattaccactgagatacggcaagtcggcaacgtcatattttgttgtcattaaaaagtaaatctaaagtaatcggccttagctaggcttctctctttttctttcccatgaatcaacatgtttgatagagataacattaattagctatgtacttttttcattaattcagtccaggctttgaagattttattaataaaattagtaagagtcgtttataaaacattccttctttttcttaaccaaacacgaaaaaaaacaaatcgcaaaaaaatttgtgagatttttaaattaattgttgatcggtctaagataaactatatatatgtgatttattttaacattctatacgaaaatctctcactttttttagtaatttcatatgcaatcttgacaaaaactatttcatatgcaatcttgacaaaaactaaaagcttaccaaaataaaacaaaacaaaacaagatacaatagtttaagaatttagtgttaattcccaacactgaatttttgtaagctaccactttgataaatgttcaaatctacaagtttctcaaatcctcatcactcaaaaaaataaaacctctgagtctcagcttataagtttcttgagattgttttacatagtttaaaaatacgaaagtaagtttgttttgtagaaacaaccttcaacaactaccaaatattaaattttacttgtcactatttacctctgtcaaaactaaatcataacgttatatagtgaattcgaggtaaagctcagttgaaaaaaaaacttacgtttattgttttgaaattttgaaaaagaaaagcagaatttgaatgaaaagggtaaaaaatgggggcccaaaagatgagctggatagattttgggggagtagccgacagcttagttccaagtctttcgccgaactcaactcactttggatttcttattctcctttattcctgacaatgaccttattcgtatcacgattgttttattcatttcatgcatcattgctatatatatttttgggtgtaaatgttaaatatcatttgcaattttgttcattcatgactaattacttttgtttaatcatcgtatctcaagtgtttgcaacagaactaaatctaactagtacaattaaaattgccaaaaagggtttgaacttttagtctacgaaatttctatatatatcacactaatttgatttggttagtacttagtgccacatatgaaactccatgtttcatatcactatcgatcagtttgtttctccccaaaattatgttgattaattatacaaccgatcataaatttgtattccataaattgtttcacttcatcattcattatcttataggcatatcataagttactgagttggaaaaataagtactatacgtactattactttgctctggttacttttaaggtaatgttttgaaaattatatatatatatatatatatatacatagggactgttttacttgttggatcaaagccacgtcttttgggactgccacacatagagctatcacttatcagggaccatcctcgatctacatatagacatatatgtgtgtattagattctactggtgcatgcatatctataaacagctgttatgttaaatagtcaaaagcaggtaactcatgctatttcacatttccgagtttattattttaaggcactaaactccaagtaaagtggataaatcataggtcaaagtgccagttgttataatccagtaatccatacaatcttcatttaattcttgctttttggtgaagctagagatccacaacctaatttatatcccatataaattggatttattgtatgcatctatgcccatttatgctggttagtagttacaattcaaagcaattttcatttttctttttaatataatcaacatgagaatgctgacgaataacatagaaaaatgaaaaatgacatatttaagtttttattgatactactaaatataattggaatgagatgaatattgacaaaatatgtattaatgaaatttctcaatatccacttaatttgtatatatagatcatcttgccccaacctattaatattaattatatgtaaatcatctaatccctaaaccgtaactgtttagtgtctcatgtatttgtcttatatccgtgtagaacgaaaacacgactggaacgagaagtaataggaatgggagacaatataataaccatgcgtagatttagttttagatatatttgggtggtggtatatattccctttttttaatgattacctatgccaatttgatgatgacaagaagtcggtgaaacacattgacaatcattcaattctctaagagcatatgatatgaacaacatcaacgaataccatctctttgaagataaaatcatatgtggaaaattgactatactcatgtttccactcatattcaagtagcgaaaatcttgaccaaagcactaccccgaagcactcgatatgtcattctttaacaaactcgacattcgagacttacttatacaataacaatatacatgcatgcactactatgaacgtggatattgagaaatttggccagcctttttttttttgataagagaaatttagtcaactcatcatttaactctccttaaatctaagaattcgaaacgagacgggtcggaataagaacggaaattcctataagaaaaatcttagaacaagttacaattaaaataaaataaaaatgctcgcaataatgtatttacaatgtttctcttattttatctagaataaatatgttccaaataagaaataagaaaagttaaataatattttttaaaataatgttatatgttagttaaaaattaagaaaaaaacatattccgatatagataatttaaacataaaataataacaataaagaattaaattaattttataatattatataatatatacatatactatgaatatacataattatttattatatatataggtcataaacgggacttcaaaaattctggtttacgtctcgtctcgtcctgtctaatgggacgagaatttgagaaatggtacgagatggaacagaacgaaatggaaattgtgcttaccctctacttaattccaagactaaaacttattttgacaagttgaataactaaattttgatctaaagttgtaggtaagaagatcataaaggataaacaaattgttcattaagttgtattttatgtagtgtatatatttagatcaaattgtttatttcctctcttttattgattagagtcataaaatatatacactacgaattattcatttcctctcttttatttattagagtcataaaatatatacactacgaatatgaatcttcctactttttgtactaattcaattatttatacttgaaaaatagtcatccaatgcaaatcttgttcgcctaatgttcccctagtttctactttatactaacatctatgaacgacaccaatataaaaaaactgggccttactccaactaatggcccattgggtttacgaatctttattttggttacttgtgtaggtgactccattctttggttactcagctcttatcttcttcaaatcggttctttgtagagttaagcatatgatgagattccaacaaaatgactataaatatatgtggatcacaattcacaaatcaaaataaattttgatcaaagcttccgtagaaacactaagtcaagagaaacgaatgaccatgaatgaaatttaaaaaaaaagaagagataatattgtggaaaattatataggtatgggcacaatattctctagaatgacctaaaaagttaaattaatatacacaaacttgttaaaaccctttaattaatattgtggaaaagaagtccttttagcattaataatgtctaaacacatattttagctccttaataactagagagtagatactatagagacatagagttagcgtcggccggtacgcatattgacactcgtcggtgcaaccttctttgttcttggaccaacccgatgatatgccccaagatccacgtcatcacttcttccacaaaccgtccttggagccatcataatcattcctttccacaaatttctaatgctcatttttttcaccaacccattctcttgcttactatcatattc

SEQ ID NO: 782 - DNA, 78874 bp, Arabidopsis thaliana
aagcttcttctgcaacatattatgatcataatgttgaccatgatcattccagaaaccaatagttggtaacgaaccctcatcaatcctcttagagatgctcttgatctcataagaatcaagaagactagacaacttggtttcttgatctccacgcaaaaaatgattagagtgtggtttagaaaccttattctcggagaggatcatggtcttgttggcctcgagcttataccgcgaaggtcgaggtgttcttatggctcttttcgagagatcgaactctctcatcatcggctttccttcgtgtctttggtaccaagcccacgccgcagctttcactgtcgccagctcatcatctcctcctcctcctcttcctcctcctcctccggcaaagagcgtcggtgaccatctcttctttctactattgttacggcttctggtgatgctcttcttctcggacataattggtgttgaaatgtagtagttggcgaatggaagcatcgttcattgattataatgttttttgggtttgtggaatttggagtggacacgttaatagagggaaatgcttagaaagaaaaaaagaaagaatcataaatatataaatacgcgtgttgccaaaataaaaattaataaatacgcgtatgtgaaaatgatttgataaaatgagaaaaagagtattattattagtagttgttgttgctcttgcttttgggtccattggtggatacaacaattattccgtaggaaaagtgttgtatttttgtagttggacgcacaatctacatttcttatatattctttttgtaccttagtttattttttcaatatttttctttcaatgaaataatatgtacgtagaatgttgtgttgaggaggattcaactcattggaacaaaaaattggtgaaaccgcttctcattatatcgatatatcatatatggattgttctatgacttggtcttattttaattctgatgaaaaaattgggatgatgcattggaacaaaagcatagttgtgggaacatgcgaggctgttggaaaaagaaagagaatgttggtgtatgaatcgattaaacactataaaggaaaggtgatatgaattattgatatcaatattttataaacactataatcaaaataacattaacctaacatgatcaatattggatgaagtaactttacttctattctcctaacaacaacctaattcaaccctcacaaattgatgtaccataaacaatatcatgtgatactccatttttaaacagtatcagacttttaggaataaatctactaaattgtcacccaaattagttttctatattgaaattaaaccatttgagataatggttgttatcttatgtgaagagtctgaatacatcaaatagttttagtatattacttctatgttagaataaagtgtttggagttgtattaaaaaaacaaaaaaaactcgtagagagtctctttccgttatagaccaaaagcatcattatagtaaatgcccacagttagcctatttaggttcttggaacgaatccaccacttcaaattgctgaatttcaaaaggtatttttttgcaagcgtttactacagttccatgttgttaaaaaaatcacataaacaacagataaaataattcttttgtatcaaaccccacatattaaggttattctccatcaatatcatgatgttaatccaaactaaaaaaggcaaaatacgaacataagttttatcaatgcgaaatatttatgaattcaaatacatttgtcatattacttgagtttttggtgatgaaccagatgcatgaactaataattattttattatgaaattaattatgtttttgaatattatgtagtactttgtttatttattattaattgtatttaatttttttaatcattttgttaataagataattttttgtctttttataaattttataattataaattatatttatctgagtcattttttttatttattcgatgtcccatccgctcgctaacaagtcataaactcttgcaaatataataattttcaacaagtaaaccagttgttcaaactgtttaataacacgtttaaagtagtctggcttacatgtgttgctcaatagtcttttttcacccaatcagattttttgaatttttaaaaattttaaaggtcgtaaaaatctaactgctttattttttgtttttgtttttttcttgttatattcttaaaatcattaagagaaaactttggaattgaatggcaaaaactttatattagaggtttagattaaaaattattgtagagagtttaagtttacatcaatgggtctgacttaaaaatttaaaggcttattttgttggataaaaaagaaatgattacatgaacaacaaaaaaagaaaagttagattgttcgaattttactactttagaaatcaaaaatatcattagagcaatatttagtaaaaaatctagtcaaacatatacatttatgatccgtcacaatttacacgcaaatgaccttttagattaacctttcttttaaaagacgactattgtagttaatgagattttattttacaatttctcaattctcctctcgtcctctatatatagactcgatctttctcgataaaatttggatattaaacaatcatggaaaatcatgttataaattgcatttctaaaaaacgtcggatggattatgcggtaaccaaagatatcccaaatcgcaaaggtgagggaagttctaaggttggccaatccacctttgagacacaaagttgtgtggataatgtagtctacaaattgtacttcaagggtttggtgagcggtgaaacggcgacagacaagaaagcgattgtgaaagttgggtttggagtcgcgatatgcgacgaggcggataacttattctatggaatgaataaatcactttatgaagctgtgattaaccgcgaagaagcagatattctagcactaattactgggttatatgaatcaattcaccgtggggttaaaaatgtcgtgatttgttgcgatgaccgtcaaatttaccaaaccgtaagtttttcataactttgttatttctttggttatttttgtgaaaacaagtagtgctactctgacttagataatgcaaaatatttttttttggaatttgagtagtccaagttttggtagtaataatgagtggtacattaagagaaatggccttgttttagatagcatatgaaatctttttgtggtattatggatttttagattcgttgcttatcttattaattatttgtattattatattgataccaccaatcaaaatatttgttcatagtgttacttggaaggtgtagtcccaaacgattgatcgtaatgagaaatagtatagtataagccctctcgctttagatgggttataaactaattgttggcttgtctctgaacttgtactgcagataattggtagagagaagcctcagcagaagaatgtccatcttttggaagaagtccaacgccttagagggagactggcttctactggaactgttttggttgcgacgcgagatgataactttgctcttagacttgctatagatgcacttgtgaaggcaacacaagaaaaaccattgacttgttccatttgtagtgacaaaaccgacgctgagcacatgttattgaacgacaaatgccttcaccgtcattgcttttcttgcgtgaaacagcaagtgaaagtgaagcttcgtagcggaatagtgcccccgtgccttgaagatggatgcaagtctgagctcactcttgaaagttgtagcatggttttgacaccaaagctgattgagatgtggaaacgtaaaatggaggaggacttaattcccgatgctgagaaaatctactgcccatatcgaagctgctcaatgttgatgtccaaaaccgagctttcaagagaagccgaacaatccaatgtccgagcatgtatcaaatgctctgaactcttctgcattgactgcaaagtaccatggcattctgatttgtcctgtgctgattacaagagaattcactctgaacgtctggttaatgacatgatgcttaaggttctggcaaacgaccaaatgtggcgtcaatgttccgagtgtaagcacatgattgaactgactgagggttgcaatcacataacttgcaggtaaatatattgaatccgacaaagctacttcatatggatagttttatttcataatgtcttcttacattcattgtgtagatgtggatatgagttttgctacagatgtgggcacaaatggactaagtatcatcattacagttgccaacttatggataatcgtgaagatgaagaagattataatcttcatgttgatgctgaggtcaacaatgatgatgatgacgatgaagattatgtatttgatgaagattatgaggaggatgacgatgatgacgacgatgatgatggcacaacatacagcttagaagactttcgaagagagatttcgtgaatcatcgagaccaatatatgttaatccaaagagattaaattatgtcatatgaccagagagataagagcagataaactcccagataattttaagctttaaactatttttgtaatgtgctatattattatttaagttttctatagtttgaaggtaatttacatatagtgttgatcttattaagccagtttatagcctagtagtaatcgacaacgacaaacagagtcgggtacgtagatatatcataaccaaactatttaatctttgaaggtagatcataagcgaatacattagtatgtaacagatctttctcttatgaattttgtcaacagccctctcacttctgaaatctgcgttaacctacatgttcagtacagaggataccttagcattttgttacaatcgaaacgacaaatcagacgacgcaatgagatctctgagacaacaaacaaaccataaatgaagctcttttcgtctcgtgaatcattcttggttatctatgacctcctcaaagcatccaaccagaaaaataacacaatggatttgaagcctgatcatggtaaacatgttatccaacctctccagctatgtaccaaaaacaatgatgtttcaggctggttctgtttaggtgctcttttgcctgaacgtcttgttaggttaagcaaaagtcttgcattgacaccgttagatgaaacctgacaagtgcttatcgacttatccaacttcggccacaaatctttgtaataccattttcgttcattttgtccctaagatgagcaacatccgtccaccggtctaaagctgcataaatatttgacagaagcacgtaactaccggcactttgtggttcaagctcaaagaggtgccttgcaactacctctgctatctcagtattcccatgtagactacaaccacccaaaagtgaaccccaagcactagcatgagcttcaaagggcatggatttgataagctcataggcctctttaagcttccctgtccggctaagaagattcacaatgcatgaataatgatcaggagatgccaaaatagaatatttctttcgcattaactcgaaatacctcaatccctcctcaacaagcctggattggccacaaactttcaatattactgtgaaggcaacttcatcaggaacaataccttcgtctaccattttctcaaacagtcgaatagcttcacttccacacccgtggatcgccattccttccatcatcgaacaatatgaaacaagatctcgctgaggcatctcttcaaacaacttagctgctctgtccatgtggccacacttggcattcatgtctatcaaagcaggtacaacataatgactagaaaacttattcatcctttggtgcagataagaatcaaccttttcacataactcaaaacaacccatctgagaacaagctgacatcaaacccaccattataaactcatcaggtttgacattcttcgcacacatttcgctaaaaaccttaaaagcctcattcggctgaccgttctgtgcataacccaatatcaaagctgaccatgctctaacatcaacacccctcgcttcctcaaacaaatcccttgcagaaaccatatcaccacctttagcatacccatcaatcatagaggtatacgaaattatatctctcttaggcatttcatcaaacaacttcttagcattaaccaaatcaccagatttaaccaacccatcaaccaaagcattccaagatcccaaattacgctcaggcataagatcaaacatgctcttcgcttcctctaactccccagatttcacataggcaacaaccaaagctgtccaagaaacagcatttctctcaggcatttccccaaacaccttacgtgcactaaacaaatccttacatttaccataaaaatcaacaaaacttgtacccacaacaacatctttatcaaacccaattctcaaaactaacccatgaaccgatgaaccaacacgaacctgtccattgttagaacaaactttcataaccaaaggaaaagtatactcatcaggtctagctaaacctgttctcatcatccgcattagaatcgaaacagtctcaaagaagagaaacttattcgagtaccctttaatcaaatgattccagagataagttccaggagaaggaacacgttcaaaaacagaggaagagtaagagagagacgaagaagacgaagaagacgaagagatgaagattgagatgagattctggtcttgttcaagacctttgcggatgattcgggcatggatttgattaagatgaatctcggatttgcagagcttgaagagggtttcgagtgagagcaaagaaggatgagataatctctggatcattcgggatcaaatggggctattaggaaacatatgtttgtatgtaaatttgtatgcttttgtcataacatgaatcttggtggattctaatttgttaaagttttcgatgagaatcgattttttgtagaagaattttgtaaaagatgaaaccttggagaagggtttaagggtttacagatggcagcttgaggtttttattgggttttcaaaattgattgttaattttgtaaattcgagattgtttatttaggaattgacaaataccatttctctgtttgaaactgtaacacccaatttcaaaaatataatggtgcatgcggaaaggtttaaaagaattgatttaaccacctatatcatcaaagtgcacatatcttttcagttaaacatcccgatagaatttcagaattaaatgtgtttgggcttgagtagttcaagatgggtgaacttccggaaaacaattgtcggaaccatgcgagtgaacccaaagtatggggaaagatcatgtggtgatttgtagttttggtaacaagtctttaaagcctcttggacatgacgcatcgaccgtcagacagaggtggtgcccataagcccgaaagagaacgtggggcccactggtaggggcggtcgtgacgttacagaaatttttagttatcgaggggtttttagtgtatgaaataacatatacagataattcaattatcattttgtttgattcggtatagtttaaattttggttcatattcgttttcttaatgttaaaatacatatttctaactcaaaaccaattgaaaataagtggattgacctattcctcgagataatgttcaatgaactatctcgatggaattagatcttcctgaactatctcgatggaattagatcttcctttgggccatcaattagtggaggtgatcggaccattttagaatatgggtttccaactaacttagtttttcctctcaccaagttaggggtttgatttaaggtcattttacaggaaagaatcatgcgtttctttaagtttatagataacattgttactttcttaaataactgacttttattatttgtaaattgttttcaggttaacttgtataaatccgtaacaacacacaaaaaccagagtaaatatttccggtgagaaaaggtcagttttctctctcagttcttcatcctatagtctcaacaggaaaacatgatcaatattcgacattttgatctctgtagatagagagattctaccgtttccttcacaagctttagcctgtcttttgtgaacgaagatcgatgtcaatacgcttaatttcttccttgagctctggtaaagaaataggacttgcctttgagttaagcgtcgtctctttctttgctaataaagctgagagatgcttaagacacgaaaggtattctgactttacttcagaagaatcttgcagctgagttccataaccaaactgcacaaaacaaaggaaacaaaaatggaagaatgaaaaacatggaatcagtgtccaatggttttttttcccacactattaaaattcatttttgttagtgacgaattctttggagtagcaagaggacaaatagatacttacattacatactaatgaaagctgggataagtaagttaattaagagtgaaagattattttcaatagtggatcatccagaataatctcgaggttctaggttcataagccagattcatatttggagaagctattaattgcttacctctttgtaagctgtaacacattggagaagtgaatcttcagctgcatgcagattttcttcctgcaatgtcaagagtcaacaggtttacacatgtttgttctttagcgtaaagcatcaatacaaagtcgactcagtgttcatcgtcgagtcaagtacattgaacctaacgaaatgagcagaaagcttgtgtctaaatctatataaatttccatttgacggcaatgaactctcgcgttggaggactaacctttggctcatggatctcatttttgctcatctccaaagctgcaagactctcaagagattgcagctgcaacgaatagaaaaggtcccaaacgaattgttcttaagagcatataattcccaagtattgcttctatagagacttaccagtatgactaaagccgcgtgttcataattcctaagagctgcactggatttttcgtctttctgcgctttgctcttttggtttttaagcttatgcagaacgtcctttgctatcctggtttacaccaacatttattttgtcacattttgatacatgaagattaaaaactcaaagatcaacttaagctaagaaaagagagctagtacagaaagatatatagataccaacctagctgagttttcaagataattctttgctttttctagtttggatagagcttcactgttatcagttcttctcatctgactagcctgaagcataaatgtctttgcgatgtgcagcaagtttccacctatctatcaatccaggagaggacataagatgaatatcactctatttccaatatatagatgaatgttttacacaagagagtgaacctggatatgtccttctggaagtaatttttttcgggcattgagacacctagcaggaagattgtcatagagttagttatatacatttgggaatcatcatattactctgataacctaatcaagactttatgtacgcacttttcaaaaagttctagagcttctcccagcttcccagataatcgtaaagtgagagccaatgcttcagctgcagttattgcctccattgagttccatccctgtcatagattttagccattacgaagttataaactagaatcataaacataatggatgcaactagctacatctatgtaagtgatctcctcaacttatgactgatgtgaaatcagcagttcaaaagcataattaagctcgtttaagtaaaaaactatcgtcccaattatagacctctataactgcacaatatctgaaagatttaaacttgtctattccaccatgcaaataccaggaagttagaacattttcctacagtactagattagaaagttagaatttgcaaggacgaaaagaggatgcagcaaaacagaaggattgtaagatgttaaatcaacgaaaaagattcttaaactcgacagctaaaggaaagttatgtaagaaaaaaccacaccttcgataattccatcatgtgcaataatttcctttgaagtttttcagcctcggccagacgattggatcgtatatatatctgaaacaacagacgagaatgtaaaataacagaatttctgtggtttagttcattgcttcaaatcaatgcattgtaagaatagaaggcgacatcccaattacaagtatagtttaaggcaagaaaacctgagaaagatatctcagtctcctgatatatgccatggactctccttgaccaccttcctacatcagaagacgaaaaatacaataaagatgcatccaattgacaaaataaaacgtcaagatggcacaaatatcagtatttttaggataccgacatgcctcaagtattttaagagaatccagaataagagcttccgcatctgtattttttcctagcatatgtaatacctgtcgaatatcggatcatatgtaagaaggaagttgaaaatcatagattcaaatcagacttcatgacagcatggatgcgtcatattagatgcattttatcatatgtctgactgggcgagagctattatcaagttcagggtgacaatatgtggctaatatgcaagaatcttaagaaaagaagtgtaatattcattacaagtttaaagagctcatgaagattaacaaaatcaagaaaaatgagacatgaaagtaccgttccaagatgatacattgtctctgcataatccggatgattataccccaggactcgtcctttcaactagatgggaatcaaaagaaacaataagaagagaaatacatactaccaagtgctaagtgtgaattgaaaataataaatagtaatcaccacatccatacctttaaagcacgctgcacatggagcgatcagccaaaaaaattaaaaaaaaattattagcatcacagaatgtaaatcattcgactttggtggcagtatatcaatagataaagaaaaacataaaaacaggcaaacaacacgaattaacaagcagacaagtacatttgctgtggatattgtagtcctgatcaatttaatccacctttcagaaaaagaaggtaaaacacttattttggaccaattttctgattctagcatctaaacttcaatttgtaacatgcccttttatcatgacaacttcattttcgtatacatagccagcaacattcatgactccaattcatcataatttttcacgtaagaaataacagcaaacacacacctcctaatctcaaataccaacactacagcaatccagatagccaagggactatatatgacaaattcatatttgatgccttgttttgcaaaataaaaaaatgattgtacctcatagcacgcacgagcttcctcaagttttcgctggacaagatagagttgtccaaggttgtggagagtagcaccaacactgcattgttaagaatatggttgaatgaatgaatgaacatacacactaagggtgtcaaactcgtcaccaaaaaatatataaaatatagcacaattcctgatagttctaggtgtcgcatgactttcaatttagccagtgggattttcataaagatcacgaagaaggccaaataaaaattggacgtaaagaaagacttatggattttaaaattttcatgtcagggagaggcataaagagaaaagtaagcaatctaaaagaggcatataactaaaatgtaccagaaaactcagccagtttccagaaatgtgatgggttctcggctaaattatgagtgatcataaatagatgaagtttcggaacaatagtattaatcaggtagcatcaaaactcaaaagataatgatatgatctctcaccgcacatcgtcaggaccgtagaactcctccaagatactaacagcttctaggtataaaggctctgctttgtcgaattctttcttgactctatataactctgccttacatagaggaacgaaaagatagagcaattagcgtaagaaaacaagatatgacaagtttttaaaagcagagaactgtaacaatgaatttttttggaaaagatgactctcccaagaaagaatggaacttctcagaaagaaattgatcatgaaaccattgttctaaaatatataaagaaattgaaaattaaaaaggatatggctacattcctcagccagaaaacagtaaactgttaaacacttatccttagaggaccatactcaagatgctgatatgaaatgaacaagcaaaaagcacgacaatccaaggaactaaacatagaaactaaaaaagctgaataaagaaagcccacagagaccaaccagattgttgcatgcagatgcaacatgtggatccttctctccaaaaccttccttagcttcctgtattgccgaaccgaaaagtctctcagccggctcgagtttcccctataagatagagcaaattatctagcaagataaacatagcttgttcaaagaaataaaacacatattaagcttcattattctcaaacatcaacctgaaagaaataatctcttccactatcagtaaacaccctccacttagatgtgtgtatattagatacaaccgacccgtcctcaattttttctagcccagtattgccactctcatccatattatctccagatttcgacttcatagactcatcctctgccaatacagtgttcccacaaaacccaaggattgctgaaaaggaataaaccatatcatattatatacagaaaaagaatgagaaattcgaatcataacgtcacaaagacatcaacattgagcacacatacacaccagcttgtccagataagataatccaaagccgagaatccaagagatgcaaatttgttctatggcctccataatcattctgatacgaaatcctcggtttccctgcaattaaaccgctgaattcttgagactcttttagatccattttgacaatctctcacataaaaactcaacattcttactcaaatataaacaatttttgtccttttgttaagaatcaagaacctatcttttacatgagaatcatctaaaaaggttgaaatggttacacaaactctgagttcaaattgaatactatacaaaatttcacatatagagaaaaaatttaaaagatttcgattcagttccactgaaatgttacaaatcaaattctatcattgtgtgaagaaatcaaaaatcaacgttaaaagatacataatttcgaatagaaacaaagaatggcataatgggatttgataaaggaaagaaattgattcgagaaatgatctaaaagagttaccggagagtggattagcgaaagtggtgcagatcagattccgcgaagaagagaaggaacgtgaagtccgatgagttcctttgtaaagagtcgacaaaattcgaagcagagacatttgtttttttttcttcctcaagttttgtcagacgcgaagaatccttaaaccctcgagtatagtgaagttgctcaccaggtgttcgacgaaattactttcaaatcatttggttcggttcttcattggtccaaattaacctgaaccgaaataactaaaattgattttaactatattttcaaactttaataaaatatattaatccaagctaaatgttcaatcagtgattctaaattatgcattagaattagtgttcaacaaaacgctaggtgctaaacgggtggtgaccttctgcttagtgcctagaacgcttagtcggaacctaaacattttaaacggttttagaataaaatgatatctatttatatactactacatgaaatattagaaaaaaacattataaaaagcattcttgaaaacgaatttaaatttaacattttaaaataagataaataaaataataaaagtatagttatctttatatataatttgaaatatttattttgaaaaattaaaaaaatattaatatacatttagatccacctagcctgccccgcaaaccagattaattttcattttagttgttatcttatatgaatcaaaatgcaaaaaaaaaaaaacaaattctggatcttaagtggtgaatgcatgcattagtaaataaatcagcccttttaagataatgtttattcataaataatacacagaaatgttttcaataggatgtgaagtaaataaaaagcagaataagcagagcaaatctttgacttatcctaagacattgcttgatagagaacacaaactttgaatcttgcaagaaacacaaatttgagtgacattcaagattttttcttgatctgatgatcatcaaggattccagaggattgtagtctctgcaatcatggaagtgacaatgtaaggatccatgttcgaagctggcctcctgtcctcaaagtatcctttcccttctttctccgtatcacgtcctactcggatcgatgctccacggttcgcaacaccctacatacaacattccaacacacaaaagaatcacaaaatgtatcgtaattcggcttttttactattcgaaaacccgcaaagatgtttgttagtatacccaaaggaaagtgttgatgtcagcagtctcgtggtgtcctgtgagacgacgctcattgccttcaccgtaagcagcaatgtgttctttgtgtctcagtcccaatttatcgattgctttcttgatgatctcgtaaccgccttcttccctcattgacttggtactgaaacaattaccattttggttttatgaatcagcgaaaagaccataaaagaaaacatttaagagattcttgacatgtacctgtagttgcagtgagcaccagcaccgttccagtcaccgggaatcggtttcgggtcaaaagataccactacaccagcaatctctgtgatcctctgttttaagaacaagctaagtgttactaatcaaaaactacataaacaaacattgaagttataacgttaaacttacctccaaaatgtaacgagcgacccaaatttcatcagcagccgagataccaacagctggaccgacctggaactcccactgacccggcatgacttctccattgatgccactaatgttgatcccagcgtataagcaggccttgtagtgagaatcaacaacatctctgccaaaagatttgtctgctccaataccgcaatagtacggtccctgcaatacattttcgcctaaaattttagaataaccgacaacggaaaagatacaaaaccgattatatatccatcttcttcacctgagggccgggataaccaccaataggccaaccaacaggccacttcacatctttctggagtaaagtgtattcttgctcaataccataccatggcacttcagctgcaacatcagggttgctaaagaccttagccgcagcgtgtcttttgttagtcgggattggttcacccgcgggagtgtacgcatcgcacatgacctgatcaaaaccattaagttaagatggatgtaataaagcatggctgcaacaaaaaaggtcaaaactaaaagaaactcacaagaatgttgtttcctctacggaaaggatccttgaatatggcttgagggctaaacaaagatgtacaaaacacaaaagattagtaaacaagaatcgaaaaaaaaaccaatgagaagaatctgatttaagatcaagaaagaaagattattaactataagatgacttcactgtcttcaccaggagcttggcctgtgcttgaaccatcatagttccactttggtagctgcgaagggtcagtcactggtccaggtagagtctacatatataaaccagaattactaccaaaaatagagatagacaaaagttgaccttttcacaagattatctagagaatgaaaaattaccctggctttgcttctcatgtccattccagaaccaccaaccctgatttggtattaaaagaacaccaacaagagacaaaatatttcagaaaattcaatcgttatgtttaaaaacagagccaaaaacagagccagaacagagccaaaaaacagagcaaacatcatcaggggataaaaagttttgcagtattggcagattcaggagcctaatagatttatcagcaaattaaacatagatctgaagaataaacaaaaccaaattggctctagaggactaagaacaaccaaaggcagacacaaaaccaaaactataatccatacaatcccaaaaagtaaaacagagtcaaaagttgaaaaaacaacacgaacccattagatttaggtttgatacgagaacatatacacaaacaaaaaacgatttttatgaaagaaacaaaagaagaagacgaaccatatgtattcagcaatgattttgtcagtggagtctgagaggttaaggttgatgagatctgaaacaagactcatggctacaaataccaagggtttggatgatagtaacagtaataaaaatggaatcaaatctgtctcgtgttttgatattttggtagagagagatatgaagagtagtacttatagaaggaggaggggtgggtgcagagattgaggaagagggtgacgtgaagactttggagactttttggctctccacaaggaaagaaacaaaaaatacaactaaatatcaggaataaaattataaagattctttcgcggcccaatggaatctcatatttttcaggaatattaaagtttacatatatagacacaccaggttacaattttgtatgaggtcattggaataaaaagagaaagaaatgtaattatttaaggtaaaaatctctttctgtaaatgctaaaataaaatttgggaaaaatattaatattcttaatactacattttctgtgttattgatttttaaattattaattttaattgatacaaacataatatgatataacaatatatttttttttaatatgtgtaaaaaaaatcttaaatgatatataaaacaaaacggacaagtataattgatatattattttatttgtgcaaaatatatcaatagatttagtataataatgttttaaacggtgattaggtggaaccataattaaacactctaatcatcttgaaattagtatttgttttctaatgcaacttacttagattattatttttaaacgaaattcgcttacttaaatttagtattagatcgaaaccatttgtctcacatctccggtttctctccaatcattttatggggtttaaggtcattaatcataaacaagaatcaaaataaatctttccttgaggaattttgtgaaaatatcacggtgtcatatcaatatcacaaggtcattgttttgtctatcgaatcttcgatcatcttgaatctattctggtttttttccacaatgacttttcaacacaaaatattgttcttacttgacaagaaaacgagtaccaaagaaaccggagatactctaaattcttagccatacaaacccaagtaaactatctaaaaccaaagatttttgtttttgtttttttggtttatattcaactttattaaagataatgaaactcaaatatatattccgattagatagttgagttgactttgttttgggagcatgtaagaggacgtttatgacgggcatcggttgactcggcccacaaccgtaagagttgaagtctaaaattgttgactttttttttaattttctaaaaatataattatttttgacagttaaaagttaatttcaaatcatatttaattatttattgaacacacatctaatatattctttgcaattatatgataacttttcatttgaacaaaatttgtagtatcaattcaacgtagctccaattagatgactacaaagtctgacatgtgggatttgtaagcttatagttttagagaagtcataatgtctttcgataatgtctttcgatagaaggttcaagccaaagacatcgattgattcgacaaaattatcaagatatatctatcttcttatataaattcaagattccggttaaacgtctcaaaagagttctaatcataaacaagaaattcaaaaaactcttcggctcagaggagagtgaccaagaattttatcttctccaggaagtcattattgatacgaatttttctttgaaaccgaagttcctaagagtcagatataattctctcatctcagtctccattctaaattttgagggagactgaaaggggattaagatgagagaattagggttcggagattgagagagaattaagatgattcagatattttctttctaaaaggagagaggaaccaaaagaaaaaaaatgtagcgtggattaagagtttaattgaatatattttcttctaaattgtaaataggatctccaaaacggaaatgatacgaaaattttagaacttctatataattttttttttatatcttctctatgtctcactaatttagaaaatataataaaatcgtttgattttagttaactatgctttgggaaagatgtaatttattaaatatttaagagaataaaccagaaaacaattaactactttttaaacgatggatatataaatcagaaattaaaaatagagaacccaaagtaataacataatttaatttttaatttttaatttatattggattaatatatattctaaatatttgtggtattatatatttatttatattatttttttgtgcacccaattttatttatatttatattatatttttgtagtagacatccctagagagtaagcacaagttggacatctttagagagtaagcaatattatatttatattgatgttgggttctaatgacatctagagtttgcttacctccttgattctttgcaatgtgtccctgtccaatcgaaatgactacaaccatgctcagttgaacatgttatccgaacgggccagaatcagtacaattgtggggttgtttgcaaatccaattctcagtttttctgctgtattcggaaatgacttttggcgatttggatttgagttaactttggatcttgtgaaccggataatcactaaggcaaacacagttcttagtttgatcaccgaggacacaacaaccaccttttccattgataagaaagcaagcttattcactgcttcttactaccagcgcttgcactctaaaacagtgtgtggtgctgaggcgaagtacatattatctgacaagagcaactctttctccattgggaagagacatttatttggtgatgacgatttgatccaagctttattgagtgtgagcaatggtggttctatgagagttctttttcaacatcattggactttgaaatcatttttcaccatagctggagaaagattgttgaaccattcaagtcaacgatttggtttagcagttgaactatgaatagtgatcacttttaaaccctttttttgtgtaattctggttacaaatttatgatgaaatatgttttaagtttttgtttaagattaggtgaataatctatttctgttttatttaagatttttttattaaaaaaaaatatgaaatggaatcgacgaaactaaattggatacgtacacgggacctatgaataatgacagtgttaatacttgtaccttcagaattgtccgataacaattattgcattcacaacttgcataaggtgacatatcgacaaaaaagtacattcattttcaactctctgcattgcatatgtcatgtttcttagacgatcgattcaatcattttgtaaataaataataattattgcatagaaagattacagtagctagggtgatttaagatcatatgccatgtgtgtttcaaattaagtttatgacaaaataacatgtttttgatcattataatgacatatatatttcattattttgaaattcttattgaaatgtattttttcattattctacagcataatctaccaaagctatattgaattttcgcccactagaccaaattttatagattcaaactagtagacttttccgaaatatttgacttaagttgctttagataaacgttttgcggtagttaactaatgatatatgtaggctaatgatttgatttatttctcactaatattcgatatccacataatgtatattattagacaaaattatatttcttgaaacaaatatatattcttaaatcaaagaaatatcgtataattttattaatcagctaagatcaaaaacaaattaattaattggtgagcagatcaacgacgtgcaagaaaactatcaaataataatagtacggagtgtctctaaaaatattcctaaggtgggccaactgattgttacacattttaattaaatgttggtgataatgtaatgatgatgtatattattgtatcatgtgcttaagcttactataccaatctttatactattagattaacagaatttcaatcattaaaacaaaatcttgaaaacagatatgtgaaaatctcacaataaaagtcaaataattgttgttcagtttctgatgtgagatcataggtccactcttgcaaatcaagcagcgccatttatgcctgcacgcatactaaattaataagttgtgataatcagacgcaaaaaaggaaaaagaagatgaaaaaacagaaaggttcatcaacatactagttgtttacttggttgtttaaccaatttggaagtattgccactaattgactcataccaagtttcttgagcagattatttggttagactaaatgggcatcagtaactaaataatgtagcccatatggatcattaatgggcttgtaagttttttttttttaatgtattatttacatttttgtcgtcttattacattattactagaaatatttaatctttgtattattttgaaaaacttttatcacaagaaaaaataaaaggttgatgatgaagtattagagaacattatgtgttgatgatctggttaactatgtgataggtttggcccggatgctttgtagtttgttaacaaaatttcctaaattaaataatatcagttacccgtttcttgttgggtctgagactgggctgggctagaatgtgtttgtctatttcaattatattcttatttttgcttttttttttctttaacaccaaatcaaatatattagattataagagtgttacatgatatataatacatgagaccattcaaatacaaccattgaataaaataaaggaaattgtacacaatttcgatgaaaaggtggaagtgacactgctttccaaacggaagccttacaagcaacagatgaaatctgttaagtcccctcgtcatatactcgtaaaaggctaacatcttatagatgaaactcccaaatgctttctgcatcactttgattaaacgaacacacaaatatgttgcttgaaatggatctcgaacatgtcttattttgacgatgggtagagtgttatttttgctttataatcaaattatctacaacaaaatttatacatcccaatgattatacacaaacaactatgtatgtgtacttgctgcttctttcaaacctacctattttcatatactttcatttgttgtaagattggtcctggccacccaattaaccaatttatagttataaaacctaatactttttttttttaaaatgtattttttgtttttgacatcaaaataaatgtatttatacctaaaccataaagaattttaatggcaaaaatatcaaaaaaatcatgaaattttaaatttgggatgatttaatcttgaacttcacggaagacaaataaatcgtaaagttttttttttactttcgaaataaatgacaaagtttgtgttgacttgtcatttgagtcatatcgttaaataggttaacaaaaacttttttacagcgttaatgtcttgttttatttgctctgtaagaacaaaacgacgtggtttattgcagagacaaaacatattatatagtccacatataattggccttcacttaaacatattataaattacgctaacatattaagcatatatttctttgtgctatacagtgtggatccttacctagaattgaattaaatggcatagtggtttgcaataaaactggaagctggaatatggtaatttgatcatagtgaagtcacttatagtctccttttttttcttttctagttctatgtataaattacacacttttttttgtaagaaaaattgttcataaatatccaaacatcaaacggttcataaatattcaaacataaatcaattctaaactctaaactgttcacaaacgtcataacataaaccaaatttgactcttaccaattattgatatggtcatggctactatcaacaataaccatagtgaaaaatatgataaataatatatattttacgtgtcatatcatataaaatttcgcatgatttagtaaatttaggtatgaaatttgaattttaaaaaacgattaagtatattttagcacataagaaactgttaggtatgaattgaacacttaaaattagatcgggtataaaatgaccgactttcccaccaaagagttgtgcattttcaaacagcacaatgaattctctggatggagccatcttgttgttgagacgactgataaagcattggagtttttgctctacgaaattgcttaatgttgtacgttttctgacattgcaaacttagcaaaagagagacaaaacaaggagggaaaatgaaaataacatatgtacaacattaagcaatttcgtatgtaccatagatatgttgatcacgaagtaattatcagaagaaaataacaattaagcaggtagttattttcatattatattagaataagatgatagatataaatttgaaaagtaaaaagctagtggaaatggagcggacgatgaatttaatatattagtcatcctttattcattttacttgtttgaaaattcaattgatattaggttgttttggcagtgggaaatgacttctaccattgcagctagtgtactggcagcagtattccgagaaaacattttgtatattatataactcttcaatatatagtatacacatatattggttaaaatataacataacattttaacattctttcttttttatgttttcctttttgtttttggggccaaaatcagcattcataagaagaatatatataatagaaagattttattaattacaatagtcaatctttaataagtttcaagacgacatttgaaagaacaaatgtatacattaactccgcccttggaaagcttaagaatggaagggagcttgcatctagagttacacacaaagcaaaatggtctacaaatagaggtgttggataccacttttgtgttcatgagatgagaaccatgcttgatatatgagaagtctccaacaacgcaagaaatatgtaatgtagtcccacagtcattgcatgtatagaaccattcctttgaattcacttttgtttcacatgcctcacaccagtattcaccatccacattcatctcatcgaaagacaagaagagaggatgatcatcgtacctattattcattacctttcccggtaatatagcacatttgcctcccaaaccatagtcacactcgtcacatctaaagacggaatccttcttcccacatctactacaatgcgtatatgtagtagaatagtaatataacgaatgttgatggcttttgtactcaagtgtatctgaaattgcagcacatcgtacatctataacataatggccagattgatacatgaaaccgttgaattcttgtaaacaaagccaacattggaaaatctcgttgccagatgtaagtagtgtgaatggaaggttgcggtacacatgatgtttcttccttggatggttagcacatttttggtggagtttaaaattacattgcttacaactgtagaacggttctgataaaatctggagggcacatgcttcacaaactatgttttcatgtagaatttggccatcaccgtcattattgattcgtaagttatgatcatggctaaaatgttttattgtgttatcatcaatcacctcgaatggcccaatttcatcttcttcaggcgtcccttctagctccaccatctcccatacatcttctctcgttgcgcatcgtgcatgaatagcaaaactaagacatttgacgcatatataacccccatagaatccatctaccattttacgacaaactttgcatatcccctttccatgtctaatgcgtcttgtgtaagagatgcgatgatcgtggcggttgatgtttatgacacgtggtaaatcgatacactgccgatggatcatgaaattacattgaagacaaaaataagggctttgttcacctagcgtcccacaagcattgcaagtgaaatggatgcgtcttggaacaagatgaagctgatgttcgtgggtcgtcgggctttcaacaccaaccggtggtgggtttttcatacatgctctacatatgctgaaattacaaacatcacaatggtgaagaccttgatcttgatcaaacttctcgtcgcaaagaagacacttcttgtcggcgtaatcaggtgcttccgcaaatttaaggagcttgagtgggtgttgagggtgggaagtgtggtttgcttctgggaaaaactcggcacagctcgcatggaagagtattttacattgataacatatataacatagtttctcaatgagaaatggagagtcacacgtcttgcactctctcagtctcactcgcttgagagatttcgatacatcgaagagcttaagtggatgctcgtggagattgtagttttcaagaataggaagtggagcagcatccttcgcacaatgtaaatccaacttgaagtcacagattgaacatacatagatataggtttttcgaagcagatgaattccacatcgattacatgtagatgctttgtcatttaggcgcagattaagaggatgatcggggtgagagaagtgctttatttcctgtaaagactcagcacactctctatgaaacgcaggagtctcacagcctaactcattgcaatggtagcctccgtaaatgtaaccatcagagccacacccgttacaaccgtgacgagagaaaaaacgagttataggtaacaaaggatgtttgtgaattggtagctctattttttccatggtgatttgtttccagaatctaaatcacagctctcttttgcaatggtttcacaatggtgttttcttttctttattctttcggatttctcaaagctgtgagtctggccacaagccacgtgaaatggttcttgctataacatctaacatgcattaattagctaaattatatatcatataacttatatgtgtaaattaatcccagcaccacgtgaaatggttcttgctttaacaactaacaccaattagcttaaatttttttggtaaattaatcccaacagtaacaccccatgaaatggttcttgatataacatgcatctaacattaattacctacaatatatgtgtaaattaatcccaagtagaccacgtgaaatggttcttagcttcttgctataataactagaacattaaatagctaaaattatagtatgtgtaacttaatcccgacaccacgtgaaatggtttttgaactaacgtgaactgccaaactgataggtttaccgaaaccgaattaaagttccaacttctaacatatccgatagatcataaacttcattatcaaaatgaaatattcggaccgaaaatattcgttatttttagaccaaaaatactcaaaaaccaaaaaaaaagccattagtgaagtccgataaacagtgctccgtttttctttttaaacccttttcgttattgggcaaaaaatttgtttctgaagtttaaaattttaatgctctattttgtaagaaaaattgaatctcttagaaagacaaaaacaactatatatgataatcttaacattaaaccaaaaaataaaaactatgtataatatatgcatggtagatcagccttgttcgggttttgagtctccatcgacatactaattaagaaaggcttaaacaagtgatgctacgacggtgatgtaggagagtcgcttatttttttcaatatatactatattttaattcttgtataccggcaagacgtttttttttaaattagtatatagaaaattataaattctatttgttaataaaatatttatattttattatttacaattgttaggaagtaacgttctgctaaattcgtcccgccaaaaaaattaatattgtcaaatatttatattatatagtttacaattgttataagttatgtttgttgtttacttcaactgttagtattaccattaattggttctttctttttggttcataccaaaaatttccttgatcatacaaaaaaaagtttaggtagttttctatcatattttagataagtcagattttttcacggaattttcccattaaaaaaacgatgttatgaaaaatattcaaagaactcatgaatgaataaaaagatagatgatacttatgtttgatttttaattttcatcagtttgggtggaagacataattgagaaaatagagttccagatattgattagggttttcttggaacgtgatacaaggagaaaaatatagatatataagattatatatatatatataattttaattacaaataatattaattttttaaatattataatttaatcgctcttcttaggaacctaattctctctttccccttctccctcttactttttcaattaagtttcttattttattttgacgggactcacttagagtctaccattgcacttactctaatagacataacataagaaactcatacgatcaagttaaacgcatagtgaaaaaaaaaaaatataccctaaatgatacaatatatggaacccaaacaatataattaaacgtatacaaaatacgttatatctttgaaaaaatatgaaaaacccaaattatcaaattaaatacacatcaaatagtggttattgagaataacagttggagtatcgaaaatctacaatgaaatttgtcattaactgatttaagaaacaactatctccaaaaacaattatgaattaatctgtatttcataactaattaataaaatctagtttttacattaacaaaagagggagaatgaatagaagatgtgagaggaaagagattgtagagtcatacacagaaacaagaaatagagaaagagacaaaggcagaattggtattaatacaaaatatatagagaatatcagtctttttttgttacgtgttagttttgctatttatatttctttttgtgatattcttacaaatttcccctagaaaaaataatttatgtatatgtactatatatatatttttaattaaaaactctattcaatcgatttaattttgggaaaaatgtcaaaaaaatcacgaactttcaaatttgggacgatttaatcttgaactttacagaagacaaataaatcgacaagtttttgttgactttcgaaataaatgacaagtttttgttgacttgccatttgagatatcattaaataagttaaaaaatttttttacggcgttaatgtcttgtttatttactttgttagaacaaaacaacgtcgtttattgcagagacgaaacgacgttgttttgtcttttgaaacaaatataaaccctaatttcccaaattgatttcattatctcaaaatcagagacccacattgacctcaaaatcgcagataatgaaatcgatttagggatttagggtttaaatttgtttcaacagacaaaacgagctgcaatgaagaacgttgttttgttctaacataggagataaacgagacattaacgccgtaaaaaaattctgttaacctacttaacgacatgactcaaatgacaactcaacaaaaactttgtcatttattttgaaaaacaacaaaaactatacgatttatttgtcttccgtagagttcaagattaaatcgtcccaaatttgaaagttcgtaatttgtttgacatttttcccatttaattttcaaaacaagaatatcaaatattttcccgctcatagaaaattttgaaataggtgaaagaaacaaaacagatctaactctcacacactctcacaagagcgtcaattcgaaaaattcaccaaacattttcggtttctcttcacaaaaaatctcaaatttctctgtgaaaatgggcgaagaatcagaaatcgccatggcttcagcagatcgaaataacctaacccagaaaatcgccaagatcctaaacgagactcgcacatcatacgctactcataaccgtaagctaaaggagctcgccacaatccgttcaaaactatcttcatctgaatccgaatccgagtccgtgtcttcttctattcttcaattctcttccgtgtttctcaaaaccctaacccctcttttcatcgcggctcaacgaagaaccgctgcagcagagcgtgttgttcgattcgtggcggaattcgcttgtcttcgtagtaattcagacggtgactccgattgcgacgagtttctagaggaatttcttaagtttttggttgctgggtctgttgctgccaatagaaacgcgagattcagggcgtgtcagataatttcagaggtataagagaataattagggttctttctccttcaatttaatcggtaaatgtctgttaggtcaaatataggtttaattcaactgttcattgtgtttgttacagatcatattgaggctgccagatgaagtggaagtagcggatgaactatgggatgatgtaattgattgtatgatgttgcgagttcgggacaaagttcctgttatacgtacatttgctgtgaggtctctttcacgttttgtgaatgatcctgagaatagtgacattcttgatttgctacttgaggtgcttcctttggaacagaatccggtaaagtttctatcttttaccatttctgctttgacatcataaattacattctgatatttgtcatcaatgcttgccaaagtcttattgttgatgtttttattgtttacaggaggtacgcaaaacaattgttttatctctgcctccttcaaatgcaaccacccaagcaattattgattgcacgctcgatgttaatgaatcagtacgcaaagcagcttactctgttctggctaataaagttcctcttcagagtctgaggtgaatttgggcttagagttttggtctatttatttctttcttcttcattgacctcttaatagaagttttttgctatttttgttagttacaactgttctacaacttccctactgtccttctctttctcctgactgggtatttctttcatttccctgctttagcatcaagctaaggaccacaattcttcagagagggctcgctgatcgtgctgtaaatgtttcaacggaatgcttgaagctaatgaaagagcaatggctagctaactattgtgaaggagatcctatcacatttcttaaataccttgacgttgaaacctacgaatctgtggcagaatcggcgttggaagttctgttgagtgaagggttgataatgccctccgatgataaaagcatccagcagtacatattgtcagcagatggtgaaactagaggtttgttgaagtctggacaataaatgcaatgcataagtttgcagattctgcatgtgcttatattttcttatacctgtgttagatgaaagcacatgttctgcacccagcattcaacttatggagccagagattgctctttactggaggattatatgcaggaaggtgcaccaaagtgctcaagtaagttttcagtttaccaactattcattgctgatgttagttactttatgcttcaaacaaggtttttgtgaatccataagttctgaaaatttccctatttagcttagttagataatagtgtgcttaaaattggtttatcgatgctcttgatgaattccctaacttagtgcttgattcacaaaccagagaatgcttatatctactagctttatattggtcgttgacactctcaatataattttttgtgatgatttttattaaacctagctggtcaccagttcttaagaccagtataaaaaggtgatcgtattcgagatccccaaccactatagcatgtcctgtgatttcaagttacacctttactgcagtctgcagcaaatttttttctatttttttttattcactcatatctcaaacaaaactaggttacatagatcaatgcatctgagtaggcagcacattactactgtcaaaatactaaaacacctattgtcagtttacttcactttttcttgtattgaatagccttttgtttgagaacacaaatatgtcctttagcttgtccctggattcactcaaatattgtctactatacaggctagcatttgaaatataaatcttggatcttgtaatgttttctaatgctcttagtgttggttttacatatgggacaccggacatgctaagaatatgagactgttacgcaggcaaaaggttctgatgctgctacagcgatgggtgctgaagcagcagtttatgctgctgaagcttcagatgctaatgatttgctggaaagaattcttcctgcaacagtttctgattatgttgatctagttaaagctcatatagaagcaggtgagcccagatattgtttctcatacgaaaacttaagttgtttttgtttgggagatactcatataatgttttcaggaccaaatcatcactttgcttcgaggcagctattattgttgggtacgatgcttgatttctctgatgctatgctccacaagactgtgagctcatttgtccaggagctgctccgcagaccttttgagcaagaattagatgaagatgggaacagtattgtgattggagatggtataaaccttggtggtgataaagattgggctgaggcagtgtcgaaattggctaaaaaagtccatgctgcccctggagaatatgaagaagttatacttgttgttgttgaagaagtagcgagaccctgcagggaaaggactgcggatttcctgcagtggatgcacatgctttctctgacaagtcttctcttggaaaatggaaaatctttacattcactgcaagggaaggctattgaaccagaagagatattgcatgctctattgcttccaggggtaaattttctactctcctctgtttattttctactgcttaggcgccacttgttagattagataaatttgttgagactttgagttcttcttacaatcttacttgtataaagcagcttttttgtcattgccaatttcactttaaaatgctgatattccatatgatctctgcatccttttgtttcatcgaaaaactgtcagaagatgtttacagttttaaggagtggagttatgtagctaagaaacagcttatcatgcagttgaatgccttttgcattaaaatctgggcatgattttcgtggactcatgcaaaacaagcactctttctgatatgattcatgtcatgcaggcaaaacacactcacttggatgtgcagaggattgctataaagggccttggtctttttggtttgttagagaagaagcctagcgaagagctagtaaggcagctacgtgcagctttttgcagaagccctcctccaattagtattatggcttgcaaggcactagtggatcttgggatgtggcatagcccaactgaagttgacaaggcaatgggacaagatctcttgtcacaatttgaggatgacagcattgattttgcacccatcgacttatccaatgccgaagaagatatgaactttaaaatgctcgatctcttgtatgctggacttgaaagtgatgactggagagcatccacagagagcagtgagaatgagtcagttaaagcaactgttggggaggggtttgcaaaacttcttcttctaggagagaagtacccaaacttgcctgcatctttctatccgtttgtattgggaaagctaattgctttatatttcagtgaggagtcaaaagaacaactgaggtatagagattttgtttctttcgattgctaacttctgtcaccagagtactagtaatgatttggtcttttaataatgtccaggtttaaacagtgtttatccgtcttctttgagcactatgcctccctctcagaaaaacataaggtaacggaaaccatgatgtctataagagcaataggttaacagtgtttcatggcgtatttgtataacactgctttcatgcaatgtagggatacgtgtcaaaggcttttgttcctcttgtacgctcaatgtggcctgggattgatggaaacactaaaagttcgtcatatgttgtatcaaatcaacgcaagcgcgcagtccaagtatccagattcatcctacagatgatgcaaaccccgctatacaaaaaagagacaagaggtgagcctgaaagccaggtcaataaatcaccagaagattctatccaacatccactaaactgtacagaagaaggtttggccatacgcatagccatcgaggttagttgcattccttaactactataacatattgttctcaggattaggaactgcggtctgtaatactggctaaccaatattgttaacctctttgctaatattgtttgtaatagatgctaagcttcaaagaaaagaagactgctcatgagaaggcatatgttgcagcgctgtgcaaaatacttgtgctgctccatctgaaaccatcagaacaaaatgtgacaaagttgttgaaaaagcttttaagcctactcgcagattctgtacgttcagagaaggatcttcttaaagaagtgaaaccggtgcttcaacatctaaaatctttggatgcttgtccaagcgaggagcttacacaagatcaagcaaattccatctttggtacattgatctcttgccttgtacattacagtttggttatatttacacgtaaaactaagttattcgagttgttatgctttggagaatttgactgttagtttctttctaatggctaattacagaaatactcggagttagctacaacttagagatcactgaaactacaacagtgccacagacacctgctccttgctcaacaaaaccagctcggtcaagaagacgagcaaggattgaagaaacatcctctgatgaagaagaagtagcatctcctccaccttctgctcctaatactttgatgacccgatcacaccgtgcaagtaaagctgctgccttggccaaaataatggcaagcaaagtgaaaatgagcaatgtagacgaggatgatgaggaagaagaaggttcttctgatgttacagcagatgattcagatgaataactatagagagttgaattaggggttggctctgttgtttgtacgtttgctactaagtcgatgtgtgttttatgtcagttataaaaagattatagccaattcgtagcttgttatgtgtgagtgtcggttatgtttgctgtcgaaaatctttgtatttagattatagaacagataaataagaaagcacttgaatattattgaaaagactctgaagttgaatccatttacggactccatatcaagagttaaaacataacaagaaaagaaaaataaaaccaaagcactctccaccgcggagacggagaacaaggtgaagagttgactctttctggatattgtaatccgctaaagtgtaataaccatcttcaagctgctcgcctgcaaagattagcctctgttggtccggttggatcctttctttgtcctgaatcttggccttcacattgtcaatcgtatcagagctctccacttcaagtgtgatggtctttcccgtcaaagtgttgacaaatatctgcatcccaccacaaagacgcagcacgagatgaagtgttgactccttctggatgttgtaatcagcaagcgtccgaccatcttcgagttgtttgcctgcaaagataagtctctgttggtctggtgggatcccttctttgtcttgtatcttggccttcacattatcggttgtgtcagagctctcaacttccaaagctatggtttttcgggtaagtgtcctgacaaaaatctgcataccacctctcaacctgagaaccaagtggagagttgattctttctggatgttgtaatctgcaagagtgcgaccatcgtcaagctgtttaccagcaaagattagtctctgttgatccggagggactccttccttgtcttggatcttagctttaacattgtcaatagtgtctgaactctcaacttcaagggtaatggttttaccggtaagcgtcttgacaaatatctgcataccacctctcaacctgagagctaagtggagtattgaatctttttggatactgtaatcggccaaagtacggccatcatctagcagtttaccggaaaagatgagtctttgctggtctagaggaatcccttctatgtcctggatctttgctttgacattattgatggtgtcggagcttacaacgtcaatggttatggtcttttctgtgagagtctttgcgtgaatttgcatcgacatctttgaaacgaaaaaaaaagtttcaagtaacaaaagttgagagaggaagaattcaggaaacttttgcagcaagattagggtttacgagagatgaagaattgaatcgtgaataacaacaactatggtgaaagatcttcttatatagagactagagaggcttaaagactttgattattaaaagtaaaaaggaaaattcctaaaatggaaattgctaaaccaattcctaaaaaggaaaattgattccgcagaagtcaatttacctaaggcttaggttggttaagccaatcaaattcactctttgggagcactttaagattttcatccactgacctctcaatatcaacattgattctccacaacacatacttactttcccttttcatgccattgatcgcgtagagcctccaaagcaaacccttaaggaatctgtattcacaagtcatgtaccagacccattgttttttgacaatactttcaagatctctgaaagctctcgtcacaagtccaacttccattcctctttccacaagctctctcactgaatcaatcatcttatatgcaatctcctttacgtatcccgcgtgacttttgacctctagcaagtgaatagctgaacagtacgcacccgtaaacgccaagacccatctactgttatctaccaacaactctcttggtggggttaggtttctgttaatctccggaagaagattagttatcgcaggaacaacaatatctttaaactcaagccacattgttaaacgctggaagatataaaccgctttctcgaactccactttgctttctgaaccaatatagtcccatagatcgaaccacgggtctttctcgtagttgaatgtctcctgcgcaacgtggaacaccacctgaccaagaatcttgtatatgttctcaggcaatccttcttccttaaggcaagtaatgagcaatggctgaagacctctaatctctgaaacatctatttcccactggcttgaagtatgatcacaaagtgaatcatagagtcttttgattgctatctctctagacctataatcagaaccaggtattgcaaagaaactcaagacttccattggagtacattgcctaaacatgtagtacaattcacggtcagagtctactccaagatcttgattatcaacacgaaaatgttcgagtttaaaagccggattcagaacatacttatccatgtttgtaaccattacaaagatcttcttggcttcttccttagtacttgttccaactcctgcgatcgcatatgcaaacgctgcaacaaaaccgcattgtttgctactccatttacacaacttcgcttctttcgcaaggtacttatcgagatattgaagccctcttatcgcaaactctctttccatccctaaccacataacctcaaaagcagatttcataacattatgaagaatctctcttctcattacggaatctgaaacctcaatccccattttaacagcagatgtcaaagccaaaacccaagcttcttctttatttttctcaggatgaagcaaaaccttatacacttcctcacgtaacttctccaagaaccggttaataaaaccctcgtaaagcaatggcaattcgatgaagtaactaaacgccctaatcggatcttgattcacaagcaacagtatatactcactaagctcttcccatcttccattataaaaactcataacattctcagctacgaacgaaacgatgactcttaagcaattagtatcacactttcttggattctgccgtgtcaagcaagaaatcaaaagaggtttgatttcatggagagcgacaagagagagtttgaagttgcggtttcttaaaccggggagagtttcagagaggtgaccgattgatcggagtctgaggacttgatcggaagaagaaagatagatcttgagaagctttagggttaagcaatttgggaagttagagacgaataagtcgtagagagtacgagctgttttgtaatcttcggattgtttacgtgtgtagagattatcgacgatcattgttaatccgtcgaggtttggtgatgtaagaatctctctggctttcatggcgagatttagtgtagaattcgccactgaagcttctgtaaattttgttgaggaaattttggatcttaaggtgtttctcctattaaggtgtccacatcatcaacaaaaaatattatgtactccaccaataatcatttcaaagtaactaattaattgaatcgaagcattaatcttcaattaatacacaatttaaaataaaagttacttgaatacgtattttgtttatacttttagtcatactaggtgatcacccgcggtacgccgcagttttttcggacttttttgtattgtttaatttaaatataatttttatttatctaatcattcactcatgcaataaataattacttttagtattaaaaatatttttgtctaacaacattttcaacaatgcatcatacacataattcataaacaacgtttgtcttaaaccaatttaatagagggtagtgttggattctagaaacctaagaattttatgatggagctccttacgtattctcaccctcagtgatttattatataaatatcaatttaagaaaataaaaatatcaatttaagagaataacttactcaaatcattaagtaattcacgattattatacactcatactttgagtttgaattacaaaaacttactcaaatcattaagtaattcacgattattatacactcatgagtttgaattacaaaacaaaaattttcgagtatgagaaaactattaaaatggttttattgaaaatcatgtaatattaaaataaatttagtaatagtataattaaatatgtaaaattaagtaataaatatatcattaacctataaattcgaagttgaagagcttacattaatatatttaatagacacatgtcaaatgctaaaagtgatgatgtgtcaatcaaatggagagagttgaccaattttcatatatatgattatcacaatggtaacatatatgcgtaaaacaaaacttaaaactaaatagttgctaaatcaaaaaaacttaaaattaaatatattttcatatgaatgagagtataagcataatccctaaatatataaataagaataaaaaataacaatgaaaatttcttagaaaatcttacttcaaatataatttaggatgaacaaaagaattgaattcaaatagaaggctataagatgtttttttttttaataataagaagataatcatatttcgtggaagcgctgacttctttaaaataaaataaaaaataaatataatatatcatgtgttatacgaaacaatagtgagtaatttgaaaatgcaaaaaaaaaactcaaatgattattaaaatatagatgtataatatagtttgtttaaaatacaaaatagagtttgattatagtgttataacttcctagatatttatgcttcctatattgctctttgtttccggaagataatgaaataaacaaggaggagttgatagaatattggatttacgaaggatttatcaaggaaacagagatgaagatggaagtaacaaccatggtcatactataattggttcgttagttcgtgcgcatctcttgctggatggtcaattcacatcgatggtgaaaatgcatgatgttttacgcgagatggctctttggatagggtctaaagttgagaaagagaaaagaaattttgtgtgtcaattctggtgcacagttatgccaggtaccaaatgacattgaataacaggttgttgcgtatctcaggtgagttcttttggtttatgcaagcccttgtcgtcttggatcaagcatagaagaattagtagatttcaagggagctactattgctcatttgaggaagctagaatcccttgaagtaactaatatgcatgcattaaaaacacctttgaatcctctggatggatggaggaacgagcatgaataatggaaaatgttgagaacagcccaaacctgccactgagttccgagaaacgagcatgaataatggatggaggggctagggatttggagaagaagactatttaaaccagcggatggtctctcactttcaagtttgaatgataaaggcattacatatgtatgattgtttcctctcagttcttaatttggtttggtttctgtggtccatctttccatctaccgcatacgtgttagagagagtccaataatttgaatgttgttttttactttcagctcatcaagatgcttcatcagcctctcttactaacttggttttttgttctgaagagtcatgcaagtctttattagcagtgcaacaaaccaatcaagacgtttcatcagcatgctctgtatctgtcttcaaagccatcttcatatctcacagactagctatacaaatcgactaagcatccacaatggttaatctgcgttaagattttgtaatcggtttcaggttttgtaaatattgaagactttgaactagacttacatggttcaagtgttctgttaaggtaattgcgcattgatagcaaaacctacaaataaacttcttaatttgggttggttttatgtgctctgttctttaatcaggtagcttcagaagaatggaaaagaaactgcgcaaaacattgtcttaaagaatgtatttccttgacctttggaaaatagtatcctctaagtttttcctaaattattcacaagctataaaagactcctaaaaaagagataaaaaaaaaacgagacacatcaagtgtcactagcgaaacactcacttggtgagttttatctccactaggaacttgagcatagatgattctattgcagacatgccgttctggttggttaatttttgaaaatgtaaaaataatacattaatcccaccaaatactataacgaatgtaaaatcgtgattatgcatggtaattgtgaaacattattcaatgttactaaatcagagataatcagaatcaaatattttcaattttgacctattcaccaacatcaaaacaaactaacaataaatcaacaaactttatatatacggtatatctcataatatatgctctgaaatgtataagttatgcaattttcatatgttaactatattacaaaactctcttagcttttaaaataaagaactaaaataagattaaatgaagtgcatggtacgagaattccttcgagagcaagcaatgaatatcctaaaaagaagaaatggaaaactcgatgagtgcgatggtacagttggagagatgtgtcttcgttcgaaaaaggttccttctttctttacaattataatgtagaaaataaatatgaaccctaaagtaaagctctcacgggatcacccacctaccaccttccctttgagaattatttgtggaaaaaaagaagaagaatattcagctttccaaatttgacattctttaagttatgaaagaaaaaaacagtacatatttctcaatttaaactattttgttatgcaaaaaacaaagtagttttattaaaaatgtaacgattgttggaaaaaaaactgagagaagctattcattcacttttcttccctaatagtacttctaagaaattgggaaacctttgttgcatggggtgcctgctttatgaaaagcttagaacttctttagtcaagcaacaaaaaaaaaaagtaaaacttagccatccacatgttactgaaaacataattaaattgtacaataatctataccatattattatacggccatcactaattagcttattttgggttcacatcctctaacatttctaaataattttggcaagcttaatattgtagattatcaaataatttttaatgtatacgatgataatagaaaattagaaaccatttcgatcaaataaaagtgatgatttgttttataataaaaccattaaacttgactagacttcacctaattatgtgatttgggtggaaaaacctacgaaatatcattccatcgttcctcattaccctttaagtaggacttagatagttaacatgtataaataggtttccatttgtattgctattgtctttctctccttctccactaatgccaatggcaaaactaaggaacatcatcaaaactctctccatcttcttctttctcatcgcagcaaccgctccttcactctcctctgccacctccgccacagacaccttcgtctttggcggctgctcccagcaaaaattctctccggcgtctgcgtatgagtcaaacctcaactctcttcttacttctctagttaactcagccacatactcttcctacaacaacttcaccatcatgggctcttcatcctccgacacagcacgtggcctcttccaatgccgcggtgacctctccatgccggactgcgccacgtgtgtggcacgtgccgtctctcaagtaggtcctctttgccctttcacttgtggtggagccctccagctagctggctgctacatcaaatacgataacatcagcttccttggccaagaagacaagaccgttgtcctaaagaagtgtggatcctctgagggttataataccgacggtatcagccggagagacgcagttctcacggagctagtcaatggcggagggtattttcgagccggagggtccggtgatgttcaaggtatgggacaatgtgtaggagatctaacggtgtcagagtgccaagattgtttaggaacggccattggacggcttaagaatgattgtggcacggccgtcttcggagacatgttcttggctaagtgttacgctagatattcaactgatggtgcacaacattacgccaagtctcataattgtgagttctctctacttactattattagtaggaaaactttcaaaaataaaatgttttgttttccataattcaaaatccaatttgttttttaaaaatagacctgcaaatatagatttagataagtttcctaaatatttaggaatagtgtagtacatgtatattagaaattaaaatttgacaaaattttatttattttagtgaatcctacctataacaaaagttcgtatatatttgtaaaatctcaaagttgtgatatttttggaattaacaaaaattctgttacaaatttatatatatctgcaagaaaatgacaataagaactcaaattatacgtttcataatttgatgatttttttttttttaattccaaaacaaaatagaaactaacaataatatttttttgaataatatttgttgaataaaatagataaaacaaactacggaggagaaaagacgttcgcgatcatcataggactactagctgcggttgttcttctaattatcttccttcttttcctcagaggcgtttgcagtcgcggaggtgatttctctatcttacatagttttactcttatttaatttctttcataatatatggaaaatacacacaaaaatatccaaaatgtttcttacatgcatggtctcatgataaatatacgtagtagtcaatctgatcataatgaaatgttatatgtaatatgcttccatgtgtatcatacagttaggtggttattagtatattcaaagttttaagtaatacttgttcataaatttaaaattttcaggtaaataaatgtcaaagttctgaagaatcgcaagaacgtggatctcaaaggaccagaaaatccagatgagatgcatatttgctttggattctgtcaacgttatttcttttttctttttctaacgttttaaaaattattttgtttcgattgttgttacataatacttgtgataataattattttaaatggaaaagagataagaaaaggaagtcttaagcaatgaattataaaggctttatgcatatccgaaaaacaagattactaaagcaacaaagtaaaagggcatggcaaaagagtgaggtctaaaagcaaaagtttatgtcgatctttatttgtcaaatggcatatattctcttcagaagataaacaaattttataatgttctcaaatgttacgtccaatctcaaatgtaatattcttacattttctaatttaagacaaattaaagagaaaagtagagaaagcaatgcatatattttcttacgttaaaaacatttcattttatgaaatatcaggtgctagaccgggcatgagtccattggaggaccattcgttgtaaaattattggtccttatttgttctctactaagtactaagtcaattgtctatacagaaattgtcttcgacaagaccaaactggagaatgaatatttaatcatggccgaactagatttaacacgtcttttttttttttttttacgtcaaaacaattatattaatcaattagaatcattacaaaagtatcgatcaagccaaataggtaaagaaccagaagcagaataaaaggtagaataagtacaaccatatttcgctaagacatgagctaatttgtttccctttctcctaataaaaccaaactgaatgcttgcaaatttatttgcccaaaaactgatgtcctccaggtgatttgctaacgaactgtgaaacgaagtcccattaatcaagttaattagcgtctgacaatcgccttccatgaatacttgtgtgtatcctcgaatccaggtttgttgtaaagccgccaaaagagctttggtttctgcctcaagcggattactcgtatgagccaacttcattgaaccccatgagattggtgtcccgtaatgatttctgatgatccagcctcctgtagcttccaacttctgtacatcgaaaccagcatcaaaattacactttacatatgtggcaggtggattcctccattctatgttattctctgcaatttgtcgagtcggtgatggtgttttcttatggctttgtgttgcattgagccaatcatgtgtttcagcctttgcacttaaaacagtttttgacgggctttctctgaacttattgaatactacattatttcttgccttccatattcgccatatgagccaaaccgggagaagcttatggaaatctgacattgtggtatcctggacaaagttcaagatattggagatgttttcttcaaagtcgtttgacataagttgattatgaatgagtgacgaatccgataaccgccaagccattgttgcgaaagggcaagtaaagagagcatggttaatcgattcattttctcgatggcaatgaggacaactaggatctatacgcattcctctagtagttaacctctcagttgtagcaagagcttgagatagggctcgccaaaggaagtgttttaatttcggcatgattggcaagttccagattctggttttcaaatcgatcgaaccatgaggagggtttatggcgggaatgtttgtggacggatcatgagtaaggagccaatagccagaacgaaccgtatattctcccgttgtattgtaattccaaataattttgtctggttttttactcttagcaaggtagatacggtgaatgaatccatgatcgctttggtcgacaaattgagaaattttagaatcatcccaggagtagtaggagcctttacgttcgaacaagttattaattgtcatctccttatatgtttcttctgtatttaacggtctaggaggatgagagtccacaatattatccaatccgatacgaatattctatccatcaccaatcaaatgtcttgttcctttttttaaaagtgcaatgccatctaaaagcgatgcccatccataagattgttgttttcttaccttaacatcaagaattgaaacatctttgaaataccgggttttcatgacacgtgcaaacagggagtttggatattgtatgagacgccatgcttgcttggcaagtaaagcatcattaaattttgcgagatctcgaaagcccaggccgccttctttttttgagtattggagtctcttccacgctacccatgggattccacgctggtttgaagctttttcccaccaaaaattcataagtaatgattcaatctccgaaactatacctttaggtaatttgaagcatgacatcgcatagacgggcattgccagggcgaccgactttagcataatctcttttcctgctggcgagaggaaacgtgcactccatgttgacgttcgtttttttactcggtcaattatatattcgaacatttctttctttttacgaccaaattgctcaggtaagcccaagtattttcctcctccaccctggtttggaatttccagaatttgttttagccttgattgtgttgaaccatagacccgcgatccgaaggttatcattgatttttgaacatttattttctgtcccgaatagtattcataaacatcaaacacatcctttagagcctggcaattccgtacgttggcttggcagaaaaatagagaatcatctgcaaattgtaaatgggttattgctggtgctccattgccaatgcgaactccccgaagatctccacttgacgctcttccatttattaggtgactaagaatatctccacataggatgaataaatatggtgacaacggatctccttgtcgtataccccgtgttggtgtaatatatccatgtggtgatccattaatcaagactgagtagtgaaccgatttaactgcagccataatccacccaatccatttgttgcaaaaaccaaagagtcacattgttgtttccaggaaatcccattccaccctatcataagctttgctaacatctgttttcactgccatatatgtttttgacacgcgctttcggactttgagtgaatgcataacctcatgtgctatcatgacgttatcgttaatgattcgacccgggataaaagcagcttgagaatccgtaacaatcgagtttagatgagattttaaacgattcactaagcatttggagatgaccttgtataaaacattgcaaagtgctataggtctatagtcggagagtgttgtagggttagtgatttttggaatcatacatatgttagtatgatttatgctgggtttcataaatgatgtttcaaagaattttttgacttctaatataacatcgtatccgactatatcccaacaattcttataaaatcttgctgttaacccatcaggccctggggctttatcatctcctatttggcagatagcatcatatatttcggtgtcactaaactcttttgtaagatctaaattgactgtattagtgactgtggatttgaagtccgcaaagtctattggtgatacctttataccattggtgctaaagatatttgtaaaaaagtcctgagcgtggtttccaatttctttatctcctgtgaacatccttccttgatcgtccatgattgtgttcactcgattttgagaatatcttgtttttgtacatgcatgaaaatagccggtgttttgatcgccttccttcatccattgattacaactcttctgcttccaataaatctcttcgtcactaaaggccttcgctagtgactcttgaagttgtggaattagttgtctttcaaccctccttgtactctccattgctctgtttaggctgctttgaagttttttgattcgttgttctgagtttaaattagaaacgtgtttcagtcttgccatggcttgtcgacaactactgatccgttccgtgataggtgtagaacgtgaattccagtttgtcctccagcttgtttgaacaatacgtttgaatgtcggtatgtcaattaagcggttatcaaaacggaaaagctttgatcgacggggaaatgactcgttgaagtgaactaggaccggtttgtggtcagagcccgtgaagtccaggaattctgtttcagcatatggaaatgttgcagtccaggctgaattaataaaaactctgtcaagacaacatttgactgtgtgtgtatgtctttcccctacccaactgaatctatctccttttgatctcatatcttcaatgtcacaatgagaaaccatgtttctgaaatttctaaaagtccattcctctctcatgggaccaccaattttttcagcgttcgaaagtatctcattgaagtcacccactagcaaccattcagcatttcgattatctgagatattttcaagagtttgccatagttgatgacgttcagattgagtagggtgaccatacacacaagacaagtagaagctcttgttattaaatgttacatgagaatcaatgagtctttcatcctgagaaatcaaggataaagagacattgtttttccacataagagctaagccaccactccttccattagggggctgagttattacattagggaagcctaaatcatatgctagtttacatactttatcacactggtttaaggtttcaactaaaaataaaatatcatagttatacatacggaataagcgaaacaaccgtgattgagtcagcggcataccgatgccctgacagttccatgagatgatcctcatattggatcccttaggggtaccgggccccccgcgcctccgtcacgtccatcatgtatcgaacacgatcctgcagattcagtctttcttcctttcttgcaaagttgactcagaacgcccatttcgtctgcagcttccacctgttggtacatttcttcaaatcgaaccctctttctcttcatgaagacaaactcattttgtgcattgtcagaggactcaaggagcagatctttctcaaccggtgcgtcagttttaactcctgcaagtttggcgtgaaggtagcggagtctttcaactgtgaggtctgtgtcctcaatgacgcatggaaccgaataaccatctgaaagtttttgtacctggcgttgattcccctttgaaagcgaagattgaaggccgggaataagagtcgctggatccactgtctgaagagtatcagtgtcgcttatgtcatgttctttgttgtcgtcgtgatgatcgtcatcatcatcagcatcatcatcatcacttgtctccaccggatcttcattatcaaaggaaagggtgcatgccttgatgtcatgcttaagggagccacatttggtacagaaattccttaaacgctcaaaacgaaactttatcacagtgttttcaccatcagcaaattggaaatttctttggaagcgtaaaggatcatccaaattccaattgattcgaactcgcacaaaacccgtatggtttgagttctcatcaaagtcaacatcagcaacatgtcctaatctatttccaacacatctagccattgcattggtaaggaaaaggagaggaataccggtgatttgtacccaaaaaggaatgatcttcatttcagcctcgctaaggtttggataccaccgatgaatcgaaagcatccaatcgttgaatgaccacggtccacgacggagcacgagattcatcgcttcctcagactggaacttgaattgaactctgcctttgtcaataatccgcccgacgcacgaatcaggaaagccccaaactcgtggcatttgtcctatcaaggcacggaggttctgtttgcgtggattcacagttgttaccaccaaggagaaacggttcacatatgcagcctgtgaacaaaattctgaagttagagccaccggttcatcatcaatacccaagttcaaatcctgaaccgatttacgaagtctgtcactcatgattgtggatgacagtgtttgagaaatggtgaattgcagaaaagggagaagaaggagcgaattgaagtatatataagtttgtatccatggcggtttgtgtgggtagttaccctccgaaagtgaagggcaatgataactgccatggaaactgattggcagaaagtaaccgccgtcataaaaccgtgaaaagagacagattatgatggtcggagaactgctccggcgaggagaattgaaacggtgtgagttaggcaaaaaatcgccctcagagagagagagagccatcgttttagcataattagtagtagtacttgattttacaagaatttcttttttaaaaaaaataaaaaatattaataaaattagatttaacacgtctatatacaagaatttcttttttaaaaaaaataaaaaatattaataaaattagatttaacacgtcgattatctctttcactcaaagtatttgatacatgtgttagcaaatttgaaaatcatactttatattataaaatttttaaaaatcattaactattcatcaccaatctcttcacttcaagtcttcaactcccaaattagggtttaaccttttgtttgaattcttattctgcccaatggaaaatgaaaatattcgaatcaaagttgttccgtgggtttcgtatctatcaaaaaatatagagtctaagacagtcaaaatctacctagatccaaaagtgatctaactataaataagtctaagccataactcatctattatactatactagtgaatacaactattaaaattcttatatataacttggaaggtccaaagattttggatccatcaacagaacaattggttcaaatgtaaaagttatgaatgaagcacaaagttcctaacatgaatcgcacatagctccaaacacgtatcgcaccggtttaagagactactagccacaaggtaggcaatgagagtcatttcactttatttggtctaagtcttgcgaattctccattttcacgactgatatgactcgttttatatctagtcgtcaactgtacttagttttgttcgggttgtgaaattttcgtgattgcatagaatgttactcttaacttgatgttaaccggtttctccatcatcgtgcaaagctggaaacaaattacaacaaaaaatcatgttatagagctaaagaaagaaaggattgaaatcaatatatgttgctattcatgaaatcttgagtatatgaattatttttgaaatttatattaatttttctatacttgagaacatctaaatataatatattttttatattatacatataatacttttcaagatttaaaattgaagagtatatatatatataccaaaaaaaagggacaacagataaagataaaaggcccaaataatcacaaaaatcctagaatcgcatcgaacggttagaatcaatcgatatccatcatatcaatatacactgcaccgtagcatataacaaccccctgggcttctccaaagttctggagtcagagaaaatgaagaagaaacaagataacgaagaactgtctcgacttctgtaatctgtataaaatactttccactcaaacatatatacacatctctagaaaacaagcttagctaaagaagaaagatagaagaatatggcagacagaggaatattcttgtatccatttagaagattccaagaatggtcaagatcaacggctctgattgattggatggaatcaaacaactctcatatcttcaagatcaacgttcctggttacaacaaagaagacatcaaagtacagattgaagaagggaatgttttgagtataagaggagaaggaataaaggaagagaagaaggagaatttggtgtggcacgtggcggagagagaagctttttccggtggtggaagtgagtttttgcggcggattgagttgccggagaatgtgaaagttgatcaagttaaagcttacgtggagaatggtgttcttacagttgttgttcctaaggacacttcatcgaaatcgtctaaagttaggaatgttaatattactagcaagctttgatgtctaaaccgggttaaaccggtttttggttttcttaagatgaataaaattggactttgttatttcataaatctaatgaattgcagtatgccagtatgtaatatttaggaatccaataagatgttaatattactagcaagctttgaagttttaaccggattaaaccgggttttgattttcatgaaccgaaagtatttgaacattgaagaattgtaaaacaagatttaaaccaagaagaaaccaaaagctgatgatttacatctgattgattctcaacaaataaaacaacatcaagaaaccaaaaacaagctttgttttcctctagaccaatgagcttgttgtgtctgtttatgtggcagttctcgagtgcttaatgagccaatcgatgaccgcatcaatgtttatcgagtccttacacgagatcatgtaacagcaaacctctctgtctgttacagattcaagccctctgcatcaaaacaatccaaagtcatatactcgaatccagattgttttgtatggactttgaataagaaacttacagttgatcaaccaaagcttgcttagagagagcttcagacttatcgattttgttgccaagaatcagaagaggaatgccatttaaagacggtttcgttagcagatcattcaattcgcttcttgatatcggtacactatctcgatctgcagcatcaatcacatatctgcaatattaccacagcaacatataccatcaaagattattaaccaaatagtaacatgggatgttcaaaacatatcgaagaagttttaagaggatgtacacaatggcggaaacaccgcgacagtaacgttcccacatggtacgaaaccttcgttgccctccaagatcccaaatctttattgtaacatttccttttgtaactttcctcatgttaaatcctacagttggtatcatatcttcactgtaacctccagtcttgacaaatccaaagaaaacaagaagtgaaacgcgtaagattagatttgttcgagaatactatttatcgactaaaacctctgatgaaatttctactcacagcaatggcattgacaagagaagtcttcccagcattttgaagtccaacgagtgacagctccatctcttgtttgaaaaacaagctgacacaacaaatataagcaaacacagaatcaaaatctaagtgttaccaaaacgtgattctgctatacactaaaaacataagtataaccaaaaacaacaatacattactaaccaactataacctactcttttaaccattctataacatcacataaagcatcactactataaatggattaaaatgacaatcaagtcaagagaattaatacacaagaacatagaaataacggtagatttctcagcgaaccaattcatataatgtaacaataaaagatacagcccaagaaactcaagagaagtttgagattttgaaacaataattgttgactctttgtgagaaaaattggtttttggcaacgtttttactaaacccagaactataactctaaactacttcaatggaagaacaaaaggactacaactaataaaccaacttaatcagcaaaacaaaatgaaagttagaaatttgtttacctccggagccaattaagaagtgaatcccaaagacccatctccaaagatttgatcttttcgaagatttaacactcgagttctggatttggagattcaaaatcgaaatatttcgtagccctagttcgattcttgaattttgctagatgggtaatgagagaaacagagaggaagaggaacagggaagaatctggaccttacttaaggtaatagaatttgtcagtttgtgaaaacggtgtctcttccttcactcttggtgtcacgctattgttgcttttagaattttagatgtcaccattctttttttttttgtgtgttccttttatttcttttatgggaaatttgcaaagaataactaacaaaaatttataaattaaaaaagtaatacaagaaaaaaaaaacagctatattctctatattatatataataatggcatatttacctctttctctctaccttattctaagttcctccttctctcctctctttttcatctttttttttttttttctctcaatctcttctcttttttttttctgtataacacaacaaacaaacgaaaagaacaaactagatttttcagataccacttatgttatctgattgcttgggttgccaaagttgtatcttagggtatagttttctatacatccaaaatagtataatacaacattttatttctatccaaaatagtacaagtctttacttacaaacactacttactattttataaattcaaattcgattttaaaaattcaaactattttgtatgtagaaaaaaacctatgtttttttctaataaattttataattgaaatctattttttggaaaagatttatagcaaaaaaaaataaataggtgaaaactaaactaagtgttactaaatcatctcacttccaattcaacactaaaattgtcttttccttctccttgcatgctattttcttaatttctatatatatggtgctatattcttaatttgtttatcaaatatggttattcagctaaatcacccttttcttatccatcatttgttttgttttttttttgttttttttttcaaacaagaattaacacatacaatttgatttgttctgtttttcagaaaaaaataaaacaatttgatttgctatcacaagacccaaacaaaaaaaaatctcttaaaaatactcaattaatttaatatatactacatttttttgtgttgctagaaaaaatacacatacttgtttatcgatttcaatgtaattcatgatatatttttagttttcgatttctcctattttttgtaacggccgtcgagaaacaatcgtatagcttctctgcatcactccatgaaaccaaacatattttcatcacatttgtaaagtctttttcagcaattatagtgccattgttgacgggcccttactacagcaaaacgggaaaatcggaatccaaaaaaatattgaatcatgtagtattcttgcaacaaaaaaatttcatatggtgttctacatatattataagttggatatttgcatgtgataaaattcacacaacagatttgtatatttaggttttataaaaaaaagggcgctagattttcaataaagctttgagagtaatattgaatttaactaaatgattaaattgatcttgatatagtgaatacaaggaataataagtgaatacaagtgttttggtactagtgagttcttggtcgagtagagtttttcttcaacaattacaagaagaaggagaaatcagattgaaatgttgaaaaatgatgagaatttataggttccgaatatgaaaggtgaattttgcggcgaactactataatagtctctattctatggaagatgttgatgaaaaggtggaagctttgctgcaagaggattttgcaggtttaccatgggatgagttattgacgcttactaaacctttttctggacatgaagtggaaaagttagggtcgataaggaaaatggttaaattcaaattacaggtccagacagttattagcccatcttttaccatgaatgttggggtactgttgggccttcggtaattcggtttgtattagatttctttgagtctaataacttacgtgatgggatgaatgatgcgttattagttcattgatataccttgaattttatcgagtttggctatgattttggtataattttaagaggctttttgttatttttagaatttttttcaggtttttacacgtttaaaatgtatttgaagattatagagcattttggagaaaaaacaagaagttatgctgcaaaagcaatctgaagaccaaaattggtgtagatgtttatttataacacatgtctagaaacactaaacacgaatatatgtgtatatataacaatgtgttcatgatacatacaaaccataattatcttataatatataatacttgtgtaacaaaacacacatatttgtcctgatggttacatcaagaacataaaattagttacacatgtatatagcaagtaggtccaatttaacaaaaattggttaactgtttttatttttgtaaatgctaaactattgacgtggtttaggagcaggagaaggagaagaggaagaaagaagagaagagaaaagatgatcggctaggatttgattagccgaatcggacggatgaaatgcgtcccagaagacaaagtcttgacggtttttacacatcttggaattgggaagacaaagacctccaacacttgtgtccacattgcaacatgacgtgtttgctatcttaaatcctgcgtttttttgtttgtaaaatagtcaaaacgtaaactaaattgtatatgttttcgacacgttatggtatgttacgatataaagacccgtaacgcaaatgcaattatgcaaagtctgaatattgattagttctctctttttaccgtagtgagtgggattgttgatgagatcgagaacggcgggataagtgtctgcgaaagagaatttagctccggggaggcgtttgttgagatctattaatagcttcttcgttcttgaattgaattccaatacccattcgttgacacggttcaggcacatgcgtgtctttgacttcactctctgtgatgggatacagcccaatgggcctaacccatgaaatattaccttcctcgctcctaatttgtatattgtctgctccagtaaatctcagttatttcatggtttaattaaacaaatagctcaactatagagtaaatgtctttaaccttataattttgtttggtaatagaaaaaatattaagactttttctttatttggtgcaacttttgaaaaataacattatttatttatctaacggatcataaaaattacgatgtgatttattcataacgtatttattttcaaacttacatgcataatgaaaaaaataacatgtgatttgcttatgaggtttttaatctaataaatcgtccactaataaaatgttgagattttactaaataagaaaaatactaatcaagacatgtttaacactaactataatttatttacactatcatttggttatttacgtaaacaaatgaaatttgtagtcatttactaaggattatggaaccatagttataaatttataatacatatctcaaagcgacacaatactaatttacaaaaaaaggatatacatatcaaaaaggttgtttctaaaacccaaaatacttccaccatgattcacacacttgtatagtttcactgtgtctatgcacgtataagagatttaaaccccaaattttccaaagtaggacaaaaagtatagatatataatatattggttgataataatcataataaaaaaaaagagtgaaaacgacctaccaattggttcaacttcactagaataactcacttttgatagtattgattaaacaaaagaaaaaggaaaattagaagttggttggaataccgtaagctgattgtgtagggttgaggtcaagagttcgacaaactcgtcatgtgtatattgctgcccatctgccataaatggctgcaagaaattgtttacataatcgttgcttcctatttattaaaaatgcaagaaaaaaaatgttatcgtaattaataataatttcctacaaaatggaaaaagggaagaaactttagataaaatcaagtaatgtaaattttaatttatacccaaaccaatgaagtacatggcatcatttacatgcttgttcgcagctccatctccgattttcgccctaataacttctttagttttcttgaaacaatttatttgatcattgaaagttagcctttggatctgcatctccatcagaataacacaaatttataatcaatattaaaatacttgaaattttttaaatgtttaagagagtatatagaaaaggaggagtatagtacgaagtaaatgccagtttcattgagaattccagctcctccagatgcgtaatttataccactgagaaatgcatcgtcgttttgtgataacgatagatatggtggtggcgatagaatcccgagcttcgtagctataacaaacaaataaatgtttttggagatgatgtaacaaaatagatacaaatgttcatggaattaagtaccatagtacaaatattaaaaaccataactatagaccaaacaataaaagtcattggatttgaacaaacaaaaccaaactcaaaccttatttctaatatttcatgtgtgtttttttttggacaaaaaatatcatatgtatgtgtcacaaaacacgagcagaaagttgaaacaaaaatgaatcttatatatattagatgtataagtaaaaggagaaagagagaaagataatgcacatatgatatcgccgatagttctaccgttggtgaatcttccggtagctttaccaccggagaaatcaactccataatatggaaagtctgctcttgctagcgaatattgcaagaaattgttgttaccaacttcggttagcgagtcgccgaatatataggttacaagcgacgatgttgatgctggttgtgcggttgcataggtggagatgacgatggctagagccagcctaaggatcatcattgtgttttgtgttgatttcactccttcttgagttacttattctctaatttggacagaatgttatgtaagcgaatgttgaatatatatagtgatgatgaactcatttgtaattatttattgttctactggttatgaccattacagcaagtttctattcatataaaaattaggtggttattttcttatctaataaatctttagatgtttacatatatcttttgattgttctggaaaaatgaaattttctagagaaacatcacggttgggaaaagatggcacatgatacatctactttaggttagactcctaacgttttgagaacaattgtttggagcggtgcacatttctattgtgtactaaaaaccattcggttagacttgtattcagaattcggtattgttaatatagggagtgagcaatttggtttatgattcgggttggttatttttacggtttgacagaaatataaatcatctaaaaccattcgtaattcggtttagtaagaaatttatgtaaatactgattatgattttcaatatataaaagattaaatataagattcaatgaatttttattttgttcgattcagtttagtttgattacaccaaaattggtttcagttcagttttggttacagaatatttcgaattttaagataacgaaacaaacgttttataagaaacgtccacgatgcatttgatgaaaccaatgttgcgttgatccagttatgtttctagtgttaatggtttattctcaactctaagctgcatagatacatagctatatctcacactgtctgtcacacgtatgacgtatctatggtcaaacttaattatatcaaaagagtatttttggtataagaaaatactatgaaaagagtaatttgattacttaataaaaacgtgtatggattcataagaagttggccaactgacgtcataagaagtcaaaatgtagttaggtttatattgtttgattaactcgttatttatttacaacttgctgtaagaaacctagattctttaaaataaagataaaacctaacgatagagtgattagactaattcccaaaaggaaaaaacaaagtagctaggtagtcccttgattggaatcttgccttgtgacttgtgagactaccactagcaacaaaaacagacctgatcaattgtagtcgagcctaattaaaaaaggttcaactgagctctaaaatatgcaagtgggggtgaacgagaaattttcataaattgaatctttcctaaacggcttactcgactcaatggtcagcaacaaataaagaaacgtgacacaacacaaagaggaaatagggttaggggagaaatcatggcaacgcctctagtcgaactgaccatacacaaccattgtttttattccaaattttcaaaattgcactattctcacggttcttattgcgagatcgactatctggttgggtaagacatgacatttacgtatctactaagtattacaatatgcctcttaccatattaaagaagaatccaataaagagtggcatgcattaagaatgtaaacgaagaggaaaacattcattacaagggagattttcgagaatgaaatgtgggctcgcttcagactcacaaattgtgaagattatacaaacttgaagtataaaggagtagtaccaacaagagtttcaaaggattaccaaataagggagtacaaaaataaggaaataccaactagagtttcaagtcctctagaataaatttggggatggaagcaaaatgcattggtcgtcacaactgtagtatggacccatgggctactgcacctctctccaccctatttgggccaggcctagttcttatcccttccaaatattttgatatcttaatcactaatatctatatgaaactttctttgtataaacatttcttggaacgagaagaatccattttaaccggttcctagtttaccaattttacattactagaactgaattttcattattcataaccaacaatgcaatttgtctacacatatcaatttgtcaattttactaatatcagtttatagtaataattatagacaaatcaacaaaacatatttacacaccttaagagtttttataactcattcagacaaaaacaattaattaaaatacccttaaaaatagttaaaaatattttcactttttaaaaaatcaatgggaggggatcaaagattttcacaatttacaagatttgtgtaaactaatactcttcatttttatttgatttttgtaggaaaaaaaatgttttttaaacattaattttttaggttttatatgcagtattattgatgtattttaaacttcaataaaaataattgaatattctttatgatcagatttaatatatattttaaatattttttttttagaaaattaattaaaaataacaaaaggagtaaataaataaaacggaataaagttgggcgtttttttattacaaaacatgggaaaatggacaagttcttcaattcttgctttttgggcttcttgcctgtctctgtctcgaaacacccagaaagagagataatctcgcttatctgtctttatacttagctggtttcttcttcttctttatcccttttggctcttattacaacttttttttttccatgtatttcctcaaattttaatattttttctttactgtatattcatcaaatctcaagttctctaatttcccattcgacctcgaaatttgaccaatttctcttgtctcaaatttcagattctcttcctctgaaaaaaatcaaaaaccaagtcttctaattccatctcctctctgtacccatctcctaaaaatctcaactttgagtcaaaattttgtcttctctcaaaccaattcatagttctaaaaatctcacctttatctcaaatttttaatctttcatctgatttctgaaacccaaattctctaatctcatctttgagccaaaaagtttcaatctttcctctgatttctgaaaccaaaaatctctaatttcaaaaaaaaaaaatctcacctttgggtcaaaaatgtcagtagcttgtggactagaatgtgtcttctgtgtaggattcagtagatgggcatggaaacgatgcacacacgtaggctcagacgatagcgccacgtggacatcagcaacaccggaagaattcgaaccaatcccaagaatcagccgagtaatcctcgccgtctacgaacccgatctcagaaaccctaaaatctcaccttcgttaggaactttcgatctaaaccctgaatgggtcatcaaacgtgtgacacacgaaaaaacccaaggaagatctccaccgtacattatctacatagatcacgaccaccgtgagattgttttagcgattcgtggcttgaacttagctaaagagagtgattacaagattctgttagataacaaattaggtcagaaaatgcttggtggtggttatgtgcatcgtgggttgttgaaatctgcggcttgggttttgaatcaagaatctgagactctttggagagtttgggaagagaatggtagagagtatgatttggtttttgctggtcattctttgggttctggtgttgcggcgttgatggcggttttggttgttaatactccggcgatgattggtgatattccgaggaataaggttcgatgttttgctttggctccggcgagatgtatgtcgcttaatctcgccgttaagtatgctgacgtcatctcctccgtcattttgcaggtaaaaaaatttaaccatgttttaatgatctcaatgttagttaaaagatttttacaaaaattgattttttaacaaagaataatatattagaaatgttaaatcacttgtatttaagttaagggtgttatggtttagttgtttttggggttagagattgatttctgacaactaatttttttggttatgtaaagagttgaatatatttatagttttgatataaaatttggattatatttgtaactgtcttgttggatggtggtggttggttcattgttgaccaagcattgtcataatcctgtttcgtaagttcagaatatgcttttgctttatacaatgaatcgacgaattgaatttttcattttgcttcttgagtttggtcagaatattctgctaaattttgtactagttttggaggttgtttagttgttaagaaaggtatctgtctatagagagaatttttatagagtaaggtattttactaagaattttaacaaaacttagtgtttgtggaataataggatgattttttaccgagaacagcgacaccattagaggatatattcaagtctgtattctggtaagtgtcgaacttcgaaaatgctcttgttggaatgaatttgttataggtatagttcaacattttgtattcgttgttcggacagcttgccgtgcttgttgtttctagtttgtctgagggatacatttataccggaaggtcggaaactaagagatcctagaaggctttatgctcctggtcgaatttatcatatcgttgagcggaaattttgcaggtaataatgaagttagtgtggcatttcttagcaatttttgtttgtttttcctctgattattttttgtatttagatgtggaaggtttcctcccgaagtgagaaccgcgattcccgttgatggtagatttgagcatatagtattatcatcgaatgcaacatcggatcatgcgattctatggatagaaagagaagcagaaaaggcattgcaggtgacatttaatttctgcatttttatgttttagatcaatggttagggctaaggatttaggatttagtttataaggcttaagtaaggttacaggatttaagatttagattttcgacgattttgttaagagtataaaatctttaattgtgttgttgctacaaatttttttactatctttgcacaaaatagtaagggactagttaggcttctttttataaatggtgggttttgtggtgtgtggttacagatattgagagagaagagttcagagacagtggtaacaatggcaccaaaagagaagagaatggagaggttaagtactttagagaaagagcacaaagatgcgttggagagagccgtgagtcttaatatcccacacgcagtgtccaccgcggaagaagaagaagaatgcaacaatggagaagcatccgcggagttgaaaacaaagaagaagaattgggatgaagttgtggacaagcttttccatcgaagcaattcaggagaattcgttctcaacgataacgttgttcctgaaaggtagataggcttgcgtcaggttgatggttgtgattcaatggtgtgtgttttttttttctttaactcagttttgtaaattttctaggctttatggatgtgtgagaatgtctataatccggttaaattggtctgagaaatttttgttcacaatcagactcacttttttcattacaatgtaaaacctaattctctctagacttctgaatttgatgagtaaaaccgatcttaaaacagttcacttggtaactttaaatcactctttatataaaagaaaatttaagacagctagattctaaaaggcttccatttactttacaatcaacatccaacaaaaccaacgaagagcatgaaaaaaagagaagcatgatttcatctgaaactagtttagtaagaacaacacaacacgatttaagaggtgttcatggcatcagcgtgatagctctcaagatctttgtcaagatcagcagctgacttctccactggcttctttccatttcctcttccaccaccacgaccacggccaccattaccacgccctctagcacgaaacccgcctcttcctcctctcatccctcctccctgctggttatgactgccaccaagagaaaacaagtgcaaattaaaacattaaccgaaacaaacgaaaatcaattaactacgaattttgatttattcggtttggttacacaaaaataggaacaaaacttttgtgaccatgcagtttaatatggaatgcagttgacaaatctcagttcggttctccgctaaacgaattaagagaaacagatttatacttacattggaaggcggcgactgacagtaggagctggacctcttcctcctctcccacctctaactcttcctctccctcctcctccttgtctacaagcatcagagaagattgtgtaagtcttggatttagtctcacaacagttattcatgcgattactgagaaaacaaaaagaaaagacagaaattcatactggataacaaccgtcctcttcagccttccattgagtccagtgacattcacattcacacgaccagataaaggagcctcggaagaattgttgccacccaaaatctcaagtctcattggccttccatccaatagcacattgttatatttcttcagagcttgaaatgcatcacttcttcttggatacaccacttcagctgtgccctatagttacatggcacaaaacaaaatccctgttagaaagagcatacaagataaaactttttcaaaatcatgaagagaatgggactgataaagatttgtgaggacttacacttggacgcccatttttgtcataatgaatcgcataacgctctacctccccaatctcagagaagagttcctagatcccatgaagatacattttagtgtctggctcccctctaagaaaccaaatgcacaaattatagaagtctgattatacccttatatcttcatttgtcacaccctggtccagatttgtaacatggagcctggttccaacttcaactcctgatgccccggcagctcttaggccatcttcaaacaaaccgctttgccatggcaagctcctgaccctacggacaggctattcaatagaacagaatcatttcagtacaagatgtctgtcgaacttcaaaaacagcgtcaatgaaaaacaattccaaagaagtgaccacccatatgcctggaagagggaaacccagtcaaagcaaagagctccaccgagtagtcaagaaccacccaatgagaaaaccaaatgaaatggaggaacaatgagtttgaccgactatgctccggttccaaaacaaattctttgtaccaaggctatgatgataaaagaaaaaccgacgctcatagcatgctgaagaaattccaaatgcagcaggacgttcatcaataacttcatgcatgatacagttaagactgtgtaggggttaggagggtaagtcactatatttactacaacaccacacatcttttgaggatttgaaactgtgtgacggaaatgcacaacatgtctaattgtactggaagaacaaattttgatcttcatcttactgaagctcctcaggttctaagtactgtcgcaaaagcaaccaataacttgtctgccaaagtcctcacaattaacaacataaaccacaaagtacactgaaactgcaggggtaagaggcattcctaaatgaaaacatctccatgaactagaaagaagcatgttcctaggcgatgttctcaatgctaaagaatgtcaaactatcatcagaagtaaggctttccgcatggacaggaaaacctgcttctcccatcgtttagatatagtatgatgaagtaaatgcttcacagaaactcagatttccaaatcatacacatagaagatcccagattttgagcttgccttgttaatggtgaaagatgatggacgagcattcacagcaagaggacctcttctagcaggtccagctcctcttccaccaccaccacgtccacgaccacgcccacgagaaatccctcttcccccagaccttgcagttttacccctcttaacaatctcatcaagagtcatattcaatgctccagacatcttaacttcaatagtcttatgaaacacagtaacaagactcaatctgaaacctgcataaattagagaaggagtgtttagttaccaccaaaaacatgaacaagaaaaacatatcataatcataaaactggcttatcttctaactcaaacaagcactagcttaatgacccaaacaataaatttcaatcaaaattgcaattttagagctacccagtgtagaaaaacacaaaggctcatgagaaacaaatcaatccaatcagattgagagctaatcagataaaccctagatcacttacgagggaaatctatagttctcaaatcaaacataacatcgattgaaaccctagatctatatcctatattaacctagtcatagttattgaaacgaaaactaataattgcgtgcaagcagatgagaatagaacgaaattaatcaagtaagatggttcaagagcacgaatggttcgcaagaagatagaagaagaagaagaagaaattaccagaagaagagatgagaatccgaacgagagagagattgaagaagatggagagactgtgtttagggttttgaggagctttgatgagttttgtgttcgttgattttttagatcagacagaatttagcagagaagggatggaggaagaaaatatggggtttaagtctagggtaaggacaatttcgtaattatagaacacttagaaggttattttcgtctctatcgaaatttcgaaattcaaatagaatttgattgccaatttacgatgtactagagaccattgttttgaaatgaatattttgcaaacgactttactagtatacactagaatttaacccgcgggcaatcgcgggcaatcggtagatttggtttttatactaaatatttgaataaatttgatattttaaatttataaatataaatatctagtgattagtgaagaatcgtaatatatgatttggatattatcgattattgattttgtgattgagtatagtgttttagggatggaatgtgatcatattttgatttcaaaaacgacataaattctttattttgttaaacggtttagattgaagggaattaattttattgaacggtttagattgaatcggatcatataaagtttaggagattgttaataccaaattactcttaatgattttgaatagcaaagaacaaaatccaaaattgaaatcaaaattgaagccaaatttagacaaaatttcaatttgtacttcccttttaataatgtagggataaattcgaagatatggtccatagatcaacttttcttgcaaaaacttagaatgtctctagtacatggtaaattggcagtcaaattctatttgaatttcataattagtatagagacgaaaatatatagagatctttagaatataatcatgaaaactacattctaaagatctttttaaaaaatatttgtgattttctcctaatttttatgttaaattttaaaataaaataattctagttaaaaatgacatttaaaatttttagacgccataaaataaaaaattttaaaaaataaattttatccaaaattataaaattaatatcatataatctaaaaaattaatagttaattaagatggtaaggataaaattagaattttatttttgtggtgagatcgtgagtattaaattgtacagttttataacttcgtgtaattttcttccaactaaaaacaattgagtattaaacgtccaaataaaaattagttagagtttttttcaagatttttcccattcaaaattatgaaattcaaatagaatttgattgccattttaccatgtacaacttagagacatttgttttgaattgaatattttgcaaacgactttactagtattcatatattcgaagataccgtccattagttgttcttaatcttagtcaagtaagttcatggatcaagttttcttgcaaaatgtctctagtacatggtaaattggcggtcaaattctgtttagatttagatttagatttcagaactagtataaaccaaaatgtatagagatctttagaatgtagtttttcaaatattttgtataatcccatcattgtccacaattgaattgtaaagtatatctcgaaaggctgtcgaccaatgcattttgcttccatcccaaatttattctagaagactagaacctttgaaactctcgttggtattcctttattttggtaatcctttgaaactcttgttggtactcctctatacaataagcgttcccatcaccgaatgatctatagtccatttgacttgtagagttaggtttgtgattgtaaggaatatatcctaataaaaaccgaagaagatgagtagttttccatccatggcctatccgagctctactctctcttataccttcgactttctccagtggccgtggctctttcttgcacatcaagaaatttgttacatccattgaacctatcttctcttgtggatgcaaagctaacaccaaaaatgtaaacagtcaaatcaaattacgctcaatgagtactttatacaatattttgtacacacaaggttaaggatgcaaattgttttggtgattttctgttttagccatgtaaatcttgaaccgatctcaagactaatctagaattcacggactccgagagaacaagcaagagtggagtagaatactgttgaatccggcattaatggagtagaaaatgaagttgtcgacatcaaaccctagaaccgggatcctgccttgacgagcataggctttcaaagttgtgttaatagcacttgaaacttcatcgtcttcgttggccaaaaaccttataggaccaacacttccaagaacattcacactcaccaataactttttattcttccttttcatcactccttttacattctcatttctattcatcctttttctttgtatagaccattaaagaagaatgaaacttacttgcttactgcttccgttttatagatgcataaattaaaggaagagaagacaacatgaaaggtaagtgttaggagttccatccattgagactatatgagaataaccctataatatatatgcttacatgcatatataagtctcgacacaataggttagagagattttctatcaaggctacgaattttagttttgtggggttattgataatcatagatatgttaagaaccactaaagcgggtctaaatttgttaataaattaatggttattggtcactagtaagtttagtgtacgatagaaaatttggaggatctaatgctattagagcttgttggctcaaatgaagaagctaagcatatcacctatggtggagagatgtgtggaatctcttctgaaactattccaccactaaaacctttttatattatttacaactaatgtgcataaatcataatggagactttagtgaacgaataggtcaacatatttattctcccatgcaaaagatcaataatagcaactagaatttagaaaatagtaaaacatatataagctatgtttcactaacatatataaacgtggattaattaaaagtatatagccaaactatgggtggaaataatgcaaatcactatggatacagtactcattgaaattttgaacaagagtggtgaaaaaggatgtaatgtcatttttagggtcaaactacttgaaaaagatggatattatattgtatatttccttacctttgaggataggcttccttatttatatgcaaagatcatggatagtaaccaagtgttgtttgatccagtggtgatgcatggtccctccaaaagattgatgctttactctctatttttctttggactttttccaatggtcttggctctttcatgcacaacaaggaattcgttacatccattgatcctatcttctcttgtgtgtattcaattctaacaccaaaaaaatgataaacaaatatcaaattactttcgatttagaattttataccaaaatttgtacacacaacgttaaacaactaatgcgattttttataagcgggtcaagattaatctagaatttaggtgattctaagagaacaaactaaatagtggtggatggaaaatactactgaatccggcgttaatggaatagaaattgaggttatccacttcgaaccctagaaccgggatcctcccttgacgagcataggctttcaaggttgtgttaataacacttgaaacttcatcgtcttcattggccaaaaaccttatagggccaacacttccaagaacattcacactcaccaacaattttttattctcccctttcatcactctttatatatcttcatatatatatatatatatattagtcttctatgcatacatcagtaaagaagcatggatttcatatacttattgctttcgttttataagagcacaaaggaagagatatagagatagaaagagaccatgaaaggtaattgttaggagtttccatccatattgaaactctattgagaagaatctataatatccttaattacattcatattataagtcccgaaacatcaagagcacaaattatttatcgatggggttattcatagatatgtgaaaaaccactttttgttataaaaatgatggttattgatcaatgatcactaatttgtttattgcatatttgtacgtacgtttaagtttttttctttatgaatctaatgctattggcttgttggctcaaatgtggatgcatcaactatggtgagaaagagagatgagtggaatcttttctgaaagttttccaccataaaaacattgttttatatatatttctacaactaaggtcattgagactttagtgaaaaattggtcagcatatttattctcccatgcaaatatcaataatggcaactacactttaattagataatggtgatccataagctacaaggtttcactattatatataaatatggagtaattaggtgtatagccaaatcatgagtggaaattacgcaaatcactatggttccttagcctcattttctctttagaaaatggctataatataatatactcctcacaaggaggatttagtcgggaatttcaatgcatcattaggtgaagtacaactaaaagtgaggtgagacatatgacacaggaaatgtagtacgaacctaatacagaaaattatttatttggaaaacggtaagccggtaatacgagacaagttagttcggtgtacatatcaaattaattgaggtgcacgatatctataattaatgcaggatagttacagcgagtttacatctattttattatactactaaattttgaatattttgttcaaaaaggtgcgaaataaaaataattatgccaagttgataaaattatgattgctatgttctgaatgatgaaataagcattatgagaaattggtagaacgtgttactttacaatattacatgtgttttgctatagagactatagtaacatggtcttttttaaaatgtcaataaattcaacctgaaccaccgaatatggaaggctcgccggacgagaagagaaaaaaatattgtcggatactgccggagcccaacttgtaaggttgaatttactggaaacaaaaacgttgtagggtcgaggaaagctaagagagtgacgactataggtaggtatctattgtttgtagttttagacttttattaggattttacagatgactacacttcaaaattatgaatttaaatttcgatggtttacacaaaaagttatttatctgatccgagaaaaaaaaacagaacaaaatccttttttccagtaaatctaaaaagatgactactattttcagtattttagtgaaagaaatttatatcactttttttttttataaacgatattgactgatctgatcaactctgataaaaatgtattaaaatgattcagtctccccaaaaaatcaacataatccgtgtctcaagttttcaaatgtgttacgagtaatatcttggatcatcaaatcgcctattactaattaccaaatgaattgtttgcgtatttggtcgaaactcatacttttcatacaaatatgttttttttttgtttcttaggtggattgaacatgtattagttcctttcaacatttcttcaattctcaaccactagtagaccacaaatgtgtaggcactttttaaacttaaaattgatctatttttgttgagccttttgtacatatgggcatattttgacataaaaactagaatagaagtatattctacttggacttataagcttgggtactgtttggtccgcaaaatgacgatttcgccttcaaatttgttgatgataatccaattcgttttttccgtcatgagaccaacaaccctcaccgtctccatcgactgcaattctctccgtcgtgataatcaaatttgtttattaacaccgactctacattccatcaaaatcattattttcgactccatcaatatcgtttccttatgcttcgatgattcacacaacgtttatacgaccaacctttttcgatgaatccaatagaactaattaaacaagttttgatgtaagatatctaagctctaagagatgatgttatagaacccaaattctctaattatagatgcggatcgaatcatcttaaccgtaaaagataatgtctaaagaactcagaacaatcatgtatgcaataactgaaaagtatatgattgtgaatcatgagcaaatcttaagtcattttcgtcaaaattatatctcaagacccaattaaaattttaaagaagaaaaaataataaaggcaaattaatattttagaaaaaacaaaaatatccgtctttataatcactcgagaatatggctaaattcataatagaccatactttattatggtttttctataattaatcctaattttattagttgcatgaaattttggaaatcttataaaatacaataacttttggtccataatatattgtaatattgtgtatagttttttagtcaatgattgtttctaattatactgatttattaccaatttacactgccacttttggttagttgcatgaaaattttggaaggctagaaaaaataaattttcgcgcaacaaaatcatactcctttgtttatagttatggtgatggaaatcaaatacgtaccagacctttgtttatagttaaggaaaaaagaattaaagtcttcaaactctaatttgctggtcaaatccaaatttggcgtgacatgtgcccgtaattaaaaattaattgcgtaattaaatactaactttctaattagctgcatcatcgagacgaataattgagtgtattggtcaattgaatacgacaaaaattatttaaatagtcggtaaaatacccatagaaattgactaatccgtcacctcccccggataatacagttttaacatttggttttctaattcaaactaacatttaaattccctaaaaacctttacacgacctattgccatctaatccaaaactaaaagtactagttttttttttctcaactcaattataataaataagaggaaaaaacaccaaacaacaaaacaaaaacatatcatataaaaaatcataaatttttaagaggcaaagtaggtcagaattcttattaaaaaaaaaattaaccagctaatgaattaacataacactctctaaaaacgagtaagacaaatttggacaatacaatattttaaattaaaagaaaaagaaacaaatgattgtaagaatttgtaactttagaaaaatatagtacaacatcttcaacctccacaatttaataaaaaggatgaagcatatgatttagaaaaattattaaaattagttagaatctcttcggtttctcaacgtttgttttgtattttttgtgttcctctattattatttttgtattgttcacttaatttcttgttttccaataatctattttgttttacatgtctttttagaaatggtaaacaattaaagtaaaaaagagacagaggtggctcgaggcagaaaagtctacaatatatccatcctcggaaaaataaagaagataaaatcagttccgtatctatataagaaaatagacaaaagtcacaaaacctcatcagagctgtccgaattctccaagtctctcatcatcacacccactccaacaaactttctacgagagaaaaaaacaaaaagaaaaacaaacaatggagaatcttgtaggtcttcttcgaattcatgtgaaaagaggtgtgaatctcgccattagagacatctcaagcagtgatccttacatcgtcgttcactgcggtaaacaggtaccaaaaatttattctcttccattttagccaattctgttttgcatcttagaataaatctggttatgcatctagtagaatctgatgcgtttattgaactgttggtcggtagtaaaacttttattataaaagagataagattattgatgagtctatgtagtgaaactcaatgaggtcttttataatttgacagtggattattgattctttttgtagatctcaaaactaactagaaatttgattaaaaatttggttatcaataatggattggaggcagtttttgagggttgacatcacatatttagttatacctaatctttacaagctaaatgtgaagtctctgacttttgatttggtatatgtctgaatagtactagttatgagttgtcttaacctaatccaaattaataaccagttaataccttctctgaatagagtttgagttatatagtttataatttgcatacatgtaaatgaagaagtagacttttgcttcgtttcatattagtgggtcctttgcacatgagatctttatgaacattggaatattggtgaaaagccattgattttttgatgtcaacatcaatctcttctggttccaccacgaaatatttgtaacttgtgttgtcgccttttgacttaccttaagatcaatcaaaagcatttgctagttcttgaatcttttgtttgtgattgtgatacagaagttgaaaacacgcgtggtgaaacatagtgtaaaccccgagtggaacgacgacttgacactttccgtgactgatccgaatctcccgattaaacttgtaagtaatccttacattatattgtagcatgatagctgaaccagaatgataagcggtgggaattatgatgcagacggtttatgactatgacttgctctccgcggatgacaagatgggagaagccgagttccacattggtccatttattgaagctattaaatttgcccatcagctcggaccaggacttcctaatgggaccataataaagaagatagagccgagcagaaaaaattgtttgtctgaatcaagccacattgtgttgaaccaaggcaagattgtccagaatatgttccttagactccagcacgtggagtgtggagaggttgagctacagctcgagtggatcgatgtcccgggttcaaggggtatttaggtcaaatcatatcgatccgatctttattagtcccttgtgcatatggttagaaactagaactatggtgcagtttaaaactggtcaatgaaagaatctcaaactggcttgtgtaataaactcatttcgttttttttttctcttgtttgattccaaaaagtttgcaattccatgaggagtaagtgtaaacatttggatatctacataaatatcctgtcttattagcgtgaattgtgtagactcaatgatctttcgcctcttctttgtgaactattagggattctgatagttccaattatgagcttaggaacaattgacacaaatgtctgtttagctattaattattatttttctgcttatggttacatatatcagaaaaccttaaaagaagataaacaccaaatcgtaaatcctaatctcaacaagatttagtaatatcatgttaagctaaattcataaaaccaaaaccataaaacataacttgtatttgccgatcatgagtccatcagattcttagaaagatagatggaaaacagaggaataaagcttgatgaagaattggtgaaatgatcaacgttttcattattccataacaaatttcatctacaatgtttatgtacagatttaattagcttgaccgagtctaactaaatgttaaacatgctaacaaaaacttaacaaattagtatacacaatatgagtttgagtttgactatttcggagaaatcgaaagagtaaaatcgattaaaccttagattgttttcccccaattcgattgtgttttattaatctgaaaacaaaaacgtggaagccttctatatttcaatgtttagaatgtcccgatgaagtttgtcggacgaaatggttaagtactccaatttttcgggcagaggacgcgggttcgaaacccagattttgcaaaaaaaattgcatttacatttcaacgatgtaaacgatgtcgttttagacatgtcatatttgacgtgtttgctgactctcttgacggtgttgactaacttccgtcaatttgaaaattatatatatgaaagttgatcaactctctccatataattgtcacatcatcactttagcatttgccatgtgtctattaaataattaatgtaatgtactattaattataggttaataatacatttattatttaattttatatcttattttattttatatattattttattttacatatttaatgtactattactaaatttattttaatattacatgatttttcaataaaaccattttaatagtggttttatactcgaagattttttttgtaatccaaacttaaagtatgagtatataaaaatcgtggattagttaatgatttgagtaggttattctcttaaattgatatttatataataaatcaccgagggtgcagaatacgtaaggaactccatcatcaaattcttatgattctagaatcgaagattatcctctgttaaattggtttaagatgaacgttgtttatgaattatgaatatgatgaaatattgagaatgttgttagaaaagatatattttaatactaaaaataatttcttattgcatgagtgaatgattagataaataaaaattatttaaattaaacaatataaaaagtatctaaaaaatctatagattactacactcacctagtaatctataaatttgtctgggtatgaaaatacactcagaatataataccggtatgaaaatatccttttcccttgactactatgtcacatttgttatagtttaattataagaagaaaaaaattgtttgagctttagggcaggccatagtgttgggccgtacctgctaagttttcgtaggagaaattgacataaaccgactttgtttgtagaaaggtttttggtttttaatctctaggactatttagaaaaaagtctctggtgctcaacaatgtcttttaagacaatgatctggtgctcaataatgtcttttaagacaataatattaaatcaatttgtgttttgttttgttttgtttttccaaagtttatgaaaaaaagttgtagagtcaatttttctgtttttaaagacacccataatttaagtgtatattactggaaggagaaaagttaataaaaaagtttgtggagtttttaaaataaaattgtatttaatttatagttaatgtcaccttttaatttatgcaacgagttaacaatttttttttagagagaatatcattaaacttaacaatattttattacaaaatcaacaattttaatagttgtttccttttataaaaaaacaaaaatcattataaacaacaaatatagccaccgacctaatattttcccctttagctccttagaaaaggaaatcaatcaatcttctataaattagggttacagtgggtctccatcaaaatcagagatttttcactttgacttgagagaatttgcgaagtttctttttcacggtttcgttctttacacagagttgctgcaaatctgttttcgttttctgatctctgaacaatccaatggactcttttgttaccgtagagaataaacctctcccaaccgatatggaatttacgatggaagaagcaacgcagattgtagagaagaaactttcggagaaagattacgttggtgcgatgaaattcattaatttgtttccaaatcttgatggtcgttggaatacgatgatcgatgtttatatttgtggatcaaacgtaggagaatctgattggtatggagttttaggtgtagatcctttatctgatgatgaaacagtaaagaaacattacaagcagttggctcttttacttcatccggacaagaacaagtgttatggcgctgaaggagcgtttaagttggtgtcagaagcttggtgtttgttatctgataaggttcagagaagttcttatgatcaaagaaggaagaattcgaaacaaggaaagtctagtaaacctaaagctacagattcatcaaaacagaggaaaagcagaacgttttggacaatgtgcagaagctgcaagaccaaaggtgaatttctgaggcattggaatcttaacaaggctatactttgtcctaattgtcgtcagattttcattgcaaccgagataactacaaaagaacctaacaaaaccaccaaaaaagcttctcatcaacagcaacaatggagtgtccaggataaagcaccaaaaacgagtcttcctcgccatctgttacttttacctggaaacgttcatcagtttcattaaaggctaggtctaattgtggaagttcagcaaatcaaagtaccaaaagagggcttgacgcacaagaaacggttgctcctgcagagaagattctcaagaggcagaggacaactgtgaactaagaagtacgagtcatatgacatttagaatttgcatattcctgcttttaaacctttcatgttttctttaggatatgttattaatcttttttcagttttagactaaaattgtactgtagaacaagagcgggttctcctttcaacgtcaatgtgtagtgtcctaagtcctaacttctctttaaacattgtatgtcttgttgttagttgattttataacattttttacagcaacaataaaacattatcttcctcacaagtcacttgtcaagttattagttgattttataacagtttttacagcaatcaaaataactatatagcaatcaaaataactaataaagattctaatgtgtcacttgaaaccatccctggaacagatggtgaagacctgtttgatcaattttacgtctgctttgacatcatcagaagatcatggaaggagacatatcgccccactcataggagtagatggtattttcctcaaatgcacactcaaaggtcagttacttgctgctataggtagagatgcatgtaccaaaatgtattaaatagcatgaggatatagtacaagtggagaatgagaagaaatggttatggtttatccaaatggtgaagtctgattttgatcttaaagatagagatgggtttatcataacctcagatcgaccaaaggtatgtttttgtgtggatgttcttgttcgtatattatgattttagtcttaatgtgatgttactggttaccaaatttcagagcataggaaatgtgttagacacatttatggcaaattgaaagcaaatcatggaaaacaaaatggagatgaaaccacttatctggaaaacttggcttggagccacactgaaacacaatatgagaagaacatatccttttttctaagttgtttccaatacaaaagaatattctgagctaattattttttctaagttgtttccaatggagattgctgagaggaaactctcggagaatgattacaatggagcgaagaaattcattaacaaggctcagaatttgtatccaaaacttgatggtttaaagacaagtgttgatgatgatcaatgtttatctctttgcatcaaacggagaagaaaaagctgattggtatggaattctttatgtagaccctttagctatgatgaagcagtgaagaaacaatacaagaagttagctcttttgcttcatccggacaagtacaaccttaatggcgcggaaggcgcctttaagccagttacagaagcttggtgtatgttatctgataaggttaagagaacttcttatgatcaaaggaggatctcgaaagaagcaaagaccgagattcagaaacaaccaaacccacaaaatattggggcaagaagtaataagctt

SEQ ID NO: 783 - DNA, 64827 bp, Arabidopsis thaliana
aagcttgctcgttggataatgaaactactaaatctgcacaagctagcatcttctactgggaataaaaatgctagagacgatactcattggagaatgtgtaatagatgcgatgccaatatgccatattttgtctttataaggacataatttgtccacgttgtggtcaaccttttgattgcaatataagaaaactccattggaaaaagccaaaaacacaagtggtggtacttattcaaagagagattctttatcatctgttagttccactgagttgttgtaattaaggtgtaggtataatagtggaagactctggaagtgccgcaaatcaaggactcgaggagtcacaagaaatggtttatggttctgcaaagacaaattagcacatgtagattaatctatagagtgaattgtatagtgctcaacgctataatgggcctcctaaaaaccagctcggcccataacaggaatcatgcataagggaaaaattcacatttgtctaacggtaccactagttgggaagattagtaataatcattacgaaaatttatttgttcttgtgatgaatgaaactatatatatattcattatagaaaaaaattcgattagctgttaaatcagtaattaattcagaatattaaagactaataacactcaacaaagcatattaattataaaaagagcagaagatatagaaacaaccgttaaaatcaatattcatcaatcaccacatacttctagggtttttaatcgccgtcactaaaattaatctgctaatacgaatcatcaccgtcgactaatctaatctccggcgaaatcttccaaatcctcaagcaccaccaccattactcatcatcttcttaaactcatcaaaattaacacaaccatcaccatcaatatcaactttactaatcatcttcttacaatcttgcacagagcacttctcacccaaattcttcatcactgaatgaagctctttcgccgagatccttccattaccatccaaatcatataactcaaacgcttctttcaaatcgcttacgtcgtttcgattgttacctcctcctccgattccgatttggaaaagcgcgacgaattcgtccagatctatgaatccgttaccgtctagatcgaattgtttcatcatcgttactgtttcttctggtgatgctgttggtgagagagcgcggatcacttctttgagctcgtcgacggagattttcccgtcgccgtttttgtcgaatcgttggaagacttttttgatgtcgtccattgatcctaaacagctacgaacaactccgttcttcgatgacattgttgaagaaattgagattttgagatttgagagaagaaaaaaaacggttagagtagtgtgtgtgtgaagaagaaggatttggttataaataagggaaagagagagggtgacgtaataacgcgtttttttaattaaaacgcgttgagattgcgtgagctggtggcatctttattaattctaaatttatttactttccaaagatttatttactttacatattttatgcttccaaaatgtttatttaccaataataaaaagaaaaatgtctttgattaaagataggacaagttgctataataaatttctgtatatagctatatatatatatatatatatatattttttgggtaaactttcattcataaattcaagtaattttataagactaagtggataacattggtttctaatttataagaaattatgatgagtttaattaaattatagaaagtaaataaatgaaagattttaaattattgctagagactttttttataatcttgatgattagttattcataatcttgtaaagtttctcaaatgctctctctattttgataatattttttatgatttctatgactttattttgtggaaaaaatgttgaaatcatgaaccaattacataataataaaatttattaaaattcagagatttttttgttttaattaaaataacataaattttttactaactttataaaagtatgaatccaacaatcccaaatagccgatgatttgagaagttcatcattaatattattcgatccttcaaaatcacacacctaaacaaattggatcaatattatgttggatttatttatatatattatttataataaaaaataatataacaaatctatatattatatttgacatacatgtatatgtatattgatatgtgcacatggaataagaggcaaatatgatttctctctacgaataagaaatgaagtgattgagctcaagcccattactaaacctaagtatgttaggttaaacgtattagctatatataatgatatataataacgtttgacatatagccttgagcagccgaaccctaaacataaaagacgaacttgtcgttatgttttgagatttaatctctgcagtactagcattctgtttgactaagtctatatgtatgtggatatcagtagaggcacacatttggaaaggtttacaacctcggttccttcatctttccgctgcaaaatagctaagtatattcataatcttatgatatcgatttaattaaatatttacactgacaattaaatttgtgattcgttttataaatctgttataaattggtataaattcttacaattaattttatgataatatttacattaacaattaaaatttgtgattagttttataaatcagttataaaccggtactaattcctacaatcttagcctatcaaatagtcattttagattattttttttatatataaatagcgacaaaaagaaaactaatattatgtttttttttcattctaattttctattttatatataatacttaaaagcacagtaaatcttcttttcttacttgtttatagtgtgtgcaaatcattgttcgtaccttttgaaatgtgtagatgaaaaattatgaagactaggtgagtgcccgcgctacgcgcgggattttgttgttgtttttttaaaaaaaaagttttataatatatttagtttatcatacttttttagaattgttattttataagagagattgtattatgaaggagtaaaactatatatttcatattgtttgttaatttttactcataggtagaagatttgagtgtgttgatgaaaccgcatagtccggtgctgtttgaatagtaaatgacaaaattacatatatatatatatatatatatgtatatatttttgtttgtatttgaactgtaccgtacttaatccatagtttaaccagttctctttattctaagcctaatttataggtgcattatatatactttttgtttggtattggtaagttgtaaaacattacagaagagcattattttagcttactcgtgcatattttaataaatttgattttgtttttaacatttgttttgttctcctcttttgttattttgtaaaattgtattttaaaataactattgtttttcaaatgtttgctatttaatttgttcgtattttgatttcttccccatatatatagttttattgatggatggttaacaattttaacaatattttgaaactactatatgcaatgataggtaatataagagttagattttattataattaaaaattccttgcaacagaggacaaacatgaaaggaaaaaataaagtacatattaataaattagttttacttaggtattgaagcttgtattacagaatctaggagaagaagatctagactcattagctctccgtttcttttgaaattgcgagcttcccacattctcaagaggcggacagttatatgttgcatagatgatccgattgtaagcttgtctacagcgatggattgaagaggtgctactgtagttgttgattgtgttgttgccataatgatcgtacgtgattttgatctttgaatctgacaaatgaaagatatgatattagtttattcttatttaccattagttgttgtcgttaataagttgaagtttatgattccaaaaaaataaagtaaaagttattgagaagagagacttacttttctagatactcttacggtggttacaaagattaaactattttggtagtgaatatgtgtcatatatatataaagataaatatttacattatgtaatattctagttggaatgattagaagtttgaaagagtatttatttttcttaaatggatattattgtttagaaatgggtatatacgttattctgattgggaatttttgtagggttttttaaacgtctagattataaatgagttagttaagttataatcgtgcgtatttgatttattgtggatttatttactcatttttaataccacatgatgggttgtaagtttctaaacattcatactttaaaagcatcttcaatggtagtttttaatcctaagtctcttaaaaaaaataaagtgtaagtataaataaataatatttttaattatgggtttcttaaatttggtgaaagtaagacaaattatctcttaactaagagacaattggcctatatttcatcaaatttaagagactcatgtaatatttaaatcatatatattttttattatttattaaaaaacatttttagaaacccccattgaaggtgttctaaggctctggagcgtccattcttccgctaataacttgaataaagtaatacagttattaattctaaatgaggtaaattttgttcctaaataaacatgacatactgatcgaatatatattttatatataatttgtgttacactccatactaacaaaacaatacattttcttttaattgtggatacaatgtgtttgagtttttttttggtctttttttataattacttctgatattacaatactaacaggtaactttttagttatgacgtaagataattgtttgtttttaagaacttatatcaaatggcgtaatttttttgacaatagtatagtgcatagttgttcccacattaacttaatttttttatagtttaaatatgagttgtaatgtgtgtggataatgcaagtataaattactgtgacgccacgaaggctattgtattaccagtgcaacatagtgaaggaatgatgaaagaatactattgtatttatttttgtaagatcattccttcttggaaaatactattgtatttttcaacaagtgatgaaggaatgaagcaacgaattaaggaattctgtttagaaagatgagaagatagatatatgatgagtgtgatatgagatttatgttagaaaaataaattgatatgttagtcattggacaattataccttctcatctagcaggaagagtgagttttcaaggaatacatcacggtcgttggcagaacgtatttccggtatgaacttcccacattctaacaatacggccaattctgttaccacaacattcgaatttttctaatacatgttgagaaaaatattatgaaaacattatggtaatataccgtaaaaattcccaaaaatgtactcatcatattctctacccaaatgcctaaaaaaataaaagaagatatattaaattaaaaaatatagaaagagtgatggttgaagttctgacttatgataggttcatatgttgaattaattactaattatgtattacttattttaagaagtgtaggtggcaacctctcctttcatgtgctgatgtgtaatattgtgggagagagttgagctcctgtcatatatatgatttctcacactttttgggaaataatgtcttaatataaatttaaatagatcgaatacttaattatatagtctaagtataaataacaagttactaaaaatatgaatgtattgttcaaaatcttaatttaaaacttgtcttgaaatttactacttcacgacaatttatggtggccaatggcataataccaacctcgtgtttttacatgtgtcattttcctattagtccaacatcaattttcaacttggtatccaaataaataatacactaaagcactttatactaaaactaattgacaaaagaaaagcactttatacttaaaactaaattttcagcgacctctgtttgtcgtatgaaaattaaaagtttgattagacacaaatttggaagtgattgcccgcgaatcattttctttgtggctaacgtacacacgtatagagacgtacagttcagacgagtggctcaaatgattaaaacagtaaatcagaaagagaacattttaatataactataattttaactagtacttaattttttcagcttaaagccatatttttcatctctatttcttatcttcttctttttttgtaaaaccaaaaaagcaacaaaatgtgggtaaaaagtaaaaacccaacccatcggtttcaatccaacttacttgattttccattacacacaaaagtcacaaaccagaaaatcaaaagaacgaaaaacaaattatgtctgtttaaaagcatatctccaccaatcatgcaaatgtttttggttaaactcctagaagcataaaaaggtcatcatcatcatcatcatcacctttatcaaatcacttagccatcataatcttgacaaactcttcatagttaatctgaccatctccatcaacatcagcctcacggatcatctcttccacttcttcatcagttagcttctcaccaagattggtcatcacatggcgtagctcagcagcggagatgaaaccgttctggtctttgtcgaaaaccctgaaggcttcttttagctcttcctcggagtcagtgtctttcatcttcttagccatcaggttcaggaactcggggaagtcgatagtgccgtttccatctgcatcaacctcgttgatcatgtcttggagctcagcctctgttgggttttgtcctagtgaacgcataactgttcccagctcttttgttgtgatgcaacctgtgtaaccacaattaagagagcattacattttagaacccatcacatattatactcaaatgctcaatggaagcaatgataaagcagttttgtcatgggtaaaagcaatgatagatgcaaaagcgaatgaacatcttttgcttatctcttaaagagtgaacaaacaaatctacacaaattgagctactataagcaggatataaccatgagacaattcaggagtagtttccaaacaatttgataatcttttgaaatcaaatcctagatcagagagaacaaacactacatcaactagtataacaaacaactcagaaatcaagagaaaatctgagcaacatgaccttgaaacctacctagagagatcaagaagaaccatcaaagcttctaaaagattcgaaatcacatttaagcacatagttttttcccattctttggtagaattgttgagaacacaaaaaaaaactcagataattaacaacttcgaagaaaaaaagatagcagattctttatcaactaagagcaaactcgaaaacacatacgaccaaaacaatcatggaagatgaaaaatcaaacaaaacgtaagagacgaaaaaataaatcagatccaagctagcaaatcaacgaaacaggacaacaagcaagctattaaatcgattcaatcatatacaaaaagccatcgaagatcaaaaagcgaaactactcggtcaaagatcaaaaacagatcaaacgacaaggtcaatacctccgaatctaaagagattagcgactaataaacacatattcaaagctcgggaggacgagatacaccgttctaaatcatcgatagaagacgaaaatggaaaaaaaaccgagatccagtaatgtaaccatcaaaggcgtaaaagaagaggtaatctaaccatcgccatctttgtcgaagaggctaaaagcttccttgaattcggagatctgttcgtcagtgagttgatccgccatagcttcttcgagaaatcgtctttcttctcttcctttgtctttacttaatgagttttttttttttttggattcagagtcgtctctctttgaaaatgatgcaaacaaatatctaagcaaaacgacaaaaagaaggagaaaaggtaagtcggaaaaattccaaacaaaaacccaattaatttttaatttttagaagaaaatacatatattaataaaagtgtataatttaataccaaaataattaaaatattattacttttatatttactactttaataaactatgaatttttcgttgatatgacattaattttatttattttttaaaaattacttttagtaatattttgtttctatattataaaaattattttatttttaaaattcacataaataaaatgagcaaaagaaatcttaataaattttgaaaaagataatgatattgtgaaccgaaatattaataaaaagttagctgatgttgatatacacaatgtaacttagttgaggtataaaaacgtaccgttgagaggttgaacttcacttttttccggaagatgaatattcggattattttaactacaacataaaccactttctacaagcgctctcacgcctttggctcacacgattgttttctaacatcatttggctcacgaaatatgcttcacaaagtttacttgtgatgatccatcacagcagacagcagtcgagcgttaagagaaagattgcatgtcgtacatgtacatcatgtattcatgtgtgaaagatgccaacagtggtcgaaacacaattatcatcagaaaaatattactcgagcaacaatacttttctatctacgagtatgtgctgctcactctccataatatggagctaatattgatcataaggcttgagcgaatcacctatcaccaatacctaagattaggtgataatcttaattaagctatttgtctttgggccagttctacacgtatttgggtcactacaaaagtttgaatagcttgaaatccttaataccatggaaaatgaggtttcttttcttcttcgcactaccatctcttcggcatatctaaaagatacctcgtaggctcgtatacaactctaagaccaaatttaataaattgttggacaaaccttattctaatttttgggtaacacgattggaatcaacaaaaccctattcttgattgtcgaaacttacgtacttaattaatgtaagaaagaaaaaaaatatccaagttcatataggttacaaagaaaataaaaaaattccaacacaaataaaaattaaatttttaaaattcataataaaaaaaataaatttcaaaactaaaactagataaaaataaaacaaaaccaaggaagagagtaataagcttaaagagacacaacacaatcccaacgaggaagctcttgacaaggtcaaaggaacattccacccatacatgaacacatgctgacggagatctcgagcatattttatctgcgagaagtagattccgtcttccctagcttcccatacgtctccatggttaacaccaaaaacttggtgatgcttgaaattaggtccttgccataaatgacaccaaaaatagtcggaatcatcatcaactagcagatggtacgatcctgttggatgcaacctatggtataccatatcatggttcgtggatttgcaatggattatgagatcgtttttttcatgaagaaagtttctgatccacacggaatgtttgtacgataaggctgtgttactcatcatggtaagaccaaaggcgaaaacaaaaaggagaatcgatagacgattcattgatatcatctctatatgttgaactaatggtcgatcgatttaatttgaagtgatagaatgtttagaaggtttagtttgttctgtctatatataatgaaaatactagtcatagtcctgataggtttaggaaacacaaattcaacaacaataacaattaggacttgagcgattgcaatttttaatacttcctatattatttaagtcaatttcaaatacgtggtcacaaaaggtaatcaaataaataacaattccaaccctcattttaatggatttctcaaaaaaaaaagcccaaaaatattgaaaactgaaaacgaaaccggagaatcggctgtctccataaccaaaccggaaaatcaaaacctaaaccggttttctccaaagtagaaaccaaaaaaaaaaacgaaaccaatgtacacacagcaaatcactaattcagaaactaagaactctgtttcaaacttttcataaatacctatttacacacttttaaatccatttcttagaatcttttatcggccgtacacatgatcatcatcttcaaactcggttactccgagcatcgcaagatcaagatgacatttcatctcggatttggtttgttgcaattgtgtataagagtcaatcatacccgaaatatttgtagttttcctgcttgaatgtgtttctggctctacaccttcttcgcctttcaagattgagacaatctcttccataccgggtcttcgggactcctcattgatcacacacgccgctgcagcacggatcatccgctccatttgaaccgagttttttcttgtgcattttagccttggatcaagcagctccactatagcttctatccctctatccaacaacggtttcgcctatagaaagaatacatataaatctttttccaaaacaatcataaatgtattgacacaaactttaggatatggtcacattatcattcaagttgtaaaattagatgacatacccaaacaaccagattttcttgaccagatgctcttcttgcttcgattggtttccggccagttattagctcaagcaacacaaccccgaaggcgtaaacatcggtcttgtcagatatcttaccatgctggaaatactcaggagccagatagctgcaagaaagttttgatagaggattagataatcaagaattggctataaagaagaagaaacaactcaaggcaagtttcgagcaatacccgaatgtgcctttcacggtcttgcagaggaaaggaaccgaaggtgcagcggtccaagtagctaacccaaaatcacacaactgaaaaagaacaggtcaaaacaaatcattggtttgcttaccgataattatcgaatacatcattcgtttcgcgaatctttacctttggtattttctttgaggaaagaagaatattggagggtttgatatctctgtgaacaacacattgctctgttccattatgcaaataagctatggcatctgctatacctaacgctaccttgtaccttgctgaccaaggcaaaccaaaagcggcttttacgcctttcttcttcttcttatctattacaaacagaaaatcacaatccttaagtctttaactatctctgtatataaacacaaatgagatatccattcgcttaccgtgtaaataatgttcgaggctaccaccagagacatacttgtaaaccaagaataacccttcttcaggatcaatacagaatccaagaagaggtacaatgttggagctatgaagagagcttgcaatcatcaactctctacaaaaagatttaggagattctttgtcttccttatcaagtctcttgattgctaaagccgttctccacattccgattttgcctctaaacacatagctacaagctcctcttcccaacactctccctatatataaaccattgaataaataagtcaaacactattttcattttcaccctaattcctatttccaaatagccaaatagggttgacccgacccgacccatacccgatccgcattttctatccggtactttgtcataattatccaatttttttacaaattactgaagtgaaatacccaaaaatactcataattacacaaaatttatcaaaaaaataatgaaatatatgattcaaattcaacggccttattgaattattgaattatccgacccgtacccgtttgtcgatatcggatatagcctaattaccaaacaattagctaaaatctacccaaaatgtctagaaatcaggtctaaaatccaatccttacgaaattagaaagtgctatagtgattttagatatgcgaattaaccaaactctacccgtaatttctcgctaattactctggataatagttttataccctaattacccgtatcggatccttacccgtacccgctatcacccgaatcttattattaccaaacaaatagttttcaaatttcatgtttaatgactaatttagagctttacctttagagaaattacgagtagctgccacaatctcaccgtagctaaaccgaaccaaagtattagccaccggagaaatactcttctcaagcgacctagctctagtccaccgcaaatcatcagtcgcattcccagtagtctccttaacaccattctccaaattaaccatcaaaaccgtcgtggaaccaccagaaaccgacaaattccgacaagaagacgaagcagacaaggacggttcttcacctttcattttctcaagctcgatttgtgaacaaagactgaatctaaacgatgaatgaactgaatgaggatcaggattcatattctccggtgctgtttccgccaatagccaagctttgttattctctcctcctcctcctcctcctcctccgccgccgcttgttcctcctccattgttgttgccggagttttcggttgagcttaaaggaggaaggaaacaagcgaaacccaaatcaaagatcattcttttcaaaagggttttgattcctgtattgttgttgttgtcattgttatctccgtcaagatctgatgatgaagaagaagaagtgagtatcggaatattcactgtgtttttgttttctggagttcttggatgaacagaggctccttcataaaaacccattctttatctctctctctatgaacagatctcgagaagcaaaaagattcgaaaagtttgattctttttgaaaagctttgcttgatggaagagaaagagaatatgtatttatttttcttataaagtttataattggaagaagaagaagaagaagatttaattaaattaatgtgtgattagtggtggaaggtggaaacattagttttattttaatttttcttataccgttaagttgttggtgtgatcttaagcaagaaaaaacaagagaagaagggggaattaattaggtataattaatgatttttctttttggttttgaattattgagttttaaaataattgtgagcgttacaaaaccaatcaaacaagtgtttattatgtaatgattttaaaatgtttttaggtcatatgggtaaaggctgttagcttatacttaaaaggggacaaaagcagagcccacgaggttgtgcttctctgaaataatggagaagttataaaattcacaagtgttactatcgaaataaatataattcaagtgttactatttttagtttttattctctgtgttttctgattcgtacatgtggcgaaatatttgacaacattggtaagaacttgggtcaggccactatttatttcatgattatgttttctttctttggtcatttagaaacgcttttaattataggaatcttctttttcacctaatatgaacctattttaaaagaaagaatttatacatggtgagaaacaatcattttgttataagaccaatgtatgataattaaaaacttacaaaatattcaagaaattcaaagagaatgaaagaagacagagatatgaaagcagattttaaggaatttattttgtttgtctttttttttttggtaaggttattttgtttgtctttaacattgtatttagatctatatcccatttttattaaacgggacaacgctactatttaaattttggttcttgtaaggctgtaatcgaatttcggtattaaaagatgcagactgcagtggtgaatctttttaccacttgactaaaaatatttttttttttaaatgtcaaattagaatcttttataacacttatcattggagatctagcatcactagcgatttttttttcttcttaattgtttttaaaaacatataatttgttgttgtttagttaacttacatattttttttatatgtaactgttggctatatagtgattgttttaacaatattaacgtatgtattacaaactcataaaatgttctctagtaatggtaatgggatattattaaatttgtgtgatgacgatgtttgggacaaaactaatattatatgctgtggtttcaggtatggagagattacggacttcgccttagaactttatggattttaaaaaaaaaataaaaaaaaaaagaatttgtgtggtgttaatatccaaagaatgtttgtcattggttcatacagactgaacttacttcaaaaacgcatagtatacaagaacgcctaaaaaaggtttataaactagaaatatatcttgacgttcaagagatggccattatcgttgcattttggaggtaggccgcgatatgctatagcacattcagcgattccaaagacaaaccaaaagtaccaaccaagagtcaacggtcttttggacataatgatgaccgttttggtgtttttggctagtgcgtttacaaatctcatgtgatggtgtgtttgtttccatataaagcggcatatggatatatgtacctattatagtattatggataatacgatgcgtttcttattaataaacaaaattgtaaatattagtaaaacctttgtaaatctttttaaaatatttttgaaattcttataaagtttttaaaacattactaaaaatcattttttaactcttaaaaaaaaattataaatattttatttatttttaactctttttgaaccattttaaaacttttgtagatccttacaaaagatttttaaaagatttataagaatttttaaaggattttaaaactttgtaaatcttttaaaaactcttgtaaattttttaaatctttaaaaaacctgttaaatatatttcccgtcatttttctttttttttgcgggaaaagtgctgtgaattttttttcaatattttttggagggaaaattttcttcggaatattttagacgagaaaaaattaaattttattttgttagcctaaaattttttcaaaatagagataaaataatcattaaaaattaaaagaaaatataaataaaaatatccaacagaaaaaaacataattaaaaaagagtagtcttggaaaagcattcttaagagcatctccaagagatactctatctcctcaaatataaagttttaggttctccaagagatactctaatacttcataatttagagtattaaatagtgacactctatatttggaatatcactattcaatactctaaatttgaagtttcatctttttatttgtatttaagtccctaaaattcaatatttcataaataatcttacaaattactatgtttatcattttagtccttaaatttttatatattcaaagtatttcaacaatttttggcttgtaatctacatattaaaaataaagagactcatatatctcttcgtaatgcattgattgattatatataggagcattacggaaataattttattgagtaatttgtaatttataagttaatttatgtatttttaatttttatttatatgtattttatttataaatgtattgttttgttaattaagattatgtgtaatattttaatgtatgttttagagttatttataaaagttatatagttttaaaataattataaacaatataaggactataatacaaaacacacattttagaaactttatatttgaagtatactcttagaaaagaaactactcatactttatatttaaagtttacatactttatatttaaagtttacatactctaacaatttctcatcttttcatactaaaaataaagtttttcgtgttgagctattaaatgaaatggcaatatacaacacctacgacagaaatgaaataagtgaatttaataaatcttaagaaagggatatatgttttgtagggttattcaacactaaacaagattattatgcgtctaattgattaaagactggtaatagtcatagagtaagttacaagtgtttcttgttgggaaaaatgtcatttaatcccccaactttcaaaaaatggccattttatacatcaatttcgtatgtggtcgtttgaaacatgaagtaaacgttgactaatttttaaaacatgatctttcgttgaccaggccaaaatagacatgcctttatcagtcattaacggaacttctaacgtccgttatcatccgttaactttattagtcaagtttcaaattgtggccattttaaacatcaacttcttatgtggccatttaaaacatgaactaaacgttgactaccatttaagacatgaaaaattcgttgaccaggccaaaatagacatgtctttatcagtagaacctagaaacccgttaatgactgttaatctgtccaaaataacgtcgttcgagaataatcgaaagaacataaagatttttctcatatgaaatctccatatcaaaaagttttaagcagaacccaagaacatagtttgataaagagataatcgcagtgccagtaattggaagcaaataaaggtgttttcgtttatatatttgttttaaattttaaaaggaatcatggaagcaaattgaagactcattataagattgttcgtcttgtttgagcggttgtagaaataaatttggggaactggggtttcatttagaaaacaatcctgattttcttttgattattctcaaaacaaagtcgttttagggatactaatagagtcgttaacaagtgataatgaatgttataagttcttttaatgaatgatgacaacatgtttattttggcttggtcaacgaatttctcatgttttaaatggtagtcaacgcttagttcatgtttaaaatggtcacatataaagtcgatgtttaaaatgaccacaatttataacttgactaataaagtcgttaacggatgataacggacgttagaagttccattaatgactgataacggcatgttttttttggcctggtcaacgaataatcatgttttaaaagttagtcaacttttagttcatgttttaaacggccgcatacgaagttgatgtataaaatggccattttttgaaagttgggagattaattgacattttttccgtttcttgttagtcacactgtcattgtataattagtactataaatagtaacttatactattccttttcttttcttttttttggccaatatacagtacttattccatggtaacaaaataaacataatgaaaaagtggagatggagtttggataaaggagaacacatcttcaaattttgataataaatgtaccaagaacttaggagataaatttaggtaaaagtccaaggtattgtttaatgtaactgtattccctaattaataaattggtgatggtacgtggtcaaagattcttgatttcatagtctagaaattaattcttcatatatattttagcaaatcacatgtgtctacgcagaactagcaaaacaatactaatattgagtaaatagttaattttttttaaagagaaaatgaatattcctatttgataatactcataaaatatgaaattataattccaagctatgtttaatttttaataaaatttggtgaccatccaaattaacgaacaaaaaaacaatatccttcaaccgtttgattaaagataatataaatcaatagaaaatgtagtcatagctagtcattcgaatttgtatggtaggtcgatttgggaagttataataaaaagttattgataggttgatttgtaggtatttaagagtttttattttaaaaggtaaagttctttaagcaagaatgatatggcctacgaggaacctactagaccacaacatttcttactctattcccttgaagcaaatagatgagttctgttgaaaaacccataactctctgtatccgtttatagttgaaaaaacccaaatttctacaagtttcggagatgagtctgagtttagctttggatttctcctggataaatgaattgtgagatggttttaatttggaaattactttaaataatcattgaatcaaagtgaacatgcagttatactataatattgttaaaagagagcatgcatgttatggcacataaatcccaactttcatataggtttgggtagtcataagatgaacagactagcggccaaaaatatattcaactctaatcaaaattatagtctatgaaccattgaataaaaaacaatgtgaaccttcttctttttgttggtattatagatatattattttttcttttttggtagtataatttgtggttaatggttatcgttattaatgcatggtggcctaactagccatcccatgagtcatgtactcatgttggtgaactaacgagaggatgtgatgtgtgatttgatatcgagagaggtccaaaagttggtggaccgatacggcgatacagcagtatcggttacttttgagataaatcatttgatactatgatgataatcatcatgatcaacttggattactttttatttttgtgtatacacacattccatacacgtgtgagtccgtaccatttttgtaattatattttgagacaagaattacgtttacgaaagtccatttccaaaatcatatgacggtgtaagggagttaggttatagtgttgacccatgatgttaactacaaaagttattgaattgatttctaaacggtttaggaaaatgttcttcctagatttaaaaaaatcccaaaaaaaactttgtggtgtgtataaaatcttaaatttaaaagtttcggaaaccaaacatataaatagtaatctagaggatgcaatgtttctgtgatcgagatattaatggaagtttacacatggcaagaagccaagaataaaaccgttttagtcgacatgtctctgcttcgaccttacgaaataagtattatacgaaaatttctagatcgttagatatatcttccaaaaatacgccaacctaatctaatactttaaggtagagataagaataaatacagatacatagtgaatgaaaatatatactttaaaatgtggaattattggattgtagattgtaataattcgacgcaggcatgcatgaacgtgagacagagaggaagaaacatatcatagtccatttatatacatgtcttctgtttggtgctaacattacatctccattatttcaaatatattaaaaatgtgtagaactgtccttttctcattcccgtttttaaatataatacaattggtctttgttaaagagttttgttaattatcttttaatttccatgcaatttattaaatattcttataatgttctgatctattgtcatgttgtttatatttctttgatatatactactttcattttttttgtttacctttttggtttgcaacagattaagggcgctaagtcttagacattcttataaataatgtcttcataagaattcaaacttcatattatactagaaaaatattaaatatgacaagattatttgagaagtatcttctaccaccttggcaaatcggaatcttctagctatcccggtaacaccgtaagagcacgtgtcaatctgactgcaagatttgcatgtaaaaggttttatattttcttgataaattaagggttctagggcctgactggtttaaacgcagcagatgcggttgcggttgtgggagtttgcggaaacgggcggttgcggtttcaagtgttatcaagtgttttgaacgactggttacgtttgataatggatgcatttgcgggagatttatgattggtaaaccagcgggtgcgatagtaactaaataaaaataaatcaaaataaatataatatattaatattaaaagaaagaaaaatacaatatattaatcaaaaaactcaaaataatacaaaaaacaaaaaaaatgatgccatgaaatactcaaagaattacattagctaatgaatggataaaaggatagatcatacttacgtttgattcttgattttgattttaatcagtttgggtggatgccaaaattgagagaatagagatacaatatattgattagggttttctaataaaatatataaaggtttagattatagtgattagggtttgagtgaaatttagaattattttaattaatttaattttttttaatctaatcggtaccgcccgcaaccgcaaacgcttgtgggaaagaacttttgaaatctggcgatttcgagcagtccaaggcggtatttagcggtttctatgattggttgcaatcgctaacaaccgctaccacccgcaaacgcagcgtttgcggatggtagagggagaaccaatcaaaccctaattctcgagcaataattgatacctatcttgacaaaaaaaagatttctctatttttacttgcttaaatgcatgcgttacacaatttaataaattttgaaaaccgagtatcgatattttcatctatgaaggattgaccaattaccttatgagagtgaaacaatctttatgagatataactaaacggaaaacaaacatagatcaccaagacaccaacataaacgattatatccataacgtacgtacgaaaattaaatacatgaggtttaatttcaatacataggtcaactagtcgataatgatattttccatacaattttttttattcattagaatagctatattattcgaataaacagaactaagagcagaccaacatcacatggtgcattaactgtctaactattattttttcaatcaagatttgattaaagcaggctcctcgaccaaatggatttttagaatcaaactttcaatattaatttaaccgaatattgataattatactgagcaatatcaaatatgttttcgccaacattgatgttcacatggtaaaacgatttgaacagaccacaacgcccaagtaaatatattttctcggtgtcaactgtgaatatattaattctcatattcatcaactagatttatttatatatattgtacagaggtcacctttttttctttaaataaacatatatatgaagtatatcaaccgttcatagtactgagctagtttggactttgtaatacatagacttacatatgtaaagtttatcttatgtaagtttattcatatgtttatatatctgaccttatgatatactattcaaaatgtatcttgagctataccacctcaaaccaaactattgatcaaactattttaaaatttaaaatgtaaactatctaagtccaatgtgctacaaaatcattttgtttgttgcaaatgataaaatccattgactgatgcaaaatatatcagttattgcaagatgtgataattttaattgcgtagtataatataaaaactagatgtataaaatcgcttttatgataaagaaaaaaattggatgtcctgtgaaatgtctgtttgcacatgatttaaatctataaagcatatgcatggggttatatataagatataccttttgatgtacctagaaagttaaacttactgaatatataaaaagaagattataatctagatgcaaaaaagcaacggataccaaaacaaacagaagaaacaaaattcgaactttgttttgcaagtaattctaaagccagtttctattaagaaaagagtcaattatgactttgccatttttttgaatgatattcggtgatttgccatttttgttaaaatttactgatttattatttgtaggctatacaaatttgatttaacatgcgttttatccattaacgttttgtcggttctatttgtttttaatgtttagtatttgttattaaatatatattttagctataaaaaattgtaaatttaaaattgtaaatttaaaattgtaagtgttcatatataaatggtaaatttatgatattttagaggaaatgaaaaaatccataattgctatttgaaaaaaggcaaaatcagtaatgtaactagaaaaatataatatgtaacagaaaaaaatagtggatgacattttttcgattaaaaggtttcaaatgaaatacatttaaaaccatatctatagtacgttttaatattataaaatgaatgaaaaaataaaataaaaatatatttcctaggataagactattattgtttttcgtcttttccaattgaaaggctctatgacctctacttatgttacgatatatctaaatttatgttatggtgagttggagactatgctttgattgtgatgctgagaaccacaagttagtgaccttcaaacctgttcacatttaattcatgataactactacttaaccaacataaacataatttccccacattttaaatactatttctaacaaagattagacttagcattgttggttcaatactgagcagagatacattatgcagattgggtcatctgatccccaacatatgttgtttgtaagaatttataatagccctagcctgtgataatttttgacccattaacataataaccaacccacgtaagaatgaaattgaaactaatcttcttcttttttttgttcgtcttaagatttataaaccaaagttagtgttatattatccatgattcacatgtataatgtattatgttgcttatccacgttttatatgtttatgttaatttttaagaatcaacggcccaataaaatgtgcataaaacaaaacacattttgagctcccgtagcccattatgcacatttatatatatgtataacattgctagaaagagagaggtcgaacaaagaatgttgcttattcacttttatatggttattagattaagacctctcctatatggacgggttttattttaaaaataaaattaaaaaacgtttaaagtaaaatttgttataaaaaacccgtatctaaaacctttttagaaaagataacgagagtatgtttagttagtgaatagttcaatttacatatccttattttttgtttgaataaactattttaaatttatatatttaaagttattattactttttattacaacaatttactaatgttaaactatcaattacagaaaaaagttgctaaattcaccattatcaatatttttttaatattattttgtcatatttaattagaaagtcattttatgattggtatctaaatctggaagaaaactgtttacaaatataattttaccattatcaatattattgccaaaattttgtaaaacgtaattctgcaaatatcccctaaaacatgattatatactatttttaaaaatattattttgtaacttccgattttaaatataactaaattttaacttgcggtacatcgcatgacttttttgtttttttttaaaataaaaatttaatttgtttagtcgattaaaatatatatgatctaatgttttgtattttatgaatgtacaactcatatatgtatatattatttagtatataattactatatttgacttttactgtttaaaaatatagaaacaataacgtacaattcattaagttaaattctaagatttcatccatagtatatatcatcccgtattaatattaactcaaatccgtcccaccatataatccgaaattaaacatcattttgtcattatttataaaattcaaatatttataatatttgaaactttaaaattttttaaatatcgatccaaaatttgtaattatattttgattgttatatttaggatttgcaaggactaatattaaaattagtaaataggtgagggatttcgccaaaaattctaccataccgaagaaatacgaaattgtttatgagattacggtggttttacaacatggttaagctttaaccaaaaaaataggccttttatactaaaccaaaactttaaaattctaaaattctggttaagctcaagctttaggctttcacacgaattacacaaggggattatgacacacacgtgtacaaagctggaattgaggttttatttttgaaacggatctttgatctttgggatcatctttttttctatatgaccgtttgaagaagaccgtttgaattacaaggctctctctctgatttctctctttatttcgaaaccctaaataattatcttcggcaaacatctgaagaagtttatgatcaccgacgattgttttctctggcgacgatccgacgatcacacaatcatttccctaattcagatggttatgtttctaattttgtgtttctttctcttaatttgattcgagtactattacgatgtctctctgttacttcgtttttccgaatcgtgacgttaattcatctgcttttatgagtccggaggttgattgattttgtatttcatttgatggatacttctgatttgtgattttttttttttaaaattttaattaggttttgaaagatcattaacgatcgcgagacttgacgattaaggagattttgtttggatggtcgtatcatcaccgacggtggaggatggtggtagatacggagggcggtggagagccgtgagggatgaagttacggaggaagcgttggtcgtggctggtaatcgaaacaaagtgggttttgtggatctgtttttggtctacatattgctcttgttcttgttctgattcttttggattacttttttttttgatgtaacagatcgtttaagtcttcttcgcctgaaagaagaagaagaagacggtttctcttcgctctttgtgattcgagttttcttttggtaaattgaattcccaaagtcagaagttattttgaaatttttgtggttttgttaatttggaaggtttaatgatctgtgatctctctactctaagcgaagattatcaaagagatgagttccgcttctctgcatccctttttcctggttttgatctttctcagaaattttcttttatgtgaagattaactataatatggtgatgatatcatggtttgtgaatcaaaacaaattcttttgtctgtatggaatgcatcaaagttgtatatttagtgctcttgttccttattggatacgttcatttgatcatattatatgtagaactttaggttcaatatcattcctattaacatttcctgttcaaatttgattttctctggactgtttttggtaggatgttagtctattcactttctagacggaggagacactaattgaggacaaatctttatcattttgcacttgtaatggagaaagatggagaagattgttttctttctacaaggtatcatctcgggtcactagctaccttatttacttgtaagtgctttaacatactgcatgtcgtgttaaaattcagttgctgatgattcttaaagaaacgttggatatggagaatctcttacaaatggttcacctttctttcttatgtggtatggagggtttcgttctaccgctggtttgcaagaggacactcaagttttcaaaggtaaaaaatcaagtctagaactggatagtctcgtctactttacttctatttgaattcaattagtacttctatttgaattcaattatccttatgacatttccatctttacagagccgagtgaaaactgaaaagattttttttttccgtgaaacagaattgcttatcataattgtaactgtaagtctgttaattcttagttatgtactactttggaagaattaatgacttagtgtttgaatttagaatgcaggtttagagtggttaaatgctaaaaggtaagagtgatatgtcattagaatttgatgcttctctgaggtatgtcattagtttaactgttactagttacaatgcatgactgaggtttgttaattggtggtattatcattgttatggattttaggtggagaatgtttggtaaaactctcgtggttctttttatagttctttagtgttataaaatgcatgactgaggcagaggtttcctaaatggtgttgaaatgtatctctgttgttggctagctttttcttgtctcagtgtctcttgttaattctataacagtatagaaatgtttgaaagttcaggaggtatttcatgtttcctatccgcgagatatggttgactattcacaattattccatgctttgttgtttacttactagctatctctattttttgtttgcctttttgcttaatgatttaattcctacgaacatgtcttgtttctttaactggctcccttattttctcttttttcttcattgcttgtttgttcttcattggttccatgtgtgcttgttgaattctttcctaggtttcttgtgtgcttgttgatttctttactatgtatcttgtgtgcttgttgatttctttcctaggtttccttccttggttccatgtgtgcttgttgatttctttccttggttccatgtgtgcttgttgatttctttcctaggtttcatgtgtgcttgtttgtttatttccttggttccatgcgtgcttgaatattcttttcctaggtttcttgtgtgcttgttttttttttttttaatttcttccatggttacttgatttgatgttacttctttgctttctttctttgttccatgcatgcttgtgtgtttcattctctgtttccttgcgtgcctgtttaacttcttgcttagttgtttggttcttacttgcttccttgttttcttctttcaatccttactagcctcttccttccttgcttgtttgtttccttccttggttccatgtgtgcttgttgatttctttcctaggttccatgtgtgcttgttgatttctttcctaggtttccatgtgtgcttgttgatttctttcttaggttccatgtgtgcttgttgatttctttccttggttccatgtgtgcttgtttgtttatttccttggttccatgcgtgcttgattattttttttcttgtgtgcttgtttttttctttttatctccatggttacttgatttgctgttacttctttgctttctttctttgttccatgcatgcttgtgtgtttcattctctgtttccttgcgtgcatgtttaacttcttgcttttggttcttacttgcttccttgttttcgtctttcaatccttactagcctcttccttccttgcttgttttctcacttgctcctttattacatgcttacttaatttctttacctactgaacttgtttgacctttttacttcattttcttaatcttcttccttgctctagcttgtttctctgttgaattttatttagatagttctaggtctctgtttgacaatagtatagatggcagactattgagcgtctatcaacggtttcacacgattccagttatacaatattggaggtctatgatcattcttctctctttacgtcctcgttgatcaggtgattgtggggcttttatatgtatatgttcatgggttatactaatatacaaggtgatctcatttgtacatttgcagattttaatttcgtttgcaatttcttgcaaccagtttctgaagcaagagcctcatgaattcctggggaccatgaaacaaggtactcctttttttttgtaagtccctctttgaagatatttattcatttgtatttcttcttttctctaatctttatcaaatccgtatttctcatcattctgatttttttttttgtttttgcctttcttctatggcattgggatttacaagagggaaccctacttttaaaaggaaagaaacattggcaattctcatctctggatttctagcaaatttgtttttcttatcatactgattttggtttttcttcctttcttctgtggtattgagggttttgttcttccgctggattacgagagggcactcaagttttcaaaggtatgaaatcaagcctagaatttttactcttaattgaattcaatcgttgttctgttttggttttgcatcttctttatccataattacagaggcgaatgaaaagatttaagtgttttcggtgagacagaatggcttcacattattgtaagtcttgtaatttttaattatgtatgtgttcatgtgtgcacacatacatgccttatatgtttattagaatgcaggttttgactggttagcgtcataaaggtaatagtattggtcatcgtgatatgtcattagaatttgatgcttctctgagctatgtcatttgtttaactgttactagttaaaatgcatgactgaggtttgataattggtattattattatgtttttgctttgcatggactttaggtatagaatatttggtgaaaaactctcgcggttattttttttattatgttagcattcggtttttcaggagtacgttgatgaagtttgcgcctgaatgggaagaataatttctcacatccaatgtgtgatggctgctatagttatgagacaaggtacggaatttattttttttggtctcaaaattgtttccgatcaatttttgcagtcactctcttagcaaacttagaatctttcttgatctcttagaatcatggagactaattttgctacttattccttctttttcccaaaagttcttaaacatgccgtaaaagaagggaatgcatcaacgaccttttagcatgaatagttggtctccctgaggattaggattgatcatagtagaggtatatcgttactcttgaaaatatttcacaaatcatttttttttttccataaacgtaactacaaatttcagaagatatgagaagtttgatgttccaatggcctacacttagagcaacaatgattgatgttgcaatagcttggtctgcaagtttttaccgctaccatttgttcttgacttctttcatgggttttggttagtatatgcaggtaacaattacttttctttttgttgagctcaaaatatataccactcatcataaatactgatttatgttttttttcttccatgttcggtgttgagggatttgttctttggttggtttacaagagggaactttactatgaaaaaggtaagaaatatgggcaatcaccgactcttgatatctatcaaattcgttttccttatcattcattgtggttttgttttcttttcttgtgttgtattgagggcactaaatcttttaaaggtaagaaatcgagtttagatttgacaatacttgtctattttttatttctattagaattcaatcatcactctgattttggttctactttctttgttcgtcaaggaaaacatgaatgcagatgtatggatcttgaacttagctaacaaatgtgtattttctaacagggaagaagcttgggaaaaaaaagaacaagagaagatcatgatcagctaaaattgagtaatattgattttttttaatgaattatgttactattttgcatcgtctctccatttgaatctttttcaggattgtgaagtagagcatgaacacgagtattggaaatatgtagaggaaggtaacttgttatggttaaggttattataagttttgcctaattctattagttcttatgatcctgatgcaaacttgatgattctcttgtttgcttctttcgtttggtcttaatttatctcaggagcctgttcaaatcaattatgcacttactttcttactgaaatttagaatgttcattagaactcaaagaaacttgttgaactcagtttgcttcttgttccattaggataaacctgagagagacactactttgccaaccgagatatgccagaaacttgaagacgatttgagctagtgatatcaattagaggaccagatggtccagattcatccaatcattgataaagagcccgtaccaacctgataaacgaagatacatcaaaacacgaagagtacctgatcagcctcttccacatctagtttaaactgcatacatgcatacatgcatacatgcatacattcatatatgcatacacatgcatatatcatacattcatgcatatatttgctttcttgatttttttattagatcattgcttgcttctttagtacatttgttaacaacttgttcttgtttgtttcttgtgcttatctcagttcgtaacgtgcttgcttgtttcttgcactgattgcttacatgtttagcttgttcaattaattccttctttgtttcattgattatttgatcgttgcttgacttgtttgtttgtttcttcttggttccttgatttactttacttcattgggcagccttcttcttggatactcgcttacttaattgtttcaatcattttctttacacattcgtttgcttgtttccttccttgatcctttggtttttctttttcttttttactttcgtcactatttcttacttgaacttctctacttgtttcgttgtttgcttacgattttcatttggttactcgctttcttttgctttctttacttcttccatagttccattgcttgcttagacgtaattgtttaagaaaacatctccccaacatcctccttgttcttgcaaattccattacttaattccgtttatgcgtatctcttaaaatatctacaactctatagcgaaattttataatccacactatacaattaatttgctttatatatgacatgtttagcaaaaaaaaaaacaatttgctttaatttgttttttatcccctatttccattggattattattttctttacaacaaaaggaaaaataatgttttgctctgacatgttctaaaacatgtggatcaaaatattggtaaaaaaaaaactaatatgataagtattatttgacacatctcatctcatggtctaaattaaattccattcccttttcatttccttaatttcacaatatgcaattatattttggttttttcccccttaattgtacttgttcttgcaaatgttttttacatattgctctaatttgttctaacagcatttcagattttttctttctttataaaactttgacacatataaataattaaacaattatgaaattgtcaagcatctcgaaagaaaaatggggtaaaaaaatcttttctaaaaaattgaaaaaccctcaactatatataatcctcacttttttaaaaaaggtcaaataacacttaatatcactaaaatcagtttaaaataaaaaaaacatcatacttaaatttaaataaataaataactcgggttaagaattgtttttcctaaattctagtttacaatgggtttttttctaaattgaagtcctttagttttggtgtaaacaaattatatatagtttttatttcaaatctatttgagatatagcaaaacgttttcattattattaaatattttgttacgtaaacaatttaaaattttattgacttggacaatccagtctatacccaacatttattttgggtcgaatttaagtttcattcaaatttttagataaaagtatttttgtgttaaatattatatttttatgaattctatatacaataaataataacaatccgaagaaatgtcatttgcacttccgaacaattatgtcttttaaaatattgacggttacttttaatatttgtgtcttttcattgtaaacagttgtgtctgttaaatagctgacggttacttttttaattcgtatcttttcattgacggttttttttacattcgtgtcttttcatcataaacagttatatgttaaaatattgacggttcctatttttgcattcgtatctttttatcataacttttggttaacattgaatgttattttttttcagtaatgtctttgtatcgcaattttttctcgtaaaactgtatttttgtcataaacagttgtgtctgttaaaatattgacggttactttttcacatttgtgtatttttatcataaacagttgtgtctgttaaattgttgacggttactattttacattcgtgtcttttcattgtaaacacttgtgtttgttaaaaaattgacgattactttttttacatttctgtcttttcattgacggttattttttacattcttgtctattcatcataaacagttttatctgttaaaatattgacggtaactttttgcatttgtatctttttatagtaacttttggttaacattgacggtaattttttccgttagtatcttttttatcgcaattattcgtaaaactgtatttttattgtaaatagttgtgtctgttaaaatattgacggttacttttttatatttgtgtctttttatcgtgactttttgcgttggaacaaatatatcaaattgttgtcgtagctcagcggtatagagtccccttaagtgtgcatgaggtcatcagttcaatatccgttggatgcatttttccctcattattttttaacataaaattctaacggaaagttaactctgttaacaaaaatttcacgacgtgcccgattatgaaaactttatgatttaaatgacatttaattaaagagtcaaagaaaactttatgatttaaatgacatttcgaaagttcagattttttcgtcccaaatttgaaaattcgcgttttttttgacatttttcccgtttttcttttgcattaactatgagaatttatgttctagatacctttgatcttttcataaaaattgtgcactagtttttttctaagttattgaaaatgtcttttttttttaataatattataaattaaagtttttactattttcaaatctgcgtagttttaatcaaaggaccctatatttttgtatataattaatgttaacaaattaagatttaatgaaatattatgtgaaattaaatttgagttttattacttactgattgatttagtttgttgatccatgtttgaagctaactagattttaacccgcggtacaccgcggagacaatttatctttttaaagttagtatattttttttttgcaaattgtatctatctataatatatttttattttatagtttacaattgttattaagtaacgtcctgccaaacccgtcccgccaaacccgtcccgccaaacccgtcccgtaaaaaaaccatttatttatattaatgttgatcttatttatgatatgtttataaatcattgtctatatatttttgtcgatgcgggacgttgaacccacacattttttgccaattggttaatatatgttcatttttaacattttgaatcatacaatatgacggaaaaaattaagatttttttaaactctatatattatataatgatgttaaaaattgtgatatatcaaattttttataagtttaaatattaataatgttttataaattataaatatataaataataatatttaaaaaattaatatgtttgcttataaggtaatgacataataactctaaaagaaaggatttagaagatttaaatttttaattaaatattttcattaataaataattaatgtcagtgacatgacattgtaaataagttcaaatacaaaatttatttatttaaacaaaaaacgtttagtaagaataatatttatttaacaaaaaactttgttttaaaatattattaacaaatatgtttatgctaattttaagggattgatttgaagtttgttgggattaaatttgattgataatgtgattgacaatttaaataaagaatttaaagtaaaattaattattttggaaaaaagatttattgctattggcattaaatcgtaaataagtccaagtctaagatttatttgctaaaatggatgcaaaaatgtatatatagatgtcagttgcatatgaggtttattgtaagctctttctcgaccgtaaaaatctaatcatcattcataatagttcatttctttttttttgtttggcttttcagttttttgacaaatttggtttttatctatggagttcatgtttaattgtccaaattgagtttgttattctaaaatttggaataaagaaagtgaaatcagtggtaaatttaataatctcaagaaacaaagaaaacttgattgcatttgataaatttggaaatcaatatgtgtcgttagacttacaaatatagcattataaaaaaataaaagcataccaatcgaaaaagttgcaacaaagttagtgtttttaaagtattaattttatctggtgagaaaatatgagataatatatttatttatgcagacttaaatatttcttattccatttttcttttaggattaagaattcattgtataatttatataccccccaaacgttaaaaatatgtatatttgtataatgtactgaaagtatattgtcctatagttattttcttttagaattagtaatctattgtataattttttgtagttttattttagaatatgttttctgttttttctaaaagagcaattaaaaaggaacagtagtataattttcttatactgtttttatataaggcaaaatcgccagttatcatatgaaaataaaacaatcgctagaaggaggggtcgaacctccgaccttgtggttaacagccacacgctctaaccaactgagctattccagctttttgttaagttaattaaatatttcttttaaaattaaagtctatgagaaattaaccctcaaaagctggtaaacgtacaaaatctgttgattatgtaaaatatctttgctttctaatttgagatcttattcaaagcatgagcaattttttttttttttggggtcaaaagcatgagcaaataataattttgtcttttcgaattagatactagttttcatatattcttattcattgatatcgatactacattcacattgtatgtatatctatgattgatgataagagttgggccaaatgaaaactattttttttttattgggaattcatgaaagaaactagtttttttttttctttttgagttctacctaaaattaatgcgcttgcttggttttagatccagatgtaatcgaacaggccgtatcaacatgtatatagttatttatacttgttcataataggtttggttaaggactttggaattgtccggtttatgtctaatttagatgtaaaccatttggttatttctggtttgatgtccggtatttgataatggattggagaaaaattaaagagactactgttataaagaaaaagaattacagtaattaaggataacattgtaagtgaaatgttataaaagacaactgttataaactgcgctagctagcatctagagtggacatttgctttacttgtggcttgtactaattgatcatctgtccactaaaaatgtgtttgttcctttcatgaataacagctttttatttcctagaagaaaaacttgtgttagaatcttggtcaatcgttatggttcatgtccttacttggcctatgaagaatgccctctcaggccagcttaaattgggctttggctctggatgcaatttcttttcaattaacttttggcccaacataacttatgataataatataaagtattgttttgaatctcacattatgttaccaatcttgattttttagagaattatgaatatctgtaaagaaactggacatactgatctctcttttacggacgtagtttgtttgagaaaaacaacaaaataaaatctttggttcattctatttcgagtgattgaaactaagagtaagcttttaaaattgaatgaaaccaattggttaatcttataagtcgcacaacgcgagagcactctttaaattagtagtataattaaacattaaagtagattgaatgtcatgcaacttgggttctcacttctcagtaactaacacacaattcaaaacaagtaccaacgaacgaccaagtaaatgtggtattttttttaaagtactctgatcttgttcctatgactatgagaatatgagtatcctacaaaagtctccgtgaaacttgtctaccactaattatcgaatttgtactttgaactgtgctttgagatgacattcaaattacaagtctaaacaaactatgttaccaaacccaaaaaggttttaggagattttgagtttcgatccaatccgaaaaaggtttgcataaaatgttatcatatttacaccgtaccattttttatcatctcctttaataagataccgttaaatctgaacctttacacaatataatatcttaaggaaaacaaaacaaaataacaaaaagtgattataaaagtatccagattatattttagctagagtttcaaaatcaatcaagtcgtttacatgcgttgcttcagatttttttttttttttttttttttttttgttaaataaacagcaaataaaaaagattgcgagatttgagttcgtttcttcttcagaatagaaaatgaagtggaaaaatatagtctttatcgaatacactaaaatgagaataaaaacgacgtgaagattagcggaagatacggcgatgcttttgcttctttagttatttcaagctcaaatttctttaatttttctatctttgtagatttatttaggggtctcatttatttatgttttacaaagtctcccagtccattaatttcactactgccagctaacaatcccaatgagagatcatattagctaatagtattattattgtaatttgtaattaataaacttggaaccacattcattaattgcttccatacatcagcatccattaatatttaaaatactttacaaatgattttcttaaaaattgtatccatgcttatgatgtatatattttttttaaataacaaaggtatcctaatttatgatcggacagctttatgtagatttaaacaaaccctacacccccgaattgattcaacttaactaaaccgaaaccatttttagggcaattctcacaaatatttccaaatttagcatatcatctctaaaatttcaaaaataccacaaaaacacaaaaaaacaatttaaaaaaaatgaagactttaagatttgaaaacttgggtttgggtttagtatttttgatttagggtttagtttttgtttaaatttaaaattatggcgtttcaccttatctatattgttaaagctctcacgaaaataatataattgttcacattaaaaaaacacacaatataatcgttcaaatatttttttttaaaagcaaagagtaagaaaaatcatatatatgaaagttagcaaactttcttcttataagtgacatatcactccaacatctgccacatgtgtttgttttggtctgtctaatcggtttgcaattttgttgtgtgtcttctgttaaatttgattatgaagagattgtagtcatcaaaaatagaagaataaaaactaaacgaatcaagtatgcaaattttcttatgcttaataataaattttgatttcagtttaacctttcttataatgttttccacccgtaagaccaaacataatctaatttcttactctaggatatttacagttgaaataaatgagtttatatatttcatgaatgatcttggaggtacattctctagattaatttgtagcataatatggatgtcttattagttatattgttgaaatatatcctaattcatttattggagaggaagagatatataatttcatatatggtggtagagaaaagacataatttcataagatggatacgaagtgagaattaaggtgacttattagaggtgttcatttctttgcagtttcacttcaaaaactgagtgattattttcctaaataaaaataagttgaatgtttttgtaaactaaagagttattctaaaacggtaatcaaatttgctagttaaaaaattacttttaaattataaaaagtgtacttgcatgtgtattgattaaatctctctacattcataatgacttcgactgataaaattaatagactcgagcaatatctattttgatctcatgccagcttcctctcttaaaatattataacaaacaaaaataaaactacatctaaatgtcatcatttaatattagtaagaaccgcctatataaacctttatgataacataactacacaaacattgtctctctttgcttaccaatctacaatcttaaaaccatttttcgttgtttcgatttctcaaatctccttaacctctcaaagcaaaaccaaagacataaaaaagaaaccccatacatctcactagaacaccctttagtaccaatgtcactcattaacgaacattgcaatgagcgtaattacatctcaaccccaaattcttcagaagatctctcttcaccacagaattgcggattagacgaaggagcttcagcttcaagcagtagcaccataaattctgatcatcaaaataatcaagggtttgtgttttacccttccggggaaaccattgaagatcataattctttgatggatttcaatgcttcatcattcttcacctttgataatcaccgaagccttatctctcccgtgaccaacggtggtgccttcccggtcgtggacgggaacatgagttacagctatgatggctggagtcatcatcaagtggatagtattagccctagagtcatcaaaactccaaatagctttgaaacaacgagcagttttggattgacttcaaactccatgagtaaaccggccacaaaccatggaaatggagactggttatactctggttcaactattgtaaacatcggttcaaggcacgagtccacgtcccctaaactggctggcaataaacggcctttcacggtaactataaatttaagatttgtgatttgtctttttcatatatcatttagatcaatcaaagatgtttaaagtttaccatctaatgatcgatagggagagaacacacaactttcaaagaagccgagtagcggtacgaatggaaagatcaagcctaaggcaacaacttcacctaaagatccacaaagcctagcagccaaggtttgcgttttttctattcatcaacatttattgtcagggttctctttttggatttaagtcaaggaaattaagaaatatatatgtgcttttgtcaataaattaaccaatacgaaaatatgtttcttgtatagaaccgaagagaaaggataagcgaacgcctcaaggtattgcaagaacttgtaccgaatggtaccaaggtatgataaatgtataagaaatttaattttatcgtaaccttttttttcaaacctagagcgtaataaatatttttctgtactaatttttttttttaaaatctttatggtggtttttatgtaggtggatttggtaactatgcttgagaaagcaattggctatgtaaagtttcttcaagtacaagttaaggtaattaatcttaacaaacattccgtcaactatatatcatactatgtcatatataagtagggtctttcaagtatattgatataaacaaaaaaactatgtctttttataggtacttgcagccgatgagttttggccggcacaaggagggaaagctccggacatttctcaagttaaagaagctattgacgcaatcctctcatcatcacaacgagatagtaactcaactagagaaacaagtatagcagaataattccgaccaaaacaaaaagtatagcagaataattagttactaaatgtatcggcattaattataataccaaacaagtcatcacttttgaattcggtttaaaaaatagttaattggtgacgttacagatcgagaagttattgattcctttaaggctttaattatgtaagagccaacacattgaagtcaccgacgatatgtcagacgtcggtccacacgagcatggaatcttatagtagattagatatgtaatagttatatatgtggaggtatgtttctatttttgtatgttttgtaattctccaagtatgcgtaatgtgatgttgcaaaagtttggtttctgagttttactttaagatatcttttataaaatgttttcatgaattgaactaagtgttgttaagttttgagatattatgcatgtaattaagtgttaatagcttaatcgataatacatctatgcaaagtttagaagtcactgatacgaataacatttaaggggaaactatattaaatgttatggtttcctacccgagaaacagacctagatccgaacctcttagtaattaaaagacaaaaaatatttattatgaatgtctatatttctacatacgatgcagtaaggcaacgaaaaaatcaactatttcattagaaattaaaacttaaatcctccttaaaacccttttaaatttattttttcagttgtgactgtttagcttacgtccatttctgcacttttgttcgttaaaaataaactaataatagtaatgttacatagtatatatgtatgatgtatccttgccgaagtatgttttgaatgttatatatgtacctaaccaaggggtataccctagaggtatagttctatttttgtacttttagatagggtatgtaatattttgtccaaaaaaaaaaaaaaaaagatagggtatgtaatatatcaatttaatggcttgatccctttacaagagtatgtagacaacatttctcaaggtgcagctataacataaagaaaatctcaatttgacatttttacttcatcgttgagctcgaactttactgaaatcctcctcaaaaccaccttgatttatcatccgatttacttatgtgcgagttctattcgcacgatatgtatattaagtatatttcttttaaagatggacggtaggattagtcaaattttaatgcacatacacacgaagtgaaattaaagaagtcactttacattagtattagagtatcatcagcaaaaataacatgcaaacaaatatttttaagcatcttcggaaattatacatgtcttgtaacgtcttctattaaatatcatcctctttttaattaacgttttttttttctaactcatggagtatacgtttatcagaaacgataaatgataaatctaagtataaggtgatatttcatttaccatgcatctttttttttggttataaccaaacaatttgcatcttttattgttgaattacttttctttttcttttcaataaacaattagctttaatcaactgattagaagacatacttaattaagatctaaatcatcatcccaaggtcaaaccatgtccttctgtgaaagattagggatacgtgctcgatatattataaacaacttcattctttagcatagttttaatgttaaaaaattaaggtgaagaatatttacattttctattcaataatcacatgaaataactacattatgttgacaatcccactttaggagctgtacttgtaattgtgtacttgcattattggtgtactttgcgtaacttctattaagtgaataagacaaactacgttattgggataattagacaacaaatcttttaaacaactacttacaaagataaattaaacaattaaaatatttgcaaccaatattactttcgtttttttatctcaacaattaaaatatttacggtaatcaagtttgttaatataaaaaaaaaaatatatatatatatatatatatatatatatatatatatatatcagttttagagtatacaagtttcatattaattttttagtggtcaccggttaataatatgcatctcataaaaacatgctaaaatctttattttatgccatttacttttattgacacaaattatttagttattaaaaaatttaatttttctttctcatattattttaaatatacaaaatgcgttattcttttctaaaagtttcaaattaatagttcggttggtatctaattatatctcatactctcatagtattagatttgttgacattcctttgaagattccctcgtttataattagttgataaattttacaatatatttgtatgccccataatcagggacacgtcatattctatgtataatccagatcacttcatgcataaaagttacagtcttatcatttaccggatactttctttgtgatatttaattttgctacctatattttggttttgcatttacgtaccagttattattatactttggaaaaggatttactatttaaaacaagatcacgtagtcacataccaattatttgtaatcttattgttaaaacatgaattcttgaataagttttagcaatgatcggttgtaatatgacaaactatatggtctttacagttgtctcgtgcattattttgttaggccatctccaacggaactgcaaaactttaaaatagtgtgggaatgttaattttttctctccaaccaaactgtataatttacactattatagtgtgattccttttttttcaacagtatatcactatatttggtgtgtcactgtagacaacggcaaaagatagaatattattattttttacttttgtataattatatattaaaaaagcctatatagttacagtagattaaaaattatttatattgttatttaataatctaaataagttttgtaatgaaaattaatgtagcaaaactattttggtatttttgaattttaattgtatgaattattaattactcggcttttctgaaattaatacacactttggttggaaatacataatagaattcaattagccatttattatttgtaagtttatattaattaatgaattaaaaaaactattaaataataaagacaaattttagttacataatataataatagagaataataattttagtgtaatatttagtgttatggttggagatgccttaggaagatagcgaatgtttgcacaaaaattgcaatgcatttaatatccgatatgacgtcataatctcttaattaagtctcaagtactcatttatttacatatccaaatcttctaaaattaataatatttttttttggtatgaacaaaattaagcgtgttggggaaaaagaaaaaaagagagttagttgtgctaacgtagattactttgatgatatgtcttattggtaatgcgtatgaccttgtcatatttaaagaaaatctataatattaaaaaccacagactaattgtgttctaaaagtaacatgaacaataaaattttatggttatgacttgttagttttggtggaatcaaccaacactatttcaacttcttttttttttggtttaaaatattatttcaacttgattgtcaattacaaggcatgataattttggatgttagaaaaacaaactacaagttatttacaaccaaactcttattatatctttcgattatattaggaataggttagtgacaaactgaccgaggatttcgcgaagctcatttccatggttgaatccgcttgacctcaacagatttttcacactttgcaaacttcttattagtgagcatatttttgaaaaacttatggagcccctatctttattccctttgtttcaccttagcttcaagttttatgaaccttcctcatttgaggttttaagtgaatgaaagttgtttgacaaaaaaaaggtcagtgacaagctctctagtttacataagagtaaagcttgtctgtaagtgccacttctagctcgagtttgtattttcggaaggactaagaaatcatcattttgcttgctatcactgcaaaagattttttaatcatttccagtaattgttagattacttctaactttttctttttcaaatttcttttaataatgttgatttgtattttttttaattatatgttaaatatctaaaagcttaaactgaaagccaacaatttcttacaaactcttaagttataagatttgtttttatgtagtttcaaccatttctattatatatttatcttttagattttgtacttaaccagtactaatggttttgaaataaatttatttgtatttttttctctttccatttcaatgaattattgaatttataatattgccactaatctttataacaaaagaaatatacatctaaaatttataagaaaatattagaatttagagaatattctatacattagagaatattctaataatacgaaacttatctatacattagagaattttgaaacatgtaattcacaaaatcatatcctatacatatcgaatcaaataatcgtaattatgagaatggcaggccgattatacataaactagattttaacccgcggtataccgcgggatgatttatttttttaaagtaatatctattaaaacttgcaaattttatttttataaaatatttatattttacagtttataattgttattaagtaacggtataccacgaatccatgagacaattgttaaaaaactgaagtttaacccctattaaaacagcatattaataatattttaaaattttataaatattgattcaaatacatccaccatataacccaattccaaaataaaacccgttctgtaattcctttacccgtcccgtaatatttttttaaagtaataatttttaaaatttaagaattatttattatatataaaagttttgcaaattgtatcattctctaacacatttatattttatagtttaattttatatatagtaacattatacataccacataacatttttggttttatataatcttttctaaattaggatgatttgatatgtttaatattaatggtcttaaaaaataataaattaaagatttaacccgtattcaaacagtggattaattatattttatttttttattaatgttgattcaaaaacccgtctctccaaatccgtcttgccaaaaagccatttattttattaatattaattttatttatgatatgactctgaattataatctgaacattttagctaataacataggagtgcaccatatttatttaataggagaatgtaccatatgacccgaatgcacttttatccaaatccaccaaaaaagtcttgcaaaaatactgtagagataagaaacgatagtcggttttgataggtataagattagcaaatatattaggtagcttaaattagttaaagaatacaaattgaaaaggtatattacactttattcgaatataatatcaaaacttatataacacagagatttgataattgtttaattgttgaatacttttttgtgctaatttttatgtgattaagatttaattgatttcgtatataaaatattaaattgttttacgaacttatttgtttataatttggtaacagatagatatttgaatattcagtgtattttgcttcagtttaggaaatctttgatgacccgtctttagatccaataaaccttataattaagagatgaatattgttgttaaatgattttggtaattttaatgacgtcattaaagatttttgtttttgattaaatttttttaatggcattgtcatgtaattaattacaaaaattaaggttacatttaaaatgtacttcccaaataatatagtaggatatgatattctataatatttatacactgattaacaatcacgacttaaaaaattcctttaaaggtagtaaactttgtacgttcacgtgcatgcatgtttgattaatacaacgtgaggactcgaagatatgaagattttttttacttccaattataaatcacaaatattctttgtttgtgttagttttttttaattcattcaattagttcaattctaatataatctggattgatgagaatggtccaaactattttatatcgtgtaattggtagtcattcattattgcaggaatctttgatagtttgtaatattaatttaggaaacggtattttttaatgtgcaagtatgactatcaatattattcgtaaatctactcgaaatctgatgatcttcaaaatatatactactttattattctctactaattcaattaaaatatcatccagaaataccgtttataactaacactagatattaatcccaatatttttgttaaattttttttttataaataatttataaacatatgctattgttttgtttgatttaaatgtatgatacaccgtgataagataatttataactaaatatataaaattttaagttgtatctattttgttaatattgtttattttatttagtatttaatactgcattattgtattttgattgttaattctagaatttcaccgtagtatatattatgttatatcatctaagattgaaaattgtaaatgtttgagagaatttttgaccaaaaactctaccaaaaatatatatgtatatgtaattttacgtgaaataactgaagtaactttacagaattctatttagtatataatttctatgttattttttgtttttaatggtcaatctacaaaaagaaagaaattattagaacagtaagatttacatctataagatttaaaacagtataatcttgatgtatatgtaacaagaatcttgaaaacacatttccattgagatcagtcatctcttgaagtgattcgctcaatcggttaaaatgcatagcatcaagcatgggtcgaactttatcgatggtcctactcaaaataaactttcaatggcctataaatttttagatcataatccttggcttatgttatttatgctctaacccggcctacatagcatccaggtctaaaatatcaaatttaatatcaactataatgcaattaaaagagactggatgatgaagaaatcaaaccaaaacctcatcaagaaacacaagccggaatcacttttagacttgcaccagaacgcaaggaacccaatggtcttgtcatcaccaaacccaacatcgttttagctcgataccgaatacgagcccaataatgaaacaaagcctcaaacattctaacaagacctatataattggatcatccctacaaaggtggtttgtttttttcaacttttttttttggtcaaacattctacttttgttatacaatctgattttaacaggtctacgactacgtagtgaggaaaaataataactcctacaaatgtgcaactccaactagactcccattttagcatcttttacccatctccacataacatatgatcctacttttcatctgttgcatccaatcacaagtctactattccaaatcattagattcaatccaatacttctgtgattgtttcatttaaggtatatttcattttaaaaaaaaactctttatcactaaagttttcgtttattttttctttctgaaataaaaatctctccattcagctttaggaaaaaaaaaatttgtttctaagaacaaatccaaaaaatgtcttcgcatagtgatgaaatcgaagaagaacaaatatcaagaattgagaaaggcaaaggcaaagattgccaaggaggaatcgagacggttatatgtacttctcccagcattgtctgccttacccaaaaggttttaaaataaaattttattgtaattattgcatagttatatgtttataatgataacaaaattttgcgcaaattgatttatggtgttttcctttaaaattaattacagttgatagcagagatgattgggacctattttatagtattctctggatgtggagtggtggtagtgaatgtcttgtacggaggaacaataacatttccagggatctgtgttacttggggtctcattgttatggtcatgatttactctactggtcacatttccggtgcacattttaaccctgccgttaccgttactttcgccattttccgacggtttccttggcatcaggtcatcatctattcttttagccttgatcgaataagatctagattgtttcaaacattacaagttcaacgtcaagaagaagattcctttttcaaaaaatacaaaatgaacaattttctcatcttatgcaatattaaagcagtcattttcatagctattccaaaaaataaatatcatgtagattagctcgtcatttgctaaaaatattgcaagggtaattagcaaattgtagatatgaggctgattagcgtggggctgtgaacattgtactttaatttaatgatcgcaccaaattgatagatgcatgacatcagtcgtaaaaactatgagttcttttataaaaaaacagaaaacaaaacatatgtaaaaaatgccccccaaaaaaaaacaattgaaaactaagttatagtgtatgaattcaaatattggattaatgaatacaattgtataatgttttgagcaggtaccattgtatataggtgcacaatttgcgggatcgttactagcgagtttgacattgagactaatgtttaaagtgacacccgaagctttctttggaacgactccagctgattcgccagcacgagcgctcgtcgcagaaatcattatctcattcctcctcatgttcgttatctctggagttgccaccgataatcgtgcggttagtaaattcttcatattgttagataattataactgaaatggaagcttacttatggtcgtggtataattaaaacttaataatggagaaatagagaactactaagccaagaaaatttaattttgttacaaaactatgatatgaatttccactgatatgaatttccttcttgctgaatggaataatgtataaacataaaatttcacaaaacttatgactggtaaacattcgtgggtgatttcattattttgggagttagtaatcagaacctatgtactaatgtataatggatagttgagctcttcttttacaaacagttttcttcatttgagctcgctggtgcatattctaaatgccaaaaatattttcataaaatcattgtcataagaagaaaaaaaatgcaaacttacgttttttttaaaatgaatgtaaaattatattcaaccagaaaaaatgtttttacaatgaatgcgtcatagaaagttgaaactttttgagctatttgtgtcatattatacgccaaaacgagattagatgcttacctcacctccttcttcgcaaccacttcctcaaaccatccttagttgactgtattctcgtctaggtcacccttcatcttcagttcttaaaaacgttggactgttcttaatatgtttttaacaggttggagaattagctggaattgcggtggggatgactataatggtaaacgtctttgtggccgggtaaaaaatactcttatttttttgtcatattaacaaccaacctaattcataaaaagaaatatttctagggttttatatatgttaaaaatatgctttggttctgaatcaggagtccaatatgtaaaattaaaatgtttggactggtattcgaatttttcattttataaatattaatataaagaaatagaatatgaatgatttggtatggttttagtattaaatctataacatattttcatcaaatatttctaattttcgttcaagaaaaggttttacatcaggttttttagtcctactcaaataaaaataatccaaagaatggattatagtacttaatagatattgaaaaaatgaatccattaaaaaaatattaacatatatattccattttttggattagttacttgctttggtttcatatcttttttttttatgattgtaaactcctcatgattttaattatctatcattaatatgtaaaaacatttgacagaccaatttcgggagcatcaatgaatccagcaagaagtctaggaccagcattagtgatgggagtatataaacacatatgggtttacattgttggtcccgtcctaggagttatatccggaggttttgtttacaaccttatcagatttacggataagccactccgagaactcactaagagcgcttcttttctccgtgccgtttctccaagccacaagggttctagttctaagacttaatctttcttctcttagtttggtcttcttcagttgctcgttcctcttgaatattttcatgcattcttaattcattaattaacttttagtttcatctagaaagacatgatcacctctaactcttgattaaagttcttgatatccaaaaacattactaatcgaatatacaataacacaccatgttcatgtagaattcgctagagtactcccagcaaaatgtagataagatttattatagatactccacgagcacgatgaaaaagttttcgacctcttagaaagattggtatgcgctatggacatcacaaacatgcataacatgctcttccaaccaaaaattcattataccaaatcgcacaaagcacatttgtcacaatttatctccaaatttgggagaaacttaacatacaatattcacactgcgactagaaagatcctaccactaatatccagctcggtcctcatatcggattaagtaaaattatactataaatattagactgtgggcatccaacctaaaaccaattgacaataagtagagagatccatattttatatataccacttaagatcctactcaacttccgatgtgggacaatatccctaataataaataccctaccatcaagatagacatatatagtctttcaaacacacatgtacaacaatgtattctacgaagaaggtggatcaacgatcattcatggagtacgttgattcacctaaattcagtatcatcttccaaatgaataaataacccatttacagtatttatggtttttcctttgcgtcattttcgttaaggggtgggccttttgatttttgttagggtttgattcgcttttgatgtttttgttttaacaaaaatttagctaaactcaaaccaagattagtttcatttcgtctaatttactttggcttggtttcgtttgattctagttcgataaaaaaacaaacaaattaataaacattacacgaaagaaaacttatcgcaatttgatatatgatatcaaaaatagttatttattaggagaagtcaactcagttattgaaacaaaataagtaaaaaaaaaagcaatcatgcatggaaagcctcaaaacatatataaatgatttaatcaaataataaaaaattattcattagtaattattcaatttaattaattaattgttaaaataagtatatatagtttgaaaccgaacagtaattagtatacaaaaatgtcaaaaaagcgtcaactttcaaatttgtaacgaaaaaatcatgaacttttgaaataccatgtaaatcataaagttttctatgactttttttataaaatgatcaagttttgttgactggattatttcgggcatgccgtaaaattttcgtaaacggaaataatttcctctagaattttctgttaaatcaaaacgacatcgtaagtatatttcatatttgtatatattagatattctttttaattttgttatttttaatttatttcataagtttttaattaaatgtctatatatatatatatttatattcgttgttacaaatatatcaaagtgttgtcgtaactcagcggtagaaagtcccttaattggcatgagcttgttagtttgatatccgatggatgcatttttccctcattattttctatcaaaacgacgtcgttttatgagttccgtttacaaaaaaatctaaagcaacgtcgttttgatttaacagaaaattctaaaacgacgtcgttttgatttaacataaaattttaatggaaagttaactccatttataaaaacttcacggcatgcccgaaatggtccagtcaacaaaacttgaccattttatcaaaaagtcaaaataaactttatgatttaaatgacattttgaaagttcagacatattttatcccaaatttgaaagttagcgtttttttgatattttttccaattaatatataaattttgctccaattaaataagtttaggtttggttgttttggtttgaaaccaaataattagtagtaatacatactattacttagtagttagtactaattcggttcggtcaaaattaggcaatcaacgtagatacttttttctttttttttggcagataggtcaacgtaataattatagaaatacaacaaacacatttgactagctccttaactgctacaaatcgtaggcagttattagatacaaatcgtagaaatacaacaaacacattttacccatttctaacataacatcaaagcctgatcctgtttttcataaattacatctaagtacagctctatttttccaactcattagatataaaccaatcattctgtaattgtttcaactaatttctgtttcacatgtataaaagctcttcaacctccaagttctcaacccaccaaaaatttcaatttcttttctacttttctccaaataaaaaactcacatccacatttttcttaaagaaaatgacttctcatggtgaagagatcgaagacgaacaaatatcaagaattgagaaaggcaattgcaaagatagccaaggaggaatggagacggccatatgtagttctcctagcattgtttgccttacacaaaaggtaacaaacaaaattaactatttgttttatttcatagttaacaatgattataaatattttgtcacaactttgttgatttttttatatattataaaattgattacagttgatagcagagatgattggaacctatttcataatattctctggatgtggagtagtggtagtgaatgtcttgtacggaggaacaataacatttccagggatctgtgtgacttggggtctcattgttatggtcatgatttactctactggtcacatttccggtgcacattttaaccctgccgtcactgtcacgttcgctgttttccggcggtttccttggtatcaggtaaatgtctctgatctctatctcctttttcaagaagatctaaaatgtttcaaacattaaattccgcgttcacgtgacaaccaaaactttctttgcaacaacgaatataattgtataatgttttggccggacaggtaccattgtatataggtgcacaacttacgggatcattactagcgagtttaacattgagactaatgttcaatgtgacacccaaagctttctttggaacaactccaactgattcatcaggacaagcactagtagcagagatcattatctcattcctcctcatgttcgttatctccggcgttgccactgatagtcgtgcggttagtgttttcaatatctcaaacctttgtttttttcatggaagttcttatgttgttgaagtgttcttatatcttttcttttgacagactggagaattagctggaatcgcggtggggatgactataatattgaacgtctttgtagccgggtaaaaaaaaaatactatctaacaaaattctttttatcaatctattatcaacatatttcatatacaagttgaaatattaatttgggttttggattattattagacctatttcgggagcatcaatgaatccagcgagaagtcttggaccagcaatagtgatgggaagatataaaggaatttgggtttacattgttggtccctttgtcggaatttttgccggaggttttgtttacaacttcatgagatttacggataagccactacgagaactcacaaaaagtgcttctttcctccgtagtgttgcccaaaaagacaatgcttctaaatcagatggctaatttgttttttctttgtttgatatcagttttactgtgaatatttgtatccattccttattcgttaattaacttaatttttagttgaataaaatctgaaaaacatcacgtcacattgtgtgatctagacccaaaagggattttcagttttccgctaaatgaatacaacaaagcaacgagctttgttcatgtcaacaaaaccatccgacaaacaaaagttttagagcgaaaaacctatatgttacctattagtatataactatatattatgaactgaataattatgatcgactttacgctttcatatttatacaagagatagagaatctaagtgcatattcgtataagtctttagagagatattatgcctaaaatgatagatacaaatatacaatatatgatatatctatactaatattgccaacaatgttttaagctgtgatggaggcattagactccatatttgattgtgcgctaggcgtcaaactctttaagcatgatctagcgccaatggcagatatagaaaaaaatttagagggggcaatcaatatttatattttatataaataattaaacatttatatacatatatataataaaataaaatatcgaatatagtttttgttttgttgtttatggtatacataattcaatattatactatataagaaaatgaaaatgcatacaattgttttctatgaaaaaccattctgagtttaaatgaatcaaagagtaatatctaagagttagagattttgaattaacatatatattttctttgttcaacagattctaattaacatctattgatttactacatttgtactaatgtttttagtttattgttttatataaaaaacttaaatatttggaaaacaacacataataatactatacaaaagccaattaccctaattatgaaccaccaaagtttaggtgtgaacaattttccccaagattggctcttttgagcctttaacaatatttgatgacaaaaaaaaaaaaaaaaaccaccaaagttatgggaagagaccaaaaaattttaaacattaactttctagttgatacaaagggaaaaatatattatagtctacaggtggattagattaggttgttattcacatttgtaatgaagttaactaaattaaagggggaaagatacaagtaatattcatttaccttttttaggtgtaacgtgaatttgtaaattgtggggtggggggggggagagaaagagggattttttatggggggaatttaaattgaaattaattccttaatactcttcaaagattttgaaaacttagtggtggcaactgcctccttctcatgtaaggtggatccacccctatctagcgccattcagagtttcgagagcgtggatgataggtatgtgtcctgcaaatttaaatcatggttacaaaaatctgaagtaaaacagttttctagtactctattaactattactattgtagatattaaaattgttgtttcatactctcatcttgatggctactttttcaggtttttattatgatgttaaagatatctatttgctattgccggcttttcaaattataatcatgatcaaaagaaattaagaattattattatggctttgtactttctaattgtaatcaagttaatgtttcaaactttctttctagggacaaaaataggtaatctcttttatggtattttaaataaaattaacacactattttaaattataatcggggtaagcatatacactcattgtcttgactaatgtaaaccattgtatcaaagccaatacttgacccaccgatctatacccgaacataccaaaatcaatggttaaaacttagaagggtcaccatctcgaaaaaacatattataaataataatattacatactagagatgggaaattaaagatctggactaatatataaaatatatgggtcaattaatttattaccaattattttgagttagaagcacatattctaattcaaaatcatcgtgttgacggaaaaaaagtcggcctaaactagcacgagtaaaactatatacttatgcaatgtatatcttattaaaattcaaatatacaatcgatacaaatttatatttatatcttacatccgcttatttagtcggaccttacctagtaaaattaaaaagtaccattataaaagtgtcggcctaaaatattataagtgaaatggaacattttgtgcaaagttattaattattttactaatgtgcatgtaccattttacgtactcttccacataaactagaaaattatgcaaattaggcatttttattacaaataattttgtaactatgtactttaaaaaaaattgtaaaataggtagtgctgtcttttcctcttataatacaacacaattgtaacatgaccaacttaaccttttactctttttttctttttttatcaaaaacttttactcttttcatttgttcacataaagatcccacaaaaatcaattataaaatcatactttttttttctcctttacatttttaatttgattttgttataaatcatcctaaaatatttaccacagtaacattttaaaataataattttatttttgtgaatctaaagaacctaattttgttatatatttgtagatacgtaatcttctattttgttttaactcaactcaacggtgtacaaaatcatataaaagattacatactttaccaattatttttgaaaaatatctactttatcaaaaaaacttataattaatctatagtatattagagcagctatatcattatcaagatatgtaaagtagatatttttattaaaaaaatgttaaatagaggaaaaataagaagataagatagagacttagataacatatgacattcatagttaaattattaaaataatatatatacatatatatgattaaaaatattattttactttacttttatgtgatttcaagatattcgaaccaataaagatgctcctactatctaggttttttgatacttcttttgttcttttttaattttctagcttttctactacctatgaagaatagaaaatcaacgacacttaggcatgttaatcatgctagcaaggcctagtccgacctatattttgcaaggcttgttgggcttgttagaatcggttctcatgaacattaacaagtatcaacaaccataagaaacccttcccgctcgtatgaatgctcatcatgtttgtcttggagaaaaatctctaccaatcgaattggacaacaaatttgaagaagatgaagaagagcataaagaagaagatgttcccaatatgtaatggttatggattatgaccaacttccaccaaaagaaagatcattttaatcttgctatatgtcgtagtgtgctgaatatctcttctttgtaattctacatactaacgaagattttagtctaattttttctttattttattttatttgttatagaaagaaattgggaaattgtaccattgctttttgtggggtaaacttttctaattttctaacactcagatttgacaaagaaagattttgtcatattttattttattttaactaattcatactattagagtgctagaaaagtctcacatgggaaattggataatttctacactagtatataatgtttatgggtgtctccactcattctcaattgtttttgagttggatgccatgattcctaatatggtatcagaaccaagttttattgaatctattattgtggctcattctggttagtttcaatgcatacttggatttctttaatgttcattaccaagaccactagaggatcattgtaatttagttttgatcatgtaggttcatcgttcccaatcctttcatcttgaggaggaatattaaagtttatatagctggtttagttatggtttaatttggttaatatctttggtttagtttgctatgtatttaagcttaatcatgtatacattgacttgaataaagaaaatatcttttctcatattatgttttctcttgaactctccctaatggaaaatagcattaatatggtatcagagtccaatattagcgcaacagacgatttttcacatagacgatttttcatctatgacatgtacaagtaaatcattttgttgtaatatttctgagataatggacttgattcatttttattggaccgtttttcacccatatcttaagaagatttattaaaatattaaaaaaatccaacataaaagttgggtaatttatgcattaatagataatgttctatattcattctcaattagttttgagttaaaagcttatatgtaaacaaatgtgacatttgaaatgtcaaatactagatcccgtccgtaggatagacgggcaagttcaagcgtatgaccaccaaacttttgagtttattgaaggtcatattttttgataaatataatggattttagccttttagggagcaatattcataagcccatggtttcatttaaaacaatatcgtttattttagaaaatagtttgtgaaggccacatatttctaattttccttctttaatatggtggacaaaaaaaaagcaaaatccttcatttaattgtatcttacctaacttctcatctttctatccctttttttgccttttattttcttttgtattccttttaaaaattaattagaattcaaatttacacaaaataggaaaaaatacattactacgacaaattatacaaggggccacttttttttttggttgcttcagacgactagttttgttggaccgatcatagcagacacaaatctcttttcaatgtcgacaatggcatcaatgaaatccagccaaaagtcttggaccagcaatagtgatacataagtacatacaacaacaactaaaacttattcaccaagacaatttattaccttgtttctaatgaatcaagaatctgatccttatttcactgaaaatggccaaacctccaaagaatatccggctaagagacaccgaaacaacaacaagacacataaacaactaatttggattatacgttaaatgaaggagtaatgaagttcgagaagagacttatgaggaggagatgaattgtttatatgttggagccgaatccgccaccgcctggagtaagaatctgtaagatttcaccggcttctacgtgtaccgtattcttgcctccaagatagattcttcgtttgtctttagtgatgagatagtttgctccacggagtccattttggccaccgttcaatccacgtggcgagtgaactcttctctctgagaggatgctaaccactacaggctttctaaactctatctctctcaccaatccatcgcctcctttatgcaacccattgcctccactattctctctcaatccaaatctatgcaacagaaccgggtacctgataaaaacccatgtgttagtctagtgcaagtacgtctgaccattcagtttttttcatagctacagaactaacaggatgtttcagcacctttgctcaaagatctcgggatcagtcatccgcgtgttagtcatatggcattggactccgcttgtcccgttccatgtgggtccggctccgcatccaccaccaatggtctcgtagtacccaaatgtgtcgtctccaaatgtgagattgttcatgcatccttgggaacaagcacaagcctggaatgctgttaggacaacatctgtaactctctgggatgttagaacgttgcctccaacaacagctgctttttcgcttggagacaggaatgaaccagcgggtatgcggatctcaaccggagctaagcagccttggtttagcggaatgtcgacattaaccaaacaacggaggcagtaaataaccgctgcagatgtaactgcttctggggcattccagttaccgtagacttccgggcttgtgcctgtaaagtcaaaggaggcttctcctttgtcggcatcaattgtgagttttaagtgaattatggatccatcatccatgtaatcctcttcttctatggtcacggagttaccaaccctggaatttggtgtttccgaggaaactctattagctacagacttcagcatttctctcactgcttcttcggcgttaagctgaacgtatttcatgtaagcctgaacagttccaaggccatattgctcaatcagctctttaattagagaaattcctctttggtttgcagctatctgagcttggagatccgagagattgtcctgaatccgtctggttcctggaatcttagttgttgtctcatcagaagaagggaattgaagaagttttacaattccttcttcctgaaaaacacctttttcaacaactttaaatgcttttatcgcagctccttcctcccaaatcgcctttgagaacggaggcatgcttccgggagttatgcctcctacttctgcgtggtgacctctactagccacaaagaacacaagctttcccttgtcaaaaacaggtgtgataacggttatatcaggcaaatggctaccaccggcgcaaggatgatttgttaccaaaacatctccttcgttcagattttcaccccaatgtttgagctgccagcgaactgtactggacatggcacccagatgaactggaacatgtggcgcattagcaactaagccaccgtcaggactaaacaaggcgcatgaaaaatccaatctttctttgatatttgtcgatatggaagtacgttgcagggttcttcccatttgctcagctatacccatgaatctgtgattaaatatggatagctgaacaacatctgcaacattctctgcaagcttcacactgctcgttgctggctctacctcaattttaatgtttccatactttgtaatgatggctttgcactgaggttctacaataactgtactgttcccgttcatgatgatcgcagggccgagaatctcatggccaaaacctaaattctccaacttgaacaacggtgtgtcatgccatccgccttcaaagtaaaccttgtagtgcctttcaaccttaggagtgacaggggcagcttcaactgcccgtggttttagtatactagtcactccaattccccgaacccgaacatcacatatgagaagatttctgttttgaagtttaaatccatactcttgctcgaaaagcttgagaaactctgcagcataatcaaatgccgacccatctccagtttttttaccctttaccatgatagctgtatctgtcccatcatatcttaagttcaaatatgtctcagtggagatatttccatcaccaaacccctgttcctggagcttttctctcacttctctcagcaataccgtttcccttctaaagacctctgaaagagattcagggccataaacagctgaatatggctcttgagcatcttcaatgacatctgccaaacccattccataagcactcaaaattccacagtatctgtgaacaagaacttctttcatgcccaaagacctagctattgcacaagcatgttgcggtccagcacctccaaagcatgcgagtgcatgattctttgtttcatgacccttcatctctgtcagttgccgtatgggacggcacattgtctcgttagcaacactcacaaaacccattgctatttcctccacagacatgtcttttgcagatggatcctggctctttctatatatattaatctgtcctgcaagcttttcaaatgcttctcttgttgctgctacatctaagggctgatcttcattgggcccaaatatggatggaaaataatcaggaataacaaaccccaaaacaagattcgcatcagtaactgctaactcacctcctttccggtaacaaactggacctgggtgagcacccacagaatcaggtcccactcggaaagcaccaaactgaaactttagtttcgacccaccaccggcagcaacggtatttatgtcaagctgtggcgcttgtataattgttccagcaatctgagtttctataacttgctcataacttccatcatagcggctaacatccgttgacgtaccacccatatcaaatccaatcagcggtttttcagtttcaagaccaaagagtgtctgtgagtaaccaacaactcctcctgctggacctgataacacagccttatgccctgaaaacctactttctggtgctaaacctccatcagattgcatgaataaaacattcactttcccaagatcatcatcaaatttggaaataaaacccgacaagtactctttaatcactggtgtcaaatacgcatccacagtagctgttaaaccccgaggaacagcccgaaccatgggtgtcaaagcagaagacaacgaaacatgtctaaaacccatctctaaagccaacttctccacatccatctcatgcttcggataagtatacgaatgcatcaaaacaacagccaaacaacttatccctttatcaagcaaacccttcaacaaaggtttcaaaccttctccatcaaacggcttcacaactctaagaaactccccagacactcctttaatcaacgacccttcatcatcatcatcatcttccaacgcaagcacaactctttcatcaacctctataacctcctcataaagattcgacggtttcgcaacagtaagatcaaaaatatcaggtctagcttgattacctatctgcaacaaatctttaaaccctttagttacacacaaagctattctttcacctttcctctctaacaaagcattcgttgccacagtagttcccattctaatccactgtatcttatcagttggtatcttcgacgttcttggtatcttcttccctgtatactcctcgagtattctccgaattccttcgaccggagcatcgtcgtaattcgatggatcaactgataaaagcttcaacacatgaccatcggaatgtcctggaatctcagcgtatacatcagtgaaagtacctcctctatctatacaaaatcttagctttccttcgattacagttcccatctcactctctctgcataacccaacaacgaaattacactaaattaccaattcacaacaacgatattgagagatcataacagcaattttagatagtatcgattaaaatgaaactacgagagaaggggtttgtaatcaaaatccagatatttatgaaagtaccttgctttggtggcgaagatcgttgaaggatcgagttttagcgaagagtcaacagtgtagtgggtgaatgatgaagaagatgaatcaggtggtgatgatgatgagaatgtgaaggatcttcttttgcttttccggttttactaaaccatttcggtttttggttggttagaatttaaaacggatataatcataaaccccacggtatgaatgaatgtgttggcctaatttgtgtaatgttatctactggaccggatcgggatattcgattttgaataacgaattattaacattttagaggccacatttctatataaatttattgtttatttactttttaattaatataattagattatatgatgaaatctcctataatatcatactttaaaattatttcttaaaacagatgtgtatatccatattacgaaactttacatacatactaatatgcacataagaaaaatcgtttttttttgttacatgttgggaaaatataaaattgtaaaatacactaattataatgattttctagtattttaaatcatattttgttaaaaccaaaaaattgagtgttaagtaaaaaaattacaaaaaaacatatatctttttcactcttcttcttttttaaaggacgaaaaatgactaattaaagctttaatttcaattttccttcttttataggcacactctaggtttgggatatatgtttaaactaaaatgtcatatagttacaagttgccttaaacctctcaaaacatgggcacaccatttgccttaaacttctcgaaacatgggcaccaacccgggagcagagtccccaccggcaagggggacatgagactgccatcccccttttatcccgcggattccgttttttgtcctaaaatttttgagctaggttagtcataggattatttggaaacacgtctttcctattccatcttttctcgaatttcctagtagataggtacatcatctgtattttaagcccaccactatgtgaatgtgcgatgtttatctattagaccggatcaggatattgggtttagcgcgaaagtaggccaataaccgtgatatcccaattttgatttttactattactcagattcgaatctatcgcatccggatatccgattgaattttggatccggatctaattagcctaataaagtttgatacattaggattgagttagcgtaattagctactacactatgatatatattgggattggatagcttaagcatatttaattgagacattggtggacgcatgttaaaattatagctcatgggcggtagtaaaaatttgactcgaactttctgaatgttgattaaaaattggtggtaaatgtctcatttcgtttttgacatcatagtagagatgatagctagatatgcccataaaaatatatgagtcctaaaaacaaataaaaaataagaatcctaacaaatgcattttgaagtagtggacaatatgtaattgctggctactcttgctttgtacttcatagaacaacgatctctcctcttcctcctttctctgcgaaactcacatgcttctgcattttatttggaacaacaacgttttataaaatgtcaaatacaaacaaagagatctcctttagtttgcgtgttcatttcacaaatatattcatggcaaaaaaaatataaaaaaaatatgagttacagtttgaaacaacgaaacccaaagtacattaaatgcggatttgatgtttgatcatatactatacatagtgataattcatcatacgttctggttccaaaaactttaggcaattgagtagcataaatattaatgtcttcatgactattgcatgtagtttattggtttgtaatagtttctttgttgatgtgtcaccatttatattcaaatcggataaaatgcatgttgttggaaaaaaaacgtaatttcaaatatttagctatgctataagacctttgttttagttatgcacttatgctatatataagaccttaggattgataacttcaaatgtatttcgatcatgtaattttctcggacatttacctctcgtgctttgtaatggttgtttatctccgcaattccaagtctctggcgaaggccatcgttatccctaccgccttgtatcccaccggaactctccatataagcactgataatcttcgctgccacttccgaagcatcatggctctcttccattaactttgttatctgagacctaggcagccttaacctcaccctcgtatgtccaagctcaggcccatctcctactacgtcagatcttgctgcaccaacatcagaaaccgttctccttgaaagcattaacatctctaaacgctcctttgcgccaacatgtatattaccggacataactctccggtatgg
